United States Patent Application Publication US 2011/0183924 A1 - sequence listing, part 89

SEQ ID NO: 296522 - DNA, 1473 bp, Homo sapiens
ggcggggcggccgggccgcggcggcctccgactggatacggcggatcgccgggggcctgagggtggagtcccggccggaggcaggccgggactctggtgggtctaggcgcggatcggacccaagcaggtcggcggcggcggcaggagagcggccgggcgtcagctcctcgacccccgtgtcgggctagtccagcgaggcggacgggcggcgtgggcccatggccaggcccggcatggagcggtggcgcgaccggctggcgctggtgacgggggcctcggggggcatcggcgcggccgtggcccgggccctggtccagcagggactgaaggtggtgggctgcgcccgcactgtgggcaacatcgaggagctggctgctgaatgtaagagtgcaggctaccccgggactttgatcccctacagatgtgacctatcaaatgaagaggacatcctctccatgttctcagctatccgttctcagcacagcggtgtagacatctgcatcaacaatgctggcttggcccggcctgacaccctgctctcaggcagcaccagtggttggaaggacatgttcaatgtgaacgtgctggccctcagcatctgcacacgggaagcctaccagtccatgaaggagcggaatgtggacgatgggcacatcattaacatcaatagcatgtctggccaccgagtgttacccctgtctgtgacccacttctatagtgccaccaagtatgccgtcactgcgctgacagagggactgaggcaagagcttcgggaggcccagacccacatccgagccacgtgcatctctccaggtgtggtggagacacaattcgccttcaaactccacgacaaggaccctgagaaggcagctgccacctatgagcaaatgaagtgtctcaaacccgaggatgtggccgaggctgttatctacgtcctcagcacccccgcacacatccagattggagacatccagatgaggcccacggagcaggtgacctagtgactgtgggagctcctccttccctccccacccttcatggcttgcctcctgcctctggattttaggtgttgatttctggatcacgggataccacttcctgtccacaccccgaccaggggctagaaaatttgtttgagatttttatatcatcttgtcaaattgcttcagttgtaaatgtgaaaaatgggctggggaaaggaggtggtgtccctaattgttttacttgttaacttgttcttgtgcccctgggcacttggcctttgtctgctctcagtgtcttccctttgacatgggaaaggagttgtggccaaaatccccatcttcttgcacctcaacgtctgtggcccagtcttggcttcttgtcccctcctggggtcatccctccactctgactctgactatggcagcagaacaccagggcctggcccagtggatttcatggtgatcattaaaaaagaaaaatcgcaaccaa

SEQ ID NO: 296523 - DNA, 852 bp, Homo sapiens
ccttcagactccactcttccagcctttgtggctcctcctggagggttggggtggatgtgtggatgccacagagaagctcagtggtgggagggaatttgagtccattctgtccttgtctcaacccattcccctggtgctctcagtgtctcaaacccgaggatgtggccgaggctgttatctacgtcctcagcacccccgcacacatccagattggagacatccagatgaggcccacggagcaggtgacctagtgactgtgggagctcctccttccctccccacccttcatggcttgcctcctgcctctggattttaggtgttgatttctggatcacgggataccacttcctgtccacaccccgaccaggggctagaaaatttgtttgagatttttatatcatcttgtcaaattgcttcagttgtaaatgtgaaaaatgggctggggaaaggaggtggtgtccctaattgttttacttgttaacttgttcttgtgcccctgggcacttggcctttgtctgctctcagtgtcttccctttgacatgggaaaggagttgtggccaaaatccccatcttcttgcacctcaacgtctgtggctcagggctggggtggcagagggaggccttcaccttatatctgtgttgttatccagggctccagacttcctcctctgcctgccccactgcaccctctcccccttatctatctccttctcggctccccagcccagtcttggcttcttgtcccctcctggggtcatccctccactctgactctgactatggcagcagaacaccagggcctggcccagtggatttcatggtgatcattaaaaaagaaaaatcgcaaccaa

SEQ ID NO: 296524 - DNA, 761 bp, Homo sapiens
ggcggggcggccgggccgcggcggcctccgactggatacggcggatcgccgggggcctgagggtggagtcccggccggaggcaggccgggactctggtgggtctaggcgcggatcggacccaagcaggtcggcggcggcggcaggagagcggccgggcgtcagctcctcgacccccgtgtcgggctagtccagcgaggcggacgggcggcgtgggcccatggccaggcccggcatggagcggtggcgcgaccggctggcgctggtgacgggggcctcggggggcatcggcgcggccgtggcccgggccctggtccagcagggactgaaggtggtgggctgcgcccgcactgtgggcaacatcgaggagctggctgctgaatgtaagagtgcaggctaccccgggactttgatcccctacagatgtgacctatcaaatgaagaggacatcctctccatgttctcagctatccgttctcagcacagcggtgtagacatctgcatcaacaatgctggcttggcccggcctgacaccctgctctcaggcagcaccagtggttggaaggacatgttcaattagacttagcacctcacagatgcttgggcctggaaatgaagccatgaaaatgaagccctcagccttcttggagatcagagccatggtcctcacccacagcacatgggtctctaaacctggacctcaactcgcccatctgtaaaatgaggaacttacattaaattcctacagctcctttcagcttga

SEQ ID NO: 296525 - DNA, 805 bp, Homo sapiens
actggtctccctggaacttcattctctcctctttccccttcctctccccacccagcatgtctggccaccgagtgttacccctgtctgtgacccacttctatagtgccaccaagtatgccgtcactgcgctgacagagggactgaggcaagagcttcgggaggcccagacccacatccgagccacggtgaggctgtggcctagccctggtgggcacagggtggcgcaggccctccccacccacacacaccgttcaggaagcccatgttcagaatgtgccgctcagagctcctgggagtggactgggcacagaactgggtgctgctgctccaggcatggccctatgcagcccttcatttcctcatttcactgatccaggagccaacgaccagacttagactttgagctgggagggggctgacctgagggaaagcaagggactgtgggaaaccaggtgcacagtggctggaaaccgggactctgggctcttctcttgaaggccgcatgatcgtgagcgagtcactgaacctccctaagcctcggccttctcacttgtgaaaaggagatgatgagcttttcagggacacttttttgtaaaacgtttacctgacatataggaaaggctctgtagatggtaggtatcattgtggtcactgccagtggcagcttcggagggaggaggccgctgccggatatcaggcagccatcactgtgaagctggggttctgtggcctccatcctctcccctcgacctccccaagacctggcaaagctcagcccctgagaaggccctctctgttggcccag

SEQ ID NO: 296526 - DNA, 672 bp, Homo sapiens
gtcgagcgccaccgcggtgttggcgagtgtgaagagagaggaggagcgtttgcggcctcagcgtctgtcaacagaaccctcttcacccgtggttaaaccctccctaaccctgagctcgtgctcccctcccggtggacgcagacctgaccacagaagccctgcagcactcactgggggcttgagggagcccctgagtcccctccaccctcgccgccttctcctgggtacccaggaaacgtctccaagggaggctgtgacccaggaccccgcctcgacctcaccttcttctgtaaggcgcagtgaaagacgaagatgaagaccccctggaaggcgttgaaggtggtgaagagataggccatgaccaccgactccttgttgatgaagaggaggccgaaagcccaggaagagcagctcagccaggaagaggttgatgcacaggttcttgtggatggtgttgcggtcggtctgcagcccccgcaggaagcagaaggtggagatgcagatggccaagcagaccagggagatcacaatgcccacccagtgagagcctcgaagatgtaatcacagagagagagagagagagagcgagagagagacagagagaggagcatcggctcaccaagaaggcctgtcctggtcccaggggccacagcgggatggcccctaccaacc

SEQ ID NO: 296527 - DNA, 465 bp, Homo sapiens
gggcattgggaaagaaacacatagacggggtggcgggggtgggggtgcatgctccagggtcatggtgtcatagacacccccaaattgggaaggggcagtggagctggaaaccaagtgatatagtttggatctgtgtccatacccaaatctcatgttgaattgtgatctccagtgttggaggtggggcctggtgggaggtgattggatcatgggggcagtttctaatgaatggtttatcaccatcccctccgtgctgttgagatctggttgtttaaaagtgtgtagcacctcccctgttctcttttcctcctactccagccatgtacggcgtgcctgcttccccttcaccttctgctgtgattgtaagtttcctgaggcctccccagaagcagaagctactatgcttcctgtacagcctgcagaactatgagccaattaaatgtcttttctttataaactacccaa

SEQ ID NO: 296528 - DNA, 549 bp, Homo sapiens
gtcgagcgccaccgcggtgttggcgagtgtgaagagagaggaggagcgtttgcggcctcagcgtctgtcaacagaaccctcttcacccgtggttaaaccctccctaaccctgagctcgtgctcccctcccggtggacgcagacctgaccacagaagccctgcagcactcactgggggcttgagggagcccctgagtcccctccaccctcgccgccttctcctgggtacccaggaaacgtctccaagggaggctgtgacccaggaccccgcctcgacctcaccttcttctgtaaggcgcagtgaaagacgaagatgaagaccccctggaaggcgttgaaggtggtgaagagataggccatgaccaccgactccttgttgatgaagaggaggccgaaagcccagccatgtacggcgtgcctgcttccccttcaccttctgctgtgattgtaagtttcctgaggcctccccagaagcagaagctactatgcttcctgtacagcctgcagaactatgagccaattaaatgtcttttctttataaactacccaa

SEQ ID NO: 296529 - DNA, 3493 bp, Homo sapiens
  misc_feature (11)..(11): n is a, c, g, or t
cctggtacgcnccggaagttatgggatcggacaccatgcagtcggatgatgttatctgggatacactaggaaacaagcaattttgttccttcaaaataagaaccaagactcagagcttctgccgaaatgaatatagcctgactggactgtgtaatcggtcatcctgtcccctggcaaatagtcagtatgccactattaaagaagagaaaggacagtgctacttgtatatgaaggttatagaacgagcggcttttcctcggcgtctctgggaacgggtccggcttagtaaaaactatgagaaagcactggagcaaatagatgaaaatctgatttactggccccgtttcattcgacacaaatgtaagcagagattcaccaagatcacccaatacctaattcgaattagaaaacttacactaaagcgacagaggaaacttgttcctttgagtaagaaggtggagcgtagggagaaaagaagagaggaaaaggcattaatagctgctcagctggacaatgccattgagaaggaattactggagagactgaaacaagatacgtatggcgacatctacaacttccccattcatgccttcgacaaagccctggaacaacaggaggcagagagtgactcttcagatactgaggaaaaagatgatgatgatgatgatgaggaagatgtggggaaaagagaatttgtcgaagatggtgaggtagatgagagtgacataagtgattttgaggatatggataaactggatgccagcagtgatgaagatcaggatggtaaatcctccagtgaggaggaggaagaaaaggcccttagtgcgaaacacaaaggcaaaatgcccttgagaggaccactgcggagaaaacgagcctatgtggaaatagaatacgagcaggagacagagcccgtggccaaagccaaaaccacgtgatttccctttcagcatttatacccaggactgaacatgcagaactgtttttttttttttttttatcttaaacacatacacacctccagtttttgctcttttgtgttgtactgaacacaatatttgtgtttttattatttatgccacgtcagtggggcaagaaatctggagtgagtgaagaaagctaagttgtgaacaagagtgtttttatagcatatgtgttgaagtaacagcttgtgcccgagaaacttaacagatgagttcttgaatctgggatgagatgacggatgtaaatatttctaaattttaaatgctacattacttggtgtccttttttctcccaaactttatttagaaatggaaggagttcaattttttcttgttctactttccctattcttatggaggtaaaaggaaagaaggaaggaaaaagcagctttcacttacaaagtttcgtgtaaaaatatctttttttcttaaataactccattcatacaaattgggatgggaagaaaatcctttcctcttgggaaagtaatacaagtcttaagttccattgtagggtgcgccttcagaaacctgctgcacttttctgatatagttcaccacttttctgtcttcacagctttggggaattttggccaggagaccctgaaacatgaaaccaaacaggctttgatatttttttttttttaattactttccccttttgcttgattcttcttccttggtatcatattcaaaggaggaaagaatggatgacacttagggacaggtcactaagcagaataggtattagttggttttttattatttttaaatttatatagctctcatgtattgaaggtgctactttaaaaactgtgttaatgtacttgcaaatctcctgctggctcatgaaacagcagaattccagccaaggcaaattcagttggatctagggcttgaaaactgcccaagattaaagagctaagatgaaatagtttgaataaactggtaaaataacaattcatactatctctacatatttttaggatatgaatttttttttcctgctgggtagattgtccagtgacttatggcatgaatttcttttcatgctaccttcaatcttcaactaaagatttctaaaaggggtaagaaatgaggcagtagtttattaaatacatagaagtacacagctattatatgctgtggctttgagaagttaacttttgtggaatatgaaaccaaaggaagaatttccatgtagataaattaagaatagggaaaaacatctacctaaaagatggttgtccctaaaaaactggaaacatctgaaatgctctatttatgttattattcctgggagcttatagcccattatttttactttttttttttaattcagaagactagaacagaacttaaattttacaaacttttgatcataatgcttttgcccatactgtctcgtccttagccccagtgacatgtgctgatcctcctgcctttagttctaaatggttctgaatagctttaaaagatgaataagaaaaaagatcaagctcttttgaggctagagggctcatatggagatctaaaaccctccatgttcatttccagacttggtcaggcacatacatagtaaattataatcaatcatgggaattacataaggataatgaggcccaactgaaaccaagtttcagtctgccttacctttacccgtccttgagaacagcggtccaggagaatcaggcagtctgtggcctcctgtagcagggcgctcttaacagactcaggtgtaaggtttggatcccttgctacatcacaaatcagtttcaagagggccttcagtaagaccacaagtctgcaggaaactctggaatcaggaagaaaagctatgttcatactctaaatctggatattaaaattggaagagacttcaaagactgtcaagtggaaagctatcatttcctaaattaaggaacttaggtcaaagttaaatgaaaaagacctaaaaacagaaccaaagacagcctctagatttcttaccctcaagtctcctgttagcatactgcctatacacacagacacaccctctgccacactgctctcttccttccagaagcttggttctactgtaagcaacagctccttcatgggctgagaaggggaaaccaggatctccccaaccaagggcctatacttttatttttcaactctattaactgaactatgcttggagagagccctgaatcctttaactttaatgccatcttaggcctggaagttagagtgagggaaatgagcttggcttctgggactgtgtcaagttgaattttctgtcatttaatttcagatcctagctcatcatcagtgaagtccagcctacttacttgtaactattaacctttctaaaagttttcatcgccttggtaaagctccagaaatggacaatgctagtgactgcacaatattgtgactgtacttaatgccactgaactgtacactttaaaatggaaaatttatatgtatttttaccacaataaacaaaaaaccctaaaaaaacttta

SEQ ID NO: 296530 - DNA, 3586 bp, Homo sapiens
  misc_feature (11)..(11): n is a, c, g, or t
cctggtacgcnccggaagttatgggatcggacaccatgcagtcggatgatgttatctgggatacactaggaaacaagcaattttgttccttcaaaataagaaccaagactcagagcttctgccgaaatgaatatagcctgactggactgtgtaatcggtcatcctgtcccctggcaaatagtcagtatgccactattaaagaagagaaaggacagtgctacttgtatatgaaggttatagaacgagcggcttttcctcggcgtctctgggaacgggtccggcttagtaaaaactatgagaaagcactggagcaaatagatgaaaatctgatttactggccccgtttcattcgacacaaatgtaagcagagattcaccaagatcacccaatacctaattcgaattagaaaacttacactaaagcgacagaggaaacttgttcctttgagtaagaaggtggagcgtagggagaaaagaagagaggaaaaggcattaatagctgctcagctggacaatgccattgagaaggaattactggagagactgaaacaagatacgtatggcgacatctacaacttccccattcatgccttcgacaaagccctggaacaacaggaggcagagagtgactcttcagatactgaggaaaaagatgatgatgatgatgatgaggaagatgtggggaaaagagaatttgtcgaagatggtgaggtagatgagagtgacataagtgattttgaggatatggataaactggatgccagcagtgatgaagatcaggatggtaaatcctccagtgaggaggaggaagaaaaggcccttagtgcgaaacacaaaggcaaaatgcccttgagaggaccactgcggagaaaacgagcctatgtggaaatagaatacgagcaggagacagagcccgtggccaaagccaaaaccacgtgatttccctttcagcatttatacccaggactgaacatgcagaactgtttttttttttttttttatcttaaacacatacacacctccagtttttgctcttttgtgttgtactgaacacaatatttgtgtttttattatttatgccacgtcagtggggcaagaaatctggagtgagtgaagaaagctaagttgtgaacaagagtgtttttatagcatatgtgttgaagtaacagcttgtgcccgagaaacttaacagatgagttcttgaatctgggatgagatgacggatgtaaatatttctaaattttaaatgctacattacttggtgtccttttttctcccaaactttatttagaaatggaaggagttcaattttttcttgttctactttccctattcttatggaggtaaaaggaaagaaggaaggaaaaagcagctttcacttacaaagtttcgtgtaaaaatatctttttttcttaaataactccattcatacaaattgggatgggaagaaaatcctttcctcttgggaaagtaatacaagtcttaagttccattgtagggtgcgccttcagaaacctgctgcacttttctgatatagttcaccacttttctgtcttcacagctttggggaattttggccaggagaccctgaaacatgaaaccaaacaggctttgatatttttttttttttaattactttccccttttgcttgattcttcttccttggtatcatattcaaaggaggaaagaatggatgacacttagggacaggtcactaagcagaataggtattagttggttttttattatttttaaatttatatagctctcatgtattgaaggtgctactttaaaaactgtgttaatgtacttgcaaatctcctgctggctcatgaaacagcagaattccagccaaggcaaattcagttggatctagggcttgaaaactgcccaagattaaagagctaagatgaaatagtttgaataaactggtaaaataacaattcatactatctctacatatttttaggatatgaatttttttttcctgctgggtagattgtccagtgacttatggcatgaatttcttttcatgctaccttcaatcttcaactaaagatttctaaaaggggtaagaaatgaggcagtagtttattaaatacatagaagtacacagctattatatgctgtggctttgagaagttaacttttgtggaatatgaaaccaaaggaagaatttccatgtagataaattaagaatagggaaaaacatctacctaaaagatggttgtccctaaaaaactggaaacatctgaaatgctctatttatgttattattcctgggagcttatagcccattatttttactttttttttttaattcagaagactagaacagaacttaaattttacaaacttttgatcataatgcttttgcccatactgtctcgtccttagccccagtgacatgtgctgatcctcctgcctttagttctaaatggttctgaatagctttaaaagatgaataagaaaaaagatcaagctcttttgaggctagagggctcatatggagatctaaaaccctccatgttcatttccagacttggtcaggcacatacatagtaaattataatcaatcatgggaattacataaggataatgaggcccaactgaaaccaagtttcagtctgccttacctttacccgtccttgagaacagcggtccaggagaatcaggcagtctgtggcctcctgtagcagggcgctcttaacagactcaggtgtaaggtttggatcccttgctacatcacaaatcagtttcaagagggccttcagtaagaccacaagtctgcaggaaactctggaatcaggaagaaaagctatgttcatactctaaatctggatattaaaattggaagagacttcaaagactgtcaagtggaaagctatcatttcctaaattaaggaacttaggtcaaagttaaatgaaaaagacctaaaaacagaaccaaagacagcctctagatttcttaccctcaagtctcctgttagcatactgcctatacacacagacacaccctctgccacactgctctcttccttccagaagcttggttctactgtaagcaacagctccttcatgggctgagaaggggaaaccaggatctccccaaccaagggcctatacttttatttttcaactctattaactgaactatgcttggagagagccctgaatcctttaactttaatgccatcttaggcctggaagttagagtgagggaaatgagcttggcttctgggactgtgtcaagttgaattttctgtcatttaatttcagatcctagctcatcatcagtgaagtccagcctacttacttgtaactattaacctttctaaaagttttcatcgccttggtaaagctccagaaatggacaatgctagtgactgcacaatattgtgactgtacttaatgccactgaactgtacactttaaaatggaaaatttatatgtatttttaccacaataaacaaaaaaccctaaaaaaactttaatgaaaggtggaaaataatttaacttataatgtgaaaatacaatgtgaaatgtacaataaatcatatttatggacagaaaaatgactgggaga

SEQ ID NO: 296531 - DNA, 3489 bp, Homo sapiens
accggaagttgcacgctgagccgcggacaccatgcagtcggatgatgttatctgggatacactaggaaacaagcaattttgttccttcaaaataagaaccaagactcagagcttctgccgaaatgaatatagcctgactggactgtgtaatcggtcatcctgtcccctggcaaatagtcagtatgccactattaaagaagagaaaggacagtgctacttgtatatgaaggttatagaacgagcggcttttcctcggcgtctctgggaacgggtccggcttagtaaaaactatgagaaagcactggagcaaatagatgaaaatctgatttactggccccgtttcattcgacacaaatgtaagcagagattcaccaagatcacccaatacctaattcgaattagaaaacttacactaaagcgacagaggaaacttgttcctttgagtaagaaggtggagcgtagggagaaaagaagagaggaaaaggcattaatagctgctcagctggacaatgccattgagaaggaattactggagagactgaaacaagatacgtatggcgacatctacaacttccccattcatgccttcgacaaagccctggaacaacaggaggcagagagtgactcttcagatactgaggaaaaagatgatgatgatgatgatgaggaagatgtggggaaaagagaatttgtcgaagatggtgaggtagatgagagtgacataagtgattttgaggatatggataaactggatgccagcagtgatgaagatcaggatggtaaatcctccagtgaggaggaggaagaaaaggcccttagtgcgaaacacaaaggcaaaatgcccttgagaggaccactgcggagaaaacgagcctatgtggaaatagaatacgagcaggagacagagcccgtggccaaagccaaaaccacgtgatttccctttcagcatttatacccaggactgaacatgcagaactgtttttttttttttttttatcttaaacacatacacacctccagtttttgctcttttgtgttgtactgaacacaatatttgtgtttttattatttatgccacgtcagtggggcaagaaatctggagtgagtgaagaaagctaagttgtgaacaagagtgtttttatagcatatgtgttgaagtaacagcttgtgcccgagaaacttaacagatgagttcttgaatctgggatgagatgacggatgtaaatatttctaaattttaaatgctacattacttggtgtccttttttctcccaaactttatttagaaatggaaggagttcaattttttcttgttctactttccctattcttatggaggtaaaaggaaagaaggaaggaaaaagcagctttcacttacaaagtttcgtgtaaaaatatctttttttcttaaataactccattcatacaaattgggatgggaagaaaatcctttcctcttgggaaagtaatacaagtcttaagttccattgtagggtgcgccttcagaaacctgctgcacttttctgatatagttcaccacttttctgtcttcacagctttggggaattttggccaggagaccctgaaacatgaaaccaaacaggctttgatatttttttttttttaattactttccccttttgcttgattcttcttccttggtatcatattcaaaggaggaaagaatggatgacacttagggacaggtcactaagcagaataggtattagttggttttttattatttttaaatttatatagctctcatgtattgaaggtgctactttaaaaactgtgttaatgtacttgcaaatctcctgctggctcatgaaacagcagaattccagccaaggcaaattcagttggatctagggcttgaaaactgcccaagattaaagagctaagatgaaatagtttgaataaactggtaaaataacaattcatactatctctacatatttttaggatatgaatttttttttcctgctgggtagattgtccagtgacttatggcatgaatttcttttcatgctaccttcaatcttcaactaaagatttctaaaaggggtaagaaatgaggcagtagtttattaaatacatagaagtacacagctattatatgctgtggctttgagaagttaacttttgtggaatatgaaaccaaaggaagaatttccatgtagataaattaagaatagggaaaaacatctacctaaaagatggttgtccctaaaaaactggaaacatctgaaatgctctatttatgttattattcctgggagcttatagcccattatttttactttttttttttaattcagaagactagaacagaacttaaattttacaaacttttgatcataatgcttttgcccatactgtctcgtccttagccccagtgacatgtgctgatcctcctgcctttagttctaaatggttctgaatagctttaaaagatgaataagaaaaaagatcaagctcttttgaggctagagggctcatatggagatctaaaaccctccatgttcatttccagacttggtcaggcacatacatagtaaattataatcaatcatgggaattacataaggataatgaggcccaactgaaaccaagtttcagtctgccttacctttacccgtccttgagaacagcggtccaggagaatcaggcagtctgtggcctcctgtagcagggcgctcttaacagactcaggtgtaaggtttggatcccttgctacatcacaaatcagtttcaagagggccttcagtaagaccacaagtctgcaggaaactctggaatcaggaagaaaagctatgttcatactctaaatctggatattaaaattggaagagacttcaaagactgtcaagtggaaagctatcatttcctaaattaaggaacttaggtcaaagttaaatgaaaaagacctaaaaacagaaccaaagacagcctctagatttcttaccctcaagtctcctgttagcatactgcctatacacacagacacaccctctgccacactgctctcttccttccagaagcttggttctactgtaagcaacagctccttcatgggctgagaaggggaaaccaggatctccccaaccaagggcctatacttttatttttcaactctattaactgaactatgcttggagagagccctgaatcctttaactttaatgccatcttaggcctggaagttagagtgagggaaatgagcttggcttctgggactgtgtcaagttgaattttctgtcatttaatttcagatcctagctcatcatcagtgaagtccagcctacttacttgtaactattaacctttctaaaagttttcatcgccttggtaaagctccagaaatggacaatgctagtgactgcacaatattgtgactgtacttaatgccactgaactgtacactttaaaatggaaaatttatatgtatttttaccacaataaacaaaaaaccctaaaaaaacttta

SEQ ID NO: 296532 - DNA, 3041 bp, Homo sapiens
  misc_feature (14)..(14): n is a, c, g, or t
  misc_feature (19)..(20): n is a, c, g, or t
  misc_feature (22)..(22): n is a, c, g, or t
atcgctagtagagncgggnntnaatcggccgaaaaggcattaatagctgctcagctggacaatgccattgagaaggaattactggagagactgaaacaagatacgtatggcgacatctacaacttccccattcatgccttcgacaaagccctggaacaacaggaggcagagagtgactcttcagatactgaggaaaaagatgatgatgatgatgatgaggaagatgtggggaaaagagaatttgtcgaagatggtgaggtagatgagagtgacataagtgattttgaggatatggataaactggatgccagcagtgatgaagatcaggatggtaaatcctccagtgaggaggaggaagaaaaggcccttagtgcgaaacacaaaggcaaaatgcccttgagaggaccactgcggagaaaacgagcctatgtggaaatagaatacgagcaggagacagagcccgtggccaaagccaaaaccacgtgatttccctttcagcatttatacccaggactgaacatgcagaactgtttttttttttttttttatcttaaacacatacacacctccagtttttgctcttttgtgttgtactgaacacaatatttgtgtttttattatttatgccacgtcagtggggcaagaaatctggagtgagtgaagaaagctaagttgtgaacaagagtgtttttatagcatatgtgttgaagtaacagcttgtgcccgagaaacttaacagatgagttcttgaatctgggatgagatgacggatgtaaatatttctaaattttaaatgctacattacttggtgtccttttttctcccaaactttatttagaaatggaaggagttcaattttttcttgttctactttccctattcttatggaggtaaaaggaaagaaggaaggaaaaagcagctttcacttacaaagtttcgtgtaaaaatatctttttttcttaaataactccattcatacaaattgggatgggaagaaaatcctttcctcttgggaaagtaatacaagtcttaagttccattgtagggtgcgccttcagaaacctgctgcacttttctgatatagttcaccacttttctgtcttcacagctttggggaattttggccaggagaccctgaaacatgaaaccaaacaggctttgatatttttttttttttaattactttccccttttgcttgattcttcttccttggtatcatattcaaaggaggaaagaatggatgacacttagggacaggtcactaagcagaataggtattagttggttttttattatttttaaatttatatagctctcatgtattgaaggtgctactttaaaaactgtgttaatgtacttgcaaatctcctgctggctcatgaaacagcagaattccagccaaggcaaattcagttggatctagggcttgaaaactgcccaagattaaagagctaagatgaaatagtttgaataaactggtaaaataacaattcatactatctctacatatttttaggatatgaatttttttttcctgctgggtagattgtccagtgacttatggcatgaatttcttttcatgctaccttcaatcttcaactaaagatttctaaaaggggtaagaaatgaggcagtagtttattaaatacatagaagtacacagctattatatgctgtggctttgagaagttaacttttgtggaatatgaaaccaaaggaagaatttccatgtagataaattaagaatagggaaaaacatctacctaaaagatggttgtccctaaaaaactggaaacatctgaaatgctctatttatgttattattcctgggagcttatagcccattatttttactttttttttttaattcagaagactagaacagaacttaaattttacaaacttttgatcataatgcttttgcccatactgtctcgtccttagccccagtgacatgtgctgatcctcctgcctttagttctaaatggttctgaatagctttaaaagatgaataagaaaaaagatcaagctcttttgaggctagagggctcatatggagatctaaaaccctccatgttcatttccagacttggtcaggcacatacatagtaaattataatcaatcatgggaattacataaggataatgaggcccaactgaaaccaagtttcagtctgccttacctttacccgtccttgagaacagcggtccaggagaatcaggcagtctgtggcctcctgtagcagggcgctcttaacagactcaggtgtaaggtttggatcccttgctacatcacaaatcagtttcaagagggccttcagtaagaccacaagtctgcaggaaactctggaatcaggaagaaaagctatgttcatactctaaatctggatattaaaattggaagagacttcaaagactgtcaagtggaaagctatcatttcctaaattaaggaacttaggtcaaagttaaatgaaaaagacctaaaaacagaaccaaagacagcctctagatttcttaccctcaagtctcctgttagcatactgcctatacacacagacacaccctctgccacactgctctcttccttccagaagcttggttctactgtaagcaacagctccttcatgggctgagaaggggaaaccaggatctccccaaccaagggcctatacttttatttttcaactctattaactgaactatgcttggagagagccctgaatcctttaactttaatgccatcttaggcctggaagttagagtgagggaaatgagcttggcttctgggactgtgtcaagttgaattttctgtcatttaatttcagatcctagctcatcatcagtgaagtccagcctacttacttgtaactattaacctttctaaaagttttcatcgccttggtaaagctccagaaatggacaatgctagtgactgcacaatattgtgactgtacttaatgccactgaactgtacactttaaaatggaaaatttatatgtatttttaccacaataaacaaaaaaccctaaaaaaacttta

SEQ ID NO: 296533 - DNA, 2878 bp, Homo sapiens
  misc_feature (4)..(4): n is a, c, g, or t
  misc_feature (68)..(68): n is a, c, g, or t
  misc_feature (75)..(75): n is a, c, g, or t
  misc_feature (84)..(84): n is a, c, g, or t
  misc_feature (89)..(89): n is a, c, g, or t
  misc_feature (102)..(102): n is a, c, g, or t
  misc_feature (116)..(117): n is a, c, g, or t
  misc_feature (131)..(132): n is a, c, g, or t
  misc_feature (157)..(157): n is a, c, g, or t
  misc_feature (219)..(219): n is a, c, g, or t
  misc_feature (224)..(226): n is a, c, g, or t
  misc_feature (236)..(237): n is a, c, g, or t
  misc_feature (241)..(241): n is a, c, g, or t
  misc_feature (247)..(247): n is a, c, g, or t
  misc_feature (249)..(249): n is a, c, g, or t
  misc_feature (262)..(262): n is a, c, g, or t
  misc_feature (273)..(274): n is a, c, g, or t
  misc_feature (287)..(287): n is a, c, g, or t
  misc_feature (290)..(290): n is a, c, g, or t
  misc_feature (309)..(309): n is a, c, g, or t
  misc_feature (315)..(315): n is a, c, g, or t
  misc_feature (326)..(326): n is a, c, g, or t
  misc_feature (351)..(351): n is a, c, g, or t
  misc_feature (357)..(357): n is a, c, g, or t
  misc_feature (362)..(362): n is a, c, g, or t
  misc_feature (371)..(371): n is a, c, g, or t
ctcncacacgcacgcgtcactgtctgcaccaaaaacatcagcagcattttcagcatcaacagcgctcnaaaaaanaatttgtcnaagangggaaggtatatnagacgaacaaaatnnagtggcacaagagnnataaactggattcccatcattgatnaatatcactataaaaataaccaccaataaaaaataataataaaactcccggacgcctaaacncaaannnaaaattcccnnaaangcaccncntcgaaaaaaatcnatcctatttgnnaaatagaataacnatncatgaaaaagacaaagggnaaaaanaaaaaaaaaanaaaaaaaaaaaaaataaggaataanaaccanggaanatgaagaantttttttttttttatcttaaacacatacacacctccagtttttgctcttttgtgttgtactgaacacaatatttgtgtttttattatttatgccacgtcagtggggcaagaaatctggagtgagtgaagaaagctaagttgtgaacaagagtgtttttatagcatatgtgttgaagtaacagcttgtgcccgagaaacttaacagatgagttcttgaatctgggatgagatgacggatgtaaatatttctaaattttaaatgctacattacttggtgtccttttttctcccaaactttatttagaaatggaaggagttcaattttttcttgttctactttccctattcttatggaggtaaaaggaaagaaggaaggaaaaagcagctttcacttacaaagtttcgtgtaaaaatatctttttttcttaaataactccattcatacaaattgggatgggaagaaaatcctttcctcttgggaaagtaatacaagtcttaagttccattgtagggtgcgccttcagaaacctgctgcacttttctgatatagttcaccacttttctgtcttcacagctttggggaattttggccaggagaccctgaaacatgaaaccaaacaggctttgatatttttttttttttaattactttccccttttgcttgattcttcttccttggtatcatattcaaaggaggaaagaatggatgacacttagggacaggtcactaagcagaataggtattagttggttttttattatttttaaatttatatagctctcatgtattgaaggtgctactttaaaaactgtgttaatgtacttgcaaatctcctgctggctcatgaaacagcagaattccagccaaggcaaattcagttggatctagggcttgaaaactgcccaagattaaagagctaagatgaaatagtttgaataaactggtaaaataacaattcatactatctctacatatttttaggatatgaatttttttttcctgctgggtagattgtccagtgacttatggcatgaatttcttttcatgctaccttcaatcttcaactaaagatttctaaaaggggtaagaaatgaggcagtagtttattaaatacatagaagtacacagctattatatgctgtggctttgagaagttaacttttgtggaatatgaaaccaaaggaagaatttccatgtagataaattaagaatagggaaaaacatctacctaaaagatggttgtccctaaaaaactggaaacatctgaaatgctctatttatgttattattcctgggagcttatagcccattatttttactttttttttttaattcagaagactagaacagaacttaaattttacaaacttttgatcataatgcttttgcccatactgtctcgtccttagccccagtgacatgtgctgatcctcctgcctttagttctaaatggttctgaatagctttaaaagatgaataagaaaaaagatcaagctcttttgaggctagagggctcatatggagatctaaaaccctccatgttcatttccagacttggtcaggcacatacatagtaaattataatcaatcatgggaattacataaggataatgaggcccaactgaaaccaagtttcagtctgccttacctttacccgtccttgagaacagcggtccaggagaatcaggcagtctgtggcctcctgtagcagggcgctcttaacagactcaggtgtaaggtttggatcccttgctacatcacaaatcagtttcaagagggccttcagtaagaccacaagtctgcaggaaactctggaatcaggaagaaaagctatgttcatactctaaatctggatattaaaattggaagagacttcaaagactgtcaagtggaaagctatcatttcctaaattaaggaacttaggtcaaagttaaatgaaaaagacctaaaaacagaaccaaagacagcctctagatttcttaccctcaagtctcctgttagcatactgcctatacacacagacacaccctctgccacactgctctcttccttccagaagcttggttctactgtaagcaacagctccttcatgggctgagaaggggaaaccaggatctccccaaccaagggcctatacttttatttttcaactctattaactgaactatgcttggagagagccctgaatcctttaactttaatgccatcttaggcctggaagttagagtgagggaaatgagcttggcttctgggactgtgtcaagttgaattttctgtcatttaatttcagatcctagctcatcatcagtgaagtccagcctacttacttgtaactattaacctttctaaaagttttcatcgccttggtaaagctccagaaatggacaatgctagtgactgcacaatattgtgactgtacttaatgccactgaactgtacactttaaaatggaaaatttatatgtatttttaccacaataaacaaaaaaccctaaaaaaacttta

SEQ ID NO: 296534 - DNA, 1330 bp, Homo sapiens
cggacgcgtgggtcgacccacgcgtccgagcttatagcccattatttttactttttttttttaattcagaagactagaacagaacttaaattttacaaacttttgatcataatgcttttgcccatactgtctcgtccttagccccagtgacatgtgctgatcctcctgcctttagttctaaatggttctgaatagctttaaaagatgaataagaaaaaagatcaagctcttttgaggctagagggctcatatggagatctaaaaccctccatgttcatttccagacttggtcaggcacatacatagtaaattataatcaatcatgggaattacataaggataatgaggcccaactgaaaccaagtttcagtctgccttacctttacccgtccttgagaacagcggtccaggagaatcaggcagtctgtggcctcctgtagcagggcgctcttaacagactcaggtgtaaggtttggatcccttgctacatcacaaatcagtttcaagagggccttcagtaagaccacaagtctgcaggaaactctggaatcaggaagaaaagctatgttcatactctaaatctggatattaaaattggaagagacttcaaagactgtcaagtggaaagctatcatttcctaaattaaggaacttaggtcaaagttaaatgaaaaagacctaaaaacagaaccaaagacagcctctagatttcttaccctcaagtctcctgttagcatactgcctatacacacagacacaccctctgccacactgctctcttccttccagaagcttggttctactgtaagcaacagctccttcatgggctgagaaggggaaaccaggatctccccaaccaagggcctatacttttatttttcaactctattaactgaactatgcttggagagagccctgaatcctttaactttaatgccatcttaggcctggaagttagagtgagggaaatgagcttggcttctgggactgtgtcaagttgaattttctgtcatttaatttcagatcctagctcatcatcagtgaagtccagcctacttacttgtaactattaacctttctaaaagttttcatcgccttggtaaagctccagaaatggacaatgctagtgactgcacaatattgtgactgtacttaatgccactgaactgtacactttaaaatggaaaatttatatgtatttttaccacaataaacaaaaaaccctaaaaaaactttaatgaaaggtggaaaataatttaacttataatgtgaaaatacaatgtgaaatgtacaataaatcatatttatggacagaaaaatgactgggaga

SEQ ID NO: 296535 - DNA, 1099 bp, Homo sapiens
cgacccacgcgtccgcggacgcgtgatctaaaaccctccatgttcatttccagacttggtcaggcacatacatagtaaattataatcaatcatgggaattacataaggataatgaggcccaactgaaaccaagtttcagtctgccttacctttacccgtccttgagaacagcggtccaggagaatcaggcagtctgtggcctcctgtagcagggcgctcttaacagactcaggtgtaaggtttggatcccttgctacatcacaaatcagtttcaagagggccttcagtaagaccacaagtctgcaggaaactctggaatcaggaagaaaagctatgttcatactctaaatctggatattaaaattggaagagacttcaaagactgtcaagtggaaagctatcatttcctaaattaaggaacttaggtcaaagttaaatgaaaaagacctaaaaacagaaccaaagacagcctctagatttcttaccctcaagtctcctgttagcatactgcctatacacacagacacaccctctgccacactgctctcttccttccagaagcttggttctactgtaagcaacagctccttcatgggctgagaaggggaaaccaggatctccccaaccaagggcctatacttttatttttcaactctattaactgaactatgcttggagagagccctgaatcctttaactttaatgccatcttaggcctggaagttagagtgagggaaatgagcttggcttctgggactgtgtcaagttgaattttctgtcatttaatttcagatcctagctcatcatcagtgaagtccagcctacttacttgtaactattaacctttctaaaagttttcatcgccttggtaaagctccagaaatggacaatgctagtgactgcacaatattgtgactgtacttaatgccactgaactgtacactttaaaatggaaaatttatatgtatttttaccacaataaacaaaaaaccctaaaaaaactttaatgaaaggtggaaaataatttaacttataatgtgaaaatacaatgtgaaatgtacaataaatcatatttatggacagaaaaatgactgggaga

SEQ ID NO: 296536 - DNA, 531 bp, Homo sapiens
tcagatactgaggaaaaagatgatgatgatgatgatgaggaagtaagtcttgtttttgttttgccaaacctactagataccatttgtataaaactgagaaacagaatatcatcttcagtctgctaaccaaaaatgatatgtcttcttttttctttcatgtgattaattttggtttagcactggttgctctgttcttcaggctaaccaacaaaccattaacaattttagtcttaatttattggtcttctaaaattgttcctgcaaggtgacaaattataaagcctttcctgtctatatgtagtttttaaccataatgaggatgttttattgctaataatttaaatcaagaataagaatgatctggtagccctaaaatttttaaaattcagaagcattaaatttagaaagaactaaattttcattgcctagtgaaaagactgtggttctcattatgttattttgtacttacttagatgtctaatctgaatcttcattatgtattctgaacctaacagttatgttttatttata

SEQ ID NO: 296537 - DNA, 1336 bp, Homo sapiens
agcggcggcggggaaggaggggtgcttcaggtgcctgcgacctccgcgcctcccgcccggaagtgcccgaggggccgcgatggagctgggggagccgggcgctcggtagcgcggcgggcaaggcaggcgccatgaccctgattgaaggggtgggtgatgaggtgaccgtccttttctcggtgcttgcctgccttctggtgctggcccttgcctgggtctcaacgcacaccgctgagggcggggacccactgccccagccgtcagggaccccaacgccatcccagcccagcgcagccatggcagctaccgacagcatgagaggggaggccccaggggcagagacccccagcctgagacacagaggtcaagctgcacagccagagcccagcacggggttcacagcaacaccgccagccccggactccccgcaggagcccctcgtgctacggctgaaattcctcaatgattcagagcaggtggccagggcctggccccacgacaccattggctccttgaaaaggacccagtttcccggccgggaacagcaggtgcgactcatctaccaagggcagctgctaggcgacgacacccagaccctgggcagccttcacctccctcccaactgcgttctccactgccacgtgtccacgagagtcggtcccccaaatcccccctgcccgccggggtccgagcccggcccctccgggctggaaatcggcagcctgctgctgcccctgctgctcctgctgttgctgctgctctggtactgccagatccagtaccggcccttctttcccctgaccgccactctgggcctggccggcttcaccctgctcctcagtctcctggcctttgccatgtaccgcccgtagtgcctccgcgggcgcttggcagcgtcgccggcccctccggaccttgctccccgcgccgcggcgggagctgctgcctgcccaggcccgcctctccggcctgcctcttcccgctgccctggagcccagccctgcgccgcagaggactcccgggactggcggaggccccgccctgcgaccgccggggctcggggccacctcccggggctgctgaccctcagcccgcactgggagtgggctcctcggggtcgggcatctgctgtcgctgcctcggccccgggcagagccgggccgccccgggggcccgtcttagtgttctgccggaggacccagccgcctccaatccctgacagctccttgggctgagttggggacgccaggtcggtgggaggctggtgaaggggagcggggaggggcagaggagttccccggaacccgtgcagattaaagtaactgtgaagttttca

SEQ ID NO: 296538 - DNA, 1676 bp, Homo sapiens
aggctctacccccacctcttagaaactttagcagcggagtagatgagcctggggtgaagtcggtgaaggagtagacacactggggtgaagtgggcaggagaatagatacgcttgggggtgaagtttggttggggtgaagtttaggagaggcgttgcttaggcccttaccttgggatagggtttgggtgagttgggagctggttgaagacctcgagctcagatgacagaaagttaggacttgggattcggcgatgggaaggggcacccggaggcaagtttggggcgactgggaggcagagaagccggtaccctggggtgggtgaggggacggaggctgaggacggtgggagcgtcgcggtggggtgagggcaggaccctgtggaggttccagggctcctggccagggggcccgggcctcacgggctctttgtgcctctccagctcggtagcgcggcgggcaaggcaggcgccatgaccctgattgaaggggtgggtgatgaggtgaccgtccttttctcggtgcttgcctgccttctggtgctggcccttgcctgggtctcaacgcacaccgctgagggcggggacccactgccccagccgtcagggaccccaacgccatcccagcccagcgcagccatggcagctaccgacagcatgagaggggaggccccaggggcagagacccccagcctgagacacagaggtcaagctgcacagccagagcccagcacggggttcacagcaacaccgccagccccggactccccgcaggagcccctcgtgctacggctgaaattcctcaatgattcagagcaggtggccagggcctggccccacgacaccattggctccttgaaaaggacccagtttcccggccgggaacagcaggtgcgactcatctaccaagggcagctgctaggcgacgacacccagaccctgggcagccttcacctccctcccaactgcgttctccactgccacgtgtccacgagagtcggtcccccaaatcccccctgcccgccggggtccgagcccggcccctccgggctggaaatcggcagcctgctgctgcccctgctgctcctgctgttgctgctgctctggtactgccagatccagtaccggcccttctttcccctgaccgccactctgggcctggccggcttcaccctgctcctcagtctcctggcctttgccatgtaccgcccgtagtgcctccgcgggcgcttggcagcgtcgccggcccctccggaccttgctccccgcgccgcggcgggagctgctgcctgcccaggcccgcctctccggcctgcctcttcccgctgccctggagcccagccctgcgccgcagaggactcccgggactggcggaggccccgccctgcgaccgccggggctcggggccacctcccggggctgctgaccctcagcccgcactgggagtgggctcctcggggtcgggcatctgctgtcgctgcctcggccccgggcagagccgggccgccccgggggcccgtcttagtgttctgccggaggacccagccgcctccaatccctgacagctccttgggctgagttggggacgccaggtcggtgggaggctggtgaaggggagcggggaggggcagaggagttccccggaacccgtgcagattaaagtaactgtgaagttttca

SEQ ID NO: 296539 - DNA, 1294 bp, Homo sapiens
  misc_feature (21)..(21): n is a, c, g, or t
taatatcggtctaggtacgangctgggtggtgccgcgatggagctgggggagccgggcgctcggtagcgcggcgggcaaggcaggcgccatgaccctgattgaaggggtgggtgatgaggtgaccgtccttttctcggtgcttgcctgccttctggtgctggcccttgcctgggtctcaacgcacaccgctgagggcggggacccactgccccagccgtcagggaccccaacgccatcccagcccagcgcagccatggcagctaccgacagcatgagaggggaggccccaggggcagagacccccagcctgagacacagaggtcaagctgcacagccagagcccagcacggggttcacagcaacaccgccagccccggactccccgcaggagcccctcgtgctacggctgaaattcctcaatgattcagagcaggtggccagggcctggccccacgacaccattggctccttgaaaaggacccagtttcccggccgggaacagcaggtgcgactcatctaccaagggcagctgctaggcgacgacacccagaccctgggcagccttcacctccctcccaactgcgttctccactgccacgtgtccacgagagtcggtcccccaaatcccccctgcccgccggggtccgagcccggcccctccgggctggaaatcggcagcctgctgctgcccctgctgctcctgctgttgctgctgctctggtactgccagatccagtaccggcccttctttcccctgaccgccactctgggcctggccggcttcaccctgctcctcagtctcctggcctttgccatgtaccgcccgtagtgcctccgcgggcgcttggcagcgtcgccggcccctccggaccttgctccccgcgccgcggcgggagctgctgcctgcccaggcccgcctctccggcctgcctcttcccgctgccctggagcccagccctgcgccgcagaggactcccgggactggcggaggccccgccctgcgaccgccggggctcggggccacctcccggggctgctgaccctcagcccgcactgggagtgggctcctcggggtcgggcatctgctgtcgctgcctcggccccgggcagagccgggccgccccgggggcccgtcttagtgttctgccggaggacccagccgcctccaatccctgacagctccttgggctgagttggggacgccaggtcggtgggaggctggtgaaggggagcggggaggggcagaggagttccccggaacccgtgcagattaaagtaactgtgaagttttca

SEQ ID NO: 296540 - DNA, 1506 bp, Homo sapiens
aggctctacccccacctcttagaaactttagcagcggagtagatgagcctggggtgaagtcggtgaaggagtagacacactggggtgaagtgggcaggagaatagatacgcttgggggtgaagtttggttggggtgaagtttaggagaggcgttgcttaggcccttaccttgggatagggtttgggtgagttgggagctggttgaagacctcgagctcagatgacagaaagttaggacttgggattcggcgatgggaaggggcacccggagctcggtagcgcggcgggcaaggcaggcgccatgaccctgattgaaggggtgggtgatgaggtgaccgtccttttctcggtgcttgcctgccttctggtgctggcccttgcctgggtctcaacgcacaccgctgagggcggggacccactgccccagccgtcagggaccccaacgccatcccagcccagcgcagccatggcagctaccgacagcatgagaggggaggccccaggggcagagacccccagcctgagacacagaggtcaagctgcacagccagagcccagcacggggttcacagcaacaccgccagccccggactccccgcaggagcccctcgtgctacggctgaaattcctcaatgattcagagcaggtggccagggcctggccccacgacaccattggctccttgaaaaggacccagtttcccggccgggaacagcaggtgcgactcatctaccaagggcagctgctaggcgacgacacccagaccctgggcagccttcacctccctcccaactgcgttctccactgccacgtgtccacgagagtcggtcccccaaatcccccctgcccgccggggtccgagcccggcccctccgggctggaaatcggcagcctgctgctgcccctgctgctcctgctgttgctgctgctctggtactgccagatccagtaccggcccttctttcccctgaccgccactctgggcctggccggcttcaccctgctcctcagtctcctggcctttgccatgtaccgcccgtagtgcctccgcgggcgcttggcagcgtcgccggcccctccggaccttgctccccgcgccgcggcgggagctgctgcctgcccaggcccgcctctccggcctgcctcttcccgctgccctggagcccagccctgcgccgcagaggactcccgggactggcggaggccccgccctgcgaccgccggggctcggggccacctcccggggctgctgaccctcagcccgcactgggagtgggctcctcggggtcgggcatctgctgtcgctgcctcggccccgggcagagccgggccgccccgggggcccgtcttagtgttctgccggaggacccagccgcctccaatccctgacagctccttgggctgagttggggacgccaggtcggtgggaggctggtgaaggggagcggggaggggcagaggagttccccggaacccgtgcagattaaagtaactgtgaagttttca

SEQ ID NO: 296541 - DNA, 1630 bp, Homo sapiens
agcggcggcggggaaggaggggtgcttcaggtgcctgcgacctccgcgcctcccgcccggaagtgcccgaggggccgcgatggagctgggggagccgggcgctcggtagcgcggcgggcaaggcaggcgccatgaccctgattgaaggggtgggtgatgaggtgaccgtccttttctcggtgcttgcctgccttctggtgctggcccttgcctgggtctcaacgcacaccgctgagggcggggacccactgccccagccgtcagggaccccaacgccatcccagcccagcgcagccatggcagctaccgacagcatgagaggggaggccccaggggcagagacccccagcctgagacacagaggtcaagctgcacagccagagcccagcacggggttcacagcaacaccgccagccccggactccccgcaggagcccctcgtgctacggctgaaattcctcaatgattcagagcaggtggccagggcctggccccacgacaccattggctccttgaaaaggacccagtttcccggccgggaacagcaggtgcgactcatctaccaagggcagctgctaggcgacgacacccagaccctgggcagccttcacctccctcccaactgcgttctccactgccacgtgtccacgagagtcggtcccccaaatcccccctgcccgccggggtccgagcccggcccctccgggctggaaatcggcagcctgctgctgcccctgctgctcctgctgttgctgctgctctggtactgccagatccagtaccggcccttctttcccctgaccgccactctgggcctggccggcttcaccctgctcctcagtctcctggcctttgccatgtaccgcccgtagtgcctccgcgggcgcttggcagcgtcgccggcccctccggaccttgctccccgcgccgcggcgggagctgctgcctgcccaggcccgcctctccggcctgcctcttcccgctgccctggagcccagccctgcgccgcagaggactcccgggactggcggaggccccgccctgcgaccgccggggctcggggccacctcccggggctgctgaccctcagcccgcactgggagtgggctcctcggggtcgggcatctgctgtcgctgcctcggccccgggcagagccgggccgccccgggggcccgtcttagtgttctgccggaggacccagccgcctccaatccctgacagctccttgggctgagttggggacgccaggtcggtgggaggctggtgaaggggagcggggaggggcagaggagttccccggaacccgtgcagattaaagtaactgtgaagttttcaaaaaaaaaaaaaaaaaaaaacaacaaatttggtgggcacacactggaacagaagaaaccttttttaaacaacatggttggggaacagggagcaacaaaggaaaaggaaaacgggccaacagggcccaagcagaaaaaccggggcagcacacaaaggacgaggagaaacacaaaaataaaaaaaagcgccgggggagaaacaaacagtcaggcacaaaaaccacaaggagcgaagagagacgaaaagcggaactacaacacagagatgacgagaaaaccaacaataaacaagccg

SEQ ID NO: 296542 - DNA, 1299 bp, Homo sapiens
gctactaaaattggaacgatacagagaagattagcatggacccctgacgcaaggatgacacgcaaattcgtgaagcgttccatatttttgcgccatgaccctgattgaaggggtgggtgatgaggtgaccgtccttttctcggtgcttgcctgccttctggtgctggcccttgcctgggtctcaacgcacaccgctgagggcggggacccactgccccagccgtcagggaccccaacgccatcccagcccagcgcagccatggcagctaccgacagcatgagaggggaggccccaggggcagagacccccagcctgagacacagaggtcaagctgcacagccagagcccagcacggggttcacagcaacaccgccagccccggactccccgcaggagcccctcgtgctacggctgaaattcctcaatgattcagagcaggtggccagggcctggccccacgacaccattggctccttgaaaaggacccagtttcccggccgggaacagcaggtgcgactcatctaccaagggcagctgctaggcgacgacacccagaccctgggcagccttcacctccctcccaactgcgttctccactgccacgtgtccacgagagtcggtcccccaaatcccccctgcccgccggggtccgagcccggcccctccgggctggaaatcggcagcctgctgctgcccctgctgctcctgctgttgctgctgctctggtactgccagatccagtaccggcccttctttcccctgaccgccactctgggcctggccggcttcaccctgctcctcagtctcctggcctttgccatgtaccgcccgtagtgcctccgcgggcgcttggcagcgtcgccggcccctccggaccttgctccccgcgccgcggcgggagctgctgcctgcccaggcccgcctctccggcctgcctcttcccgctgccctggagcccagccctgcgccgcagaggactcccgggactggcggaggccccgccctgcgaccgccggggctcggggccacctcccggggctgctgaccctcagcccgcactgggagtgggctcctcggggtcgggcatctgctgtcgctgcctcggccccgggcagagccgggccgccccgggggcccgtcttagtgttctgccggaggacccagccgcctccaatccctgacagctccttgggctgagttggggacgccaggtcggtgggaggctggtgaaggggagcggggaggggcagaggagttccccggaacccgtgcagattaaagtaactgtgaagttttca

SEQ ID NO: 296543 - DNA, 964 bp, Homo sapiens
  misc_feature (21)..(21): n is a, c, g, or t
taatatcggtctaggtacgangctgggtggtgccgcgatggagctgggggagccgggcggagcccctcgtgctacggctgaaattcctcaatgattcagagcaggtggccagggcctggccccacgacaccattggctccttgaaaaggacccagtttcccggccgggaacagcaggtgcgactcatctaccaagggcagctgctaggcgacgacacccagaccctgggcagccttcacctccctcccaactgcgttctccactgccacgtgtccacgagagtcggtcccccaaatcccccctgcccgccggggtccgagcccggcccctccgggctggaaatcggcagcctgctgctgcccctgctgctcctgctgttgctgctgctctggtactgccagatccagtaccggcccttctttcccctgaccgccactctgggcctggccggcttcaccctgctcctcagtctcctggcctttgccatgtaccgcccgtagtgcctccgcgggcgcttggcagcgtcgccggcccctccggaccttgctccccgcgccgcggcgggagctgctgcctgcccaggcccgcctctccggcctgcctcttcccgctgccctggagcccagccctgcgccgcagaggactcccgggactggcggaggccccgccctgcgaccgccggggctcggggccacctcccggggctgctgaccctcagcccgcactgggagtgggctcctcggggtcgggcatctgctgtcgctgcctcggccccgggcagagccgggccgccccgggggcccgtcttagtgttctgccggaggacccagccgcctccaatccctgacagctccttgggctgagttggggacgccaggtcggtgggaggctggtgaaggggagcggggaggggcagaggagttccccggaacccgtgcagattaaagtaactgtgaagttttca

SEQ ID NO: 296544 - DNA, 709 bp, Homo sapiens
aggctctacccccacctcttagaaactttagcagcggagtagatgagcctggggtgaagtcggtgaaggagtagacacactggggtgaagtgggcaggagaatagatacgcttgggggtgaagtttggttggggtgaagtttaggagaggcgttgcttaggcccttaccttgggatagggtttgggtgagttgggagctggttgaagacctcgagctcagatgacagaaagttaggacttgggattcggcgatgggaaggggcacccggaggcaagtttggggcgactgggaggcagagaagccggtaccctggggtgggtgaggggacggaggctgaggacggtgggagcgtcgcggtggggtgagggcaggaccctgtggaggttccagggctcctggccagggggcccgggcctcacgggctctttgtgcctctccagctcggtagcgcggcgggcaaggcaggcgccatgaccctgattgaaggggtgggtgatgaggtgaccgtccttttctcggtgcttgcctgccttctggtgctggcccttgcctgggtctcaacgcacaccgctgagggcggggacccactgccccagccgtcagggaccccaacgccatcccagcccagcgcagccatggcagctaccgacagcatgagagaggagttccccggaacccgtgcagattaaagtaactgtgaagttttca

SEQ ID NO: 296545 - DNA, 814 bp, Homo sapiens
agaattactccttaagtgacccttttgggtgaacaccttcagtgcacctaaagtgccgtatgcacaacaccactttctttcttctgtttctttcctcctttcttctttctttctcttctcttttaattaaataattttcacataagccagtgtggatttatctgtaacaatccaatatttttgacctattatagctggctagcatctatttctttctttaatcactattaatttccttttaagttatggtcctgggtgccttggttaaacctattggcatttacaagagatgttgggtgtcaaagtaaacattgtatattaataagcctgttagcatttgaactgctctcttttccccttcgtagtgtacctggatggaacaaaatctgaagaggacctctttttgcaagtatatgaagatctaatacaagaactagcaaagcaaaagtgtttgcaagtgacagcataaagacggaacacaacaaatccttcctgaagtgaattaggaaactccaaggagtaatttaagaaccttcaccaagatacaatgtatactgtggtacaatgacagccattgtttcatatgtttgatttttattgcacatggttttcccaacatgtggaacaataaatatccatgccaatggacaggactgtaccttagcaagttgctccctctccagggagcgcatagatacagcagagctcacagtgagtcagaaagtctccactttctgaacatagctctataacaatgattgtcaaacttttctaactggagctcagagtaagaaataaagattacatcacaatc

SEQ ID NO: 296546 - DNA, 1469 bp, Homo sapiens
ggccgccggagcagtccagagcgcgcgccgggccgacgaggaagtggaccccgcctagccgagcgctaattggctcccgggctggcagcttcgccgcagcaggagcgcgggcggcgcgcacggcggcggaaccagccggagccgagcgagggcgaagcgggcgtgcgccagtgcagtgccgcgggccgcgcgcgctcccgatagggaagggccggagctgcgcaggggcgcgcggaagaggccaagctagccggagccccgccccgccccgccccgccccaacgggggctggaacccggcgccgagagtagagaaaaggggcctctggtgaccgcccctacctggcatccctctaacccaggaggagcgtggggaaaggggctgtgggcctctcggggagcgagctgcgggtagcggcgcactgggtacaggcgcgcgcttggctgtcgcctctgccgctgtgtttgggaggactcgaactggcgccaggaaatattaggaagctgtgattttcaaagctaattatgaaaacatttatcattggaatcagtggtgtgacaaacagtggcaaaacaacactggctaagaatttgcagaaacacctcccaaattgcagtgtcatatctcaggatgatttcttcaagccagagtctgagatagagacagataaaaatggatttttgcagtacgatgtgcttgaagcacttaacatggaaaaaatgatgtcagccatttcctgctggatggaaagcgcaagacactctgtggtatcaacagaccaggaaagtgctgaggaaattcccattttaatcatcgaaggttttcttctttttaattataagccccttgacactatatggaatagaagctatttcctgactattccatatgaagaatgtaaaaggaggaggagtacaagggtctatcagcctccagactctccgggatactttgatggccatgtgtggcccatgtatctaaagtacagacaagaaatgcaggacatcacatgggaagttgtgtacctggatggaacaaaatctgaagaggacctctttttgcaagtatatgaagatctaatacaagaactagcaaagcaaaagtgtttgcaagtgacagcataaagacggaacacaacaaatccttcctgaagtgaattaggaaactccaaggagtaatttaagaaccttcaccaagatacaatgtatactgtggtacaatgacagccattgtttcatatgtttgatttttattgcacatggttttcccaacatgtggaacaataaatatccatgccaatggacaggactgtaccttagcaagttgctccctctccagggagcgcatagatacagcagagctcacagtgagtcagaaagtctccactttctgaacatagctctataacaatgattgtcaaacttttctaactggagctcagagtaagaaataaagattacatcacaatc

SEQ ID NO: 296547 - DNA, 956 bp, Homo sapiens
ggccgccggagcagtccagagcgcgcgccgggccgacgaggaagtggaccccgcctagccgagcgctaattggctcccgggctggcagcttcgccgcagcaggagcgcgggcggcgcgcacggcggcggaaccagccggagccgagcgagggcgaagcgggcgtgcgccagtgcagtgccgcgggccgcgcgcgctcccgatagggaagggccggagctgcgcaggggcgcgcggaagaggccaagctagccggagccccgccccgccccgccccgccccaacgggggctggaacccggcgccgagagtagagaaaaggggcctctggtgaccgcccctacctggcatccctctaacccaggaggagcgtggggaaaggggctgtgggcctctcggggagcgagctgcgggtagcggcgcactgggtacaggcgcgcgcttggctgtcgcctctgccgctgtgtttgggaggactcgaactggcgccaggtgagtgcgtacctgctcgcccctgccgcgccgcgccgccttgctggggcctggaggtgtttccagagggtttctgtgctggagcccgggacttggttgcgccctgaaagccttgcctggactcttgccaccctcacagagctgataggtggcctgccgaggaggacgtgtactcatggtggcgtggtgctctagcgccccggaataatcctgaaaatgggaacgctgcctccaagagaccgcgcagcctggagaagtcgccagggacaggatcaggacttgatcctcgcggatcgatatggtctcattcctctagcgttggggtgatgacctactgcccgcctgctgcctgttactgtaaggcctgctaagaattttttttttttttactttttttaatgactgaaaagaaataaaaagaaatataatactttgtgacacgtgaaaattacatgaaattacgattt

SEQ ID NO: 296548 - DNA, 817 bp, Homo sapiens
ggccgccggagcagtccagagcgcgcgccgggccgacgaggaagtggaccccgcctagccgagcgctaattggctcccgggctggcagcttcgccgcagcaggagcgcgggcggcgcgcacggcggcggaaccagccggagccgagcgagggcgaagcgggcgtgcgccagtgcagtgccgcgggccgcgcgcgctcccgatagggaagggccggagctgcgcaggggcgcgcggaagaggccaagctagccggagccccgccccgccccgccccgccccaacgggggctggaacccggcgccgagagtagagaaaaggggcctctggtgaccgcccctacctggcatccctctaacccaggaggagcgtggggaaaggggctgtgggcctctcggggagcgagctgcgggtagcggcgcactgggtacaggcgcgcgcttggctgtcgcctctgccgctgtgtttgggaggactcgaactggcgccagagctgataggtggcctgccgaggaggacgtgtactcatggtggcgtggtgctctagcgccccggaataatcctgaaaatgggaacgctgcctccaagagaccgcgcagcctggagaagtcgccagggacaggatcaggacttgatcctcgcggatcgatatggtctcattcctctagcgttggggtgatgacctactgcccgcctgctgcctgttactgtaaggcctgctaagaattttttttttttttactttttttaatgactgaaaagaaataaaaagaaatataatactttgtgacacgtgaaaattacatgaaattacgattt

SEQ ID NO: 296549 - DNA, 732 bp, Homo sapiens
ggccgccggagcagtccagagcgcgcgccgggccgacgaggaagtggaccccgcctagccgagcgctaattggctcccgggctggcagcttcgccgcagcaggagcgcgggcggcgcgcacggcggcggaaccagccggagccgagcgagggcgaagcgggcgtgcgccagtgcagtgccgcgggccgcgcgcgctcccgatagggaagggccggagctgcgcaggggcgcgcggaagaggccaagctagccggagccccgccccgccccgccccgccccaacgggggctggaacccggcgccgagagtagagaaaaggggcctctggtgaccgcccctacctggcatccctctaacccaggaggagcgtggggaaaggggctgtgggcctctcggggagcgagctgcgggtagcggcgcactgggtacaggcgcgcgcttggctgtcgcctctgccgctgtgtttgggaggactcgaactggcgccaggaaatattaggaagctgtgattttcaaagctaattatgaaaacatttatcattggaatcagtggtgtgacaaacagtggcaaaacaacactggctaagaatttgcagaaacacctcccaaattgcagtgtcatatctcaggatgatttcttcaagccagagtctgagatagagacagatatggatttttgcagtacgatgtgcttgaagcacttaacatggaatccagaccagggtgctgagg

SEQ ID NO: 296550 - DNA, 1755 bp, Homo sapiens
ggccgccggagcagtccagagcgcgcgccgggccgacgaggaagtggaccccgcctagccgagcgctaattggctcccgggctggcagcttcgccgcagcaggagcgcgggcggcgcgcacggcggcggaaccagccggagccgagcgagggcgaagcgggcgtgcgccagtgcagtgccgcgggccgcgcgcgctcccgatagggaagggccggagctgcgcaggggcgcgcggaagaggccaagctagccggagccccgccccgccccgccccgccccaacgggggctggaacccggcgccgagagtagagaaaaggggcctctggtgaccgcccctacctggcatccctctaacccaggaggagcgtggggaaaggggctgtgggcctctcggggagcgagctgcgggtagcggcgcactgggtacaggcgcgcgcttggctgtcgcctctgccgctgtgtttgggaggactcgaactggcgccaggaaatattaggaagctgtgattttcaaagctaattatgaaaacatttatcattggaatcagtggttcacagatgccctgacttatgttcacagacatgagccccaggttaaaacacgctttcaataaatgactgaatcgagaagtgcctccctcccgtgtgatctcctcgatgctgcaaaactagatctaaagaggagtaactcagtgccccttctcctggacttcacagtccggtcagaagagacaaataactggcctgttgtgataagctacagcagacctcccagctggcccccaggtggagagagatggggaaaaggaggcatcgcagaggaaatgtgatttcatgtgtgacaaacagtggcaaaacaacactggctaagaatttgcagaaacacctcccaaattgcagtgtcatatctcaggatgatttcttcaagccagagtctgagatagagacagataaaaatggatttttgcagtacgatgtgcttgaagcacttaacatggaaaaaatgatgtcagccatttcctgctggatggaaagcgcaagacactctgtggtatcaacagaccaggaaagtgctgaggaaattcccattttaatcatcgaaggttttcttctttttaattataagccccttgacactatatggaatagaagctatttcctgactattccatatgaagaatgtaaaaggaggaggagtacaagggtctatcagcctccagactctccgggatactttgatggccatgtgtggcccatgtatctaaagtacagacaagaaatgcaggacatcacatgggaagttgtgtacctggatggaacaaaatctgaagaggacctctttttgcaagtatatgaagatctaatacaagaactagcaaagcaaaagtgtttgcaagtgacagcataaagacggaacacaacaaatccttcctgaagtgaattaggaaactccaaggagtaatttaagaaccttcaccaagatacaatgtatactgtggtacaatgacagccattgtttcatatgtttgatttttattgcacatggttttcccaacatgtggaacaataaatatccatgccaatggacaggactgtaccttagcaagttgctccctctccagggagcgcatagatacagcagagctcacagtgagtcagaaagtctccactttctgaacatagctctataacaatgattgtcaaacttttctaactggagctcagagtaagaaataaagattacatcacaatc

SEQ ID NO: 296551 - DNA, 1726 bp, Homo sapiens
ggccgccggagcagtccagagcgcgcgccgggccgacgaggaagtggaccccgcctagccgagcgctaattggctcccgggctggcagcttcgccgcagcaggagcgcgggcggcgcgcacggcggcggaaccagccggagccgagcgagggcgaagcgggcgtgcgccagtgcagtgccgcgggccgcgcgcgctcccgatagggaagggccggagctgcgcaggggcgcgcggaagaggccaagctagccggagccccgccccgccccgccccgccccaacgggggctggaacccggcgccgagagtagagaaaaggggcctctggtgaccgcccctacctggcatccctctaacccaggaggagcgtggggaaaggggctgtgggcctctcggggagcgagctgcgggtagcggcgcactgggtacaggcgcgcgcttggctgtcgcctctgccgctgtgtttgggaggactcgaactggcgccaggaaatattaggaagctgtgattttcaaagctaattatgaaaacatttatcattggaatcagtggacatgagccccaggttaaaacacgctttcaataaatgactgaatcgagaagtgcctccctcccgtgtgatctcctcgatgctgcaaaactagatctaaagaggagtaactcagtgccccttctcctggacttcacagtccggtcagaagagacaaataactggcctgttgtgataagctacagcagacctcccagctggcccccaggtggagagagatggggaaaaggaggcatcgcagaggaaatgtgatttcatgtgtgacaaacagtggcaaaacaacactggctaagaatttgcagaaacacctcccaaattgcagtgtcatatctcaggatgatttcttcaagccagagtctgagatagagacagataaaaatggatttttgcagtacgatgtgcttgaagcacttaacatggaaaaaatgatgtcagccatttcctgctggatggaaagcgcaagacactctgtggtatcaacagaccaggaaagtgctgaggaaattcccattttaatcatcgaaggttttcttctttttaattataagccccttgacactatatggaatagaagctatttcctgactattccatatgaagaatgtaaaaggaggaggagtacaagggtctatcagcctccagactctccgggatactttgatggccatgtgtggcccatgtatctaaagtacagacaagaaatgcaggacatcacatgggaagttgtgtacctggatggaacaaaatctgaagaggacctctttttgcaagtatatgaagatctaatacaagaactagcaaagcaaaagtgtttgcaagtgacagcataaagacggaacacaacaaatccttcctgaagtgaattaggaaactccaaggagtaatttaagaaccttcaccaagatacaatgtatactgtggtacaatgacagccattgtttcatatgtttgatttttattgcacatggttttcccaacatgtggaacaataaatatccatgccaatggacaggactgtaccttagcaagttgctccctctccagggagcgcatagatacagcagagctcacagtgagtcagaaagtctccactttctgaacatagctctataacaatgattgtcaaacttttctaactggagctcagagtaagaaataaagattacatcacaatc

SEQ ID NO: 296552 - DNA, 2818 bp, Homo sapiens
  misc_feature (1212)..(1212): n is a, c, g, or t
ggccgccggagcagtccagagcgcgcgccgggccgacgaggaagtggaccccgcctagccgagcgctaattggctcccgggctggcagcttcgccgcagcaggagcgcgggcggcgcgcacggcggcggaaccagccggagccgagcgagggcgaagcgggcgtgcgccagtgcagtgccgcgggccgcgcgcgctcccgatagggaagggccggagctgcgcaggggcgcgcggaagaggccaagctagccggagccccgccccgccccgccccgccccaacgggggctggaacccggcgccgagagtagagaaaaggggcctctggtgaccgcccctacctggcatccctctaacccaggaggagcgtggggaaaggggctgtgggcctctcggggagcgagctgcgggtagcggcgcactgggtacaggcgcgcgcttggctgtcgcctctgccgctgtgtttgggaggactcgaactggcgccaggaaatattaggaagctgtgattttcaaagctaattatgaaaacatttatcattggaatcagtggtgtgacaaacagtggcaaaacaacactggctaagaatttgcagaaacacctcccaaattgcagtgtcatatctcaggatgatttcttcaagccagagtctgagatagagacagataaaaatggatttttgcagtacgatgtgcttgaagcacttaacatggaaaaaatgatgtcagccatttcctgctggatggaaagcgcaagacactctgtggtatcaacagaccaggaaagtgctgaggaaattcccattttaatcatcgaaggttttcttctttttaattataagtaagcatctccaccctaatattgtctctgagtgaatggggggataaaaacccttgtgaactaagtatgctgttattttaggccccttgacactatatggaatagaagctatttcctgactattccatatgaagaatgtaaaaggaggaggaggtaagttttgaaccatctttgtgagttgtaattcaaaacaaaaaatgtagaagaaaaatgaggacagcaacattattgagcaatgcgtatacgtcatttttcagagacaggaagccttaactcttttacaaaaggagcaaaactcttttccataaatggtcatccgcatggagtaatgcaaattactttctaagaaaagggccttatatcaagctttnggctcatttctcctaaatcctcaaacaaagcaagcccatggtgattaggattttaatgtaagtgagcctgttctgccacagctacaaagaacaccaattagttcaaagcttaatccaacatagtggtctctccattgttatttacactatttgtctcttagttctcttataaagcactagaaggaaaaagaataattaagaatgatagtcagtggattacaaagttaattttaatatcaaagaactaaatccatgttactgtcgttctaactgccattgagttaaaacatgtagtacatgtagtcctaatcctgtttagattcagcctctgagtgatttccccattatcctgaccattcatattttactttatcaattgtgtgtttctgtcaacataaagtttcctacgtgttttgatagtacaagggtctatcagcctccagactctccgggatactttgatggccatgtgtggcccatgtatctaaagtacagacaagaaatgcaggacatcacatgggaagttgtgtacctggatggaacaaaatctgaagaggacctctttttgcaagtatatgaagatctaatacaagaactagcaaagcaaaagtgtttgcaagtgacagcataaagacggaacacaacaaatccttcctgaagtgaattaggaaactccaaggagtaatttaagaaccttcaccaagatacaatgtatactgtggtacaatgacagccattgtttcatatgtttgatttttattgcacatggttttcccaacatgtggaacaataaatatccatgccaatggacaggactgtaccttagcaagttgctccctctccagggagcgcatagatacagcagagctcacagtgagtcagaaagtctccactttctgaacatagctctataacaatgattgtcaaacttttctaactggagctcagagtaagaaataaagattacatcacaatccaatagtctgtcggaattcattgtgtatgtttatgtatttgtgtgtaggtgtgtatgtgtgtgtgtgatacatacatacatcaagtatcacaagacattgaccttatatattatgcactgtgatgtttttccgtctttaattataaaaaacatattgatcacaaccacaatttggaaaatgttgctccataccatcccataccaacactcaccacctgcaaataatagcattactaggagctgcagtcacaatgaataaatcaacaattcgctacaagatctaggattatttgtgtattttgttgagtgtgtgtgtgtgtgtgtgtgtgtgtgtgtgtgtgtgttggcgtgtatctaataccattgtatctcattgttgagactttgttacaaatagggtttctggtttctttctcccccctcgtggttcattttgtttttgtcaaaccagtggtctaaaatcacagaaataagcaattacttcaatcatgtggaatccaggggacctatctttggaaagcacagaaggagatctgaattgtgtgatctcttgaggctgctttcaatgctggaatttaaattatgtactgaacaatcttttgcttattaataaaaagattacacacaacc

SEQ ID NO: 296553 - DNA, 2794 bp, Homo sapiens
  misc_feature (1212)..(1212): n is a, c, g, or t
ggccgccggagcagtccagagcgcgcgccgggccgacgaggaagtggaccccgcctagccgagcgctaattggctcccgggctggcagcttcgccgcagcaggagcgcgggcggcgcgcacggcggcggaaccagccggagccgagcgagggcgaagcgggcgtgcgccagtgcagtgccgcgggccgcgcgcgctcccgatagggaagggccggagctgcgcaggggcgcgcggaagaggccaagctagccggagccccgccccgccccgccccgccccaacgggggctggaacccggcgccgagagtagagaaaaggggcctctggtgaccgcccctacctggcatccctctaacccaggaggagcgtggggaaaggggctgtgggcctctcggggagcgagctgcgggtagcggcgcactgggtacaggcgcgcgcttggctgtcgcctctgccgctgtgtttgggaggactcgaactggcgccaggaaatattaggaagctgtgattttcaaagctaattatgaaaacatttatcattggaatcagtggtgtgacaaacagtggcaaaacaacactggctaagaatttgcagaaacacctcccaaattgcagtgtcatatctcaggatgatttcttcaagccagagtctgagatagagacagataaaaatggatttttgcagtacgatgtgcttgaagcacttaacatggaaaaaatgatgtcagccatttcctgctggatggaaagcgcaagacactctgtggtatcaacagaccaggaaagtgctgaggaaattcccattttaatcatcgaaggttttcttctttttaattataagtaagcatctccaccctaatattgtctctgagtgaatggggggataaaaacccttgtgaactaagtatgctgttattttaggccccttgacactatatggaatagaagctatttcctgactattccatatgaagaatgtaaaaggaggaggaggtaagttttgaaccatctttgtgagttgtaattcaaaacaaaaaatgtagaagaaaaatgaggacagcaacattattgagcaatgcgtatacgtcatttttcagagacaggaagccttaactcttttacaaaaggagcaaaactcttttccataaatggtcatccgcatggagtaatgcaaattactttctaagaaaagggccttatatcaagctttnggctcatttctcctaaatcctcaaacaaagcaagcccatggtgattaggattttaatgtaagtgagcctgttctgccacagctacaaagaacaccaattagttcaaagcttaatccaacatagtggtctctccattgttatttacactatttgtctcttagttctcttataaagcactagaaggaaaaagaataattaagaatgatagtcagtggattacaaagttaattttaatatcaaagaactaaatccatgttactgtcgttctaactgccattgagttaaaacatgtagtacatgtagtcctaatcctgtttagattcagcctctgagtgatttccccattatcctgaccattcatattttactttatcaattgtgtgtttctgtcaacataaagtttcctacgtgttttgatagtacaagggtctatcagcctccagactctccgggatactttgatggccatgtgtggcccatgtatctaaagtacagacaagaaatgcaggacatcacatgggaagttgtgtacctggatggaacaaaatctgaagaggacctctttttgcaagtatatgaagatctaatacaagaactagcaaagcaaaagtgtttgcaagtgacagcataaagacggaacacaacaaatccttcctgaagtgaattaggaaactccaaggagtaatttaagaaccttcaccaagatacaatgtatactgtggtacaatgacagccattgtttcatatgtttgatttttattgcacatggttttcccaacatgtggaacaataaatatccatgccaatggacaggactgtaccttagcaagttgctccctctccagggagcgcatagatacagcagagctcacagtgagtcagaaagtctccactttctgaacatagctctataacaatgattgtcaaacttttctaactggagctcagagtaagaaataaagattacatcacaatccaatagtctgtcggaattcattgtgtatgtttatgtatttgtgtgtaggtgtgtatgtgtgtgtgtgatacatacatacatcaagtatcacaagacattgaccttatatattatgcactgtgatgtttttccgtctttaattataaaaaacatattgatcacaaccacaatttggaaaatgttgctccataccatcccataccaacactcaccacctgcaaataatagcattactaggagctgcagtcacaatgaataaatcaacaattcgctacaagatctaggattatttgtgtattttgttgagtgtgtgtgtgtgttggcgtgtatctaataccattgtatctcattgttgagactttgttacaaatagggtttctggtttctttctcccccctcgtggttcattttgtttttgtcaaaccagtggtctaaaatcacagaaataagcaattacttcaatcatgtggaatccaggggacctatctttggaaagcacagaaggagatctgaattgtgtgatctcttgaggctgctttcaatgctggaatttaaattatgtactgaacaatcttttgcttattaataaaaagattacacacaacc

SEQ ID NO: 296554 - DNA, 2385 bp, Homo sapiens
ggccgccggagcagtccagagcgcgcgccgggccgacgaggaagtggaccccgcctagccgagcgctaattggctcccgggctggcagcttcgccgcagcaggagcgcgggcggcgcgcacggcggcggaaccagccggagccgagcgagggcgaagcgggcgtgcgccagtgcagtgccgcgggccgcgcgcgctcccgatagggaagggccggagctgcgcaggggcgcgcggaagaggccaagctagccggagccccgccccgccccgccccgccccaacgggggctggaacccggcgccgagagtagagaaaaggggcctctggtgaccgcccctacctggcatccctctaacccaggaggagcgtggggaaaggggctgtgggcctctcggggagcgagctgcgggtagcggcgcactgggtacaggcgcgcgcttggctgtcgcctctgccgctgtgtttgggaggactcgaactggcgccaggaaatattaggaagctgtgattttcaaagctaattatgaaaacatttatcattggaatcagtggttcacagatgccctgacttatgttcacagacatgagccccaggttaaaacacgctttcaataaatgactgaatcgagaagtgcctccctcccgtgtgatctcctcgatgctgcaaaactagatctaaagaggagtaactcagtgccccttctcctggacttcacagtccggtcagaagagacaaataactggcctgttgtgataagctacagcagacctcccagctggcccccaggtggagagagatggggaaaaggaggcatcgcagaggaaatgtgatttcatgtgtgacaaacagtggcaaaacaacactggctaagaatttgcagaaacacctcccaaattgcagtgtcatatctcaggatgatttcttcaagccagagtctgagatagagacagataaaaatggatttttgcagtacgatgtgcttgaagcacttaacatggaaaaaatgatgtcagccatttcctgctggatggaaagcgcaagacactctgtggtatcaacagaccaggaaagtgctgaggaaattcccattttaatcatcgaaggttttcttctttttaattataagccccttgacactatatggaatagaagctatttcctgactattccatatgaagaatgtaaaaggaggaggagtacaagggtctatcagcctccagactctccgggatactttgatggccatgtgtggcccatgtatctaaagtacagacaagaaatgcaggacatcacatgggaagttgtgtacctggatggaacaaaatctgaagaggacctctttttgcaagtatatgaagatctaatacaagaactagcaaagcaaaagtgtttgcaagtgacagcataaagacggaacacaacaaatccttcctgaagtgaattaggaaactccaaggagtaatttaagaaccttcaccaagatacaatgtatactgtggtacaatgacagccattgtttcatatgtttgatttttattgcacatggttttcccaacatgtggaacaataaatatccatgccaatggacaggactgtaccttagcaagttgctccctctccagggagcgcatagatacagcagagctcacagtgagtcagaaagtctccactttctgaacatagctctataacaatgattgtcaaacttttctaactggagctcagagtaagaaataaagattacatcacaatccaatagtctgtcggaattcattgtgtatgtttatgtatttgtgtgtaggtgtgtatgtgtgtgtgtgatacatacatacatcaagtatcacaagacattgaccttatatattatgcactgtgatgtttttccgtctttaattataaaaaacatattgatcacaaccacaatttggaaaatgttgctccataccatcccataccaacactcaccacctgcaaataatagcattactaggagctgcagtcacaatgaataaatcaacaattcgctacaagatctaggattatttgtgtattttgttgagtgtgtgtgtgtgtgtgtgtgtgtgtgtgtgtgtgtgttggcgtgtatctaataccattgtatctcattgttgagactttgttacaaatagggtttctggtttctttctcccccctcgtggttcattttgtttttgtcaaaccagtggtctaaaatcacagaaataagcaattacttcaatcatgtggaatccaggggacctatctttggaaagcacagaaggagatctgaattgtgtgatctcttgaggctgctttcaatgctggaatttaaattatgtactgaacaatcttttgcttattaataaaaagattacacacaacc

SEQ ID NO: 296555 - DNA, 1444 bp, Homo sapiens
agaattactccttaagtgacccttttgggtgaacaccttcagtgcacctaaagtgccgtatgcacaacaccactttctttcttctgtttctttcctcctttcttctttctttctcttctcttttaattaaataattttcacataagccagtgtggatttatctgtaacaatccaatatttttgacctattatagctggctagcatctatttctttctttaatcactattaatttccttttaagttatggtcctgggtgccttggttaaacctattggcatttacaagagatgttgggtgtcaaagtaaacattgtatattaataagcctgttagcatttgaactgctctcttttccccttcgtagtgtacctggatggaacaaaatctgaagaggacctctttttgcaagtatatgaagatctaatacaagaactagcaaagcaaaagtgtttgcaagtgacagcataaagacggaacacaacaaatccttcctgaagtgaattaggaaactccaaggagtaatttaagaaccttcaccaagatacaatgtatactgtggtacaatgacagccattgtttcatatgtttgatttttattgcacatggttttcccaacatgtggaacaataaatatccatgccaatggacaggactgtaccttagcaagttgctccctctccagggagcgcatagatacagcagagctcacagtgagtcagaaagtctccactttctgaacatagctctataacaatgattgtcaaacttttctaactggagctcagagtaagaaataaagattacatcacaatccaatagtctgtcggaattcattgtgtatgtttatgtatttgtgtgtaggtgtgtatgtgtgtgtgtgatacatacatacatcaagtatcacaagacattgaccttatatattatgcactgtgatgtttttccgtctttaattataaaaaacatattgatcacaaccacaatttggaaaatgttgctccataccatcccataccaacactcaccacctgcaaataatagcattactaggagctgcagtcacaatgaataaatcaacaattcgctacaagatctaggattatttgtgtattttgttgagtgtgtgtgtgtgtgtgtgtgtgtgtgtgtgtgtgtgttggcgtgtatctaataccattgtatctcattgttgagactttgttacaaatagggtttctggtttctttctcccccctcgtggttcattttgtttttgtcaaaccagtggtctaaaatcacagaaataagcaattacttcaatcatgtggaatccaggggacctatctttggaaagcacagaaggagatctgaattgtgtgatctcttgaggctgctttcaatgctggaatttaaattatgtactgaacaatcttttgcttattaataaaaagattacacacaacc

SEQ ID NO: 296556 - DNA, 778 bp, Homo sapiens
tgccaaatcaagtattccactgggcttccttcgtttaagaaaagggattaaagtaacaatactttccccacatcaaggataacactccaaaacaaggattatactgcagacaactaccctttgtggttttattctagtcttcaaactatatcattctctgaagtcaaggattactatacgaactacaagtgatattggatatctatctgatattttaaggtatgcttcaaatttaatgcagggattaaaagaatgggacttggactcaatttagttctttacaggaaaccagcatttttggctccagaatccctctaatttaaacatccttagatttactgttgttgatgtaaagatttaataaaatgagaattggaattctccattaatttctttttatgtttattcccaaggtttgcaagtgacagcataaagacggaacacaacaaatccttcctgaagtgaattaggaaactccaaggagtaatttaagaaccttcaccaagatacaatgtatactgtggtacaatgacagccattgtttcatatgtttgatttttattgcacatggttttcccaacatgtggaacaataaatatccatgccaatggacaggactgtaccttagcaagttgctccctctccagggagcgcatagatacagcagagctcacagtgagtcagaaagtctccactttctgaacatagctctataacaatgattgtcaaacttttctaactggagctcagagtaagaaataaagattacatcacaatc

SEQ ID NO: 296557 - DNA, 3542 bp, Homo sapiens
cactgcggtaatatggctcttccttagccagcggcggcaacggcggcagcggcggcagcggcggcggctactgtctgggctgagcagtagtgcctctcgggtggcgggtttctaggctgcaggggcttggtaggtggtggcaagggggcggcggcggatgccggaagagtgcccgccccgccgcttggcggcccctggatcgagatgagcgcctccgcgtcggtcgggggccccgtcccccagccacccccgggcccggccgctgctctgcctcccggttctgccgcgcgggccctgcatgtggagctgccgtctcagcagcggcgtcttcgacatcttcggaacattgctgcccggaacattgttaatagaaatggccatcagctccttgatacctactttacacttcacttgtgtagtactgaaaagatatataaagaattttatagaagtgaagtgattaagaattccttgaatcccacgtggcgaagtctcgattttggaattatgccagaccgtcttgatacatctgtgtcttgtttcgtggtgaagatatggggtggaaaggagaacatctaccagctgttgattgaatggaaagtctgtttggatgggctgaaatacttgggtcagcagattcatgcccgaaaccaaaatgaaataatttttgggctgaatgatggatactatggtgctccatttgaacataagggttattcaaatgctcagaagactattcttctgcaggtggatcagaactgtgttcgcaattcttacgatgtcttctctttgctacggcttcatagagcccagtgtgcaattaaacagactcaggtaactgttcagaaaattggaaaggaaattgaagaaaaactaagactcacatctacaagcaatgaactgaaaaaaaaaagtgaatgcctgcagttaaaaattttggtgcttcagaatgaactggaacggcagaagaaagctttgggacgggaggtggcattactgcataagcaacaaattgcattacaagacaaaggaagtgcattttcagctgagcacctcaaacttcaactccagaaggaatccctaaatgagctgaggaaggagtgcactgcaaaaagagaactcttcttgaagactaatgctcagttgacaattcgttgcaggcagttactctctgagctttcctacatttaccctattgatttgaatgaacataaggattactttgtatgcggtgtcaagttgcctaattctgaggacttccaagcaaaagatgatggaagcattgctgttgcccttggttatactgcacatctggtctccatgatttcctttttcctacaagtgcccctcagatatcctataattcataaggggtctagatcaacaatcaaagacaatatcaatgacaaactgacggaaaaggagagagagtttccactgtatccaaaaggaggggagaagttgcagtttgattatggtgtctatcttctgaacaaaaatatagcacagctaagatatcaacatggactagggactccagacttgcggcaaacccttcccaacctgaaaaacttcatggagcatggactaatggtcaggtgtgacagacatcacacctccagtgcaatccctgttcctaagagacaaagctccatatttgggggtgcagatgtaggcttctctggggggatcccttcaccagacaaaggacatcgaaaacgggccagctctgagaatgagagacttcagtacaaaacccctcctcccagttacaactcagcattagcccagcctgtgaccaccgtcccctccatgggagagaccgagagaaagataacatctctatcctcctccttggatacctccttggacttctccaaagaaaacaagaaaaaaggagaggatctagttggcagcttaaacggaggccacgcgaatgtgcaccctagccaagaacaaggagaagccctctccgggcaccgggccacagtcaatggcactctcctacccagcgagcaggccgggtccgccagtgtccagcttccaggcgagttccacccagtctcagaagctgagctctgctgtactgtggagcaagcagaagaaatcatcgggctggaagccacaggtttcgcctcaggtgatcagctagaagcatttaactgcatcccagtggacagtgctgtggcagtagagtgtgacgaacaagttctgggagaatttgaagagttctcccgaaggatctatgcactgaatgaaaacgtatccagcttccgccggccgcgcaggagttccgataagtgaagtgagcaggtcaacagtaggactggggcagaagctctgcctaaaatgaagtgaaagctgcacttaaccctttgtgataatgatgacacaaaatgaatattaatggaggatattcctcggaaaaacagactttgggaatgaaggagggactcaggatcattgttatcagtgggccaaagttagattttgctttcaagatttgcttttcgggcctgatgattttaaagcaaaaatcaccctctagttgaaagagcttacagctcgagtcaccttttagctatttgtctgctttttatttacccttgtatgttatcctcagagggaagatgataatatataaataatataatgaacacacccttagtttctcataagcatttgccctcaccatggtttataaaactttgggaaaacggaatattcagaaataggtttccgccatgtactgaaaggtctgtggccatctgtgaggtagatgaagaagcagcatagtggtctccttacatctaggcctaactgtccctcttcctgcccccgggtaccacagtccacctttagaccctactgtcgccccatcttctccgtggatgggccatgcgtcctgaaaacaggacatcagattcactggttctgtaacccagtagctgtgacgttccatctcttctaaccagccatggccttcccctcctctgccatacccttaatgcggccctcagattagatgaaaaacttgctcctggtggatcccaagggaccctcaaggacctcgaggttactgcagtcagatgccatctcatcccctgtgggggccaaagtttttatgtgggcagatgctgtggtcaggaactaggcatgctttctggcaatgcactcaccagacaaaaatcccttgatgtaaatcccatgttaatttattaaatttcagtcagaaggtcagcatttacatgacagaatgtatgtagagagttggggtgtctggtaggcaaactgcaaggcagttgagatagttggattaagaggctagacgagacatagaatactattggtatgtgtgcaatttcatgaatattaaattatgtttcgaagtccagttgtcattcccgcattcagatttcatttgctgttgctttatacgttacgtacccaaggacattgcctcagggttgcaaactctttaaaggaaaatttatccatatatccatgtattatatagaagaataaaaattgagtttacttca

SEQ ID NO: 296558 - DNA, 3488 bp, Homo sapiens
cactgcggtaatatggctcttccttagccagcggcggcaacggcggcagcggcggcagcggcggcggctactgtctgggctgagcagtagtgcctctcgggtggcgggtttctaggctgcaggggcttggtaggtggtggcaagggggcggcggcggatgccggaagagtgcccgccccgccgcttggcggcccctggatcgagatgagcgcctccgcgtcggtcgggggccccgtcccccagccacccccgggcccggccgctgctctgcctcccggttctgccgcgcgggccctgcatgtggagctgccgtctcagcagcggcgtcttcgacatcttcggaacattgctgcccggaacattgttaatagaaatggccatcagctccttgatacctactttacacttcacttgtgtagtactgaaaagatatataaagaattttatagaagtgaagtgattaagaattccttgaatcccacgtggcgaagtctcgattttggaattatgccagaccgtcttgatacatctgtgtcttgtttcgtggtgaagatatggggtggaaaggagaacatctaccagctgttgattgaatggaaagtctgtttggatgggctgaaatacttgggtcagcagattcatgcccgaaaccaaaatgaaataatttttgggctgaatgatggatactatggtgctccatttgaacataagggttattcaaatgctcagaagactattcttctgcaggtggatcagaactgtgttcgcaattcttacgatgtcttctctttgctacggcttcatagagcccagtgtgcaattaaacagactcaggtaactgttcagaaaattggaaaggaaattgaagaaaaactaagactcacatctacaagcaatgaactgaaaaaaaaaagtgaatgcctgcagttaaaaattttggtgcttcagaatgaactggaacggcagaagaaagctttgggacgggaggtggcattactgcataagcaacaaattgcattacaagacaaaggaagtgcattttcagctgagcacctcaaacttcaactccagaaggaatccctaaatgagctgaggaaggagtgcactgcaaaaagagaactcttcttgaagactaatgctcagttgacaattcgttgcaggcagttactctctgagctttcctacatttaccctattgatttgaatgaacataaggattactttgtatgcggtgtcaagttgcctaattctgaggacttccaagcaaaagatgatggaagcattgctgttgcccttggttatactgcacatctggtctccatgatttcctttttcctacaagtgcccctcagatatcctataattcataaggggtctagatcaacaatcaaagacaatatcaatgacaaactgacggaaaaggagagagagtttccactgtatccaaaaggaggggagaagttgcagtttgattatggtgtctatcttctgaacaaaaatatagcacagctaagatatcaacatggactagggactccagacttgcggcaaacccttcccaacctgaaaaacttcatggagcatggactaatggtcaggtgtgacagacatcacacctccagtgcaatccctgttcctaagagacaaagctccatatttgggggtgcagatgtaggcttctctggggggatcccttcaccagacaaaggacatcgaaaacgggccagctctgagaatgagagacttcagtacaaaacccctcctcccagttacaactcagcattagcccagcctgtgaccaccgtcccctccatgggagagaccgagagaaagataacatctctatcctcctccttggatacctccttggacttctccaaagaaaacaagaatagccaagaacaaggagaagccctctccgggcaccgggccacagtcaatggcactctcctacccagcgagcaggccgggtccgccagtgtccagcttccaggcgagttccacccagtctcagaagctgagctctgctgtactgtggagcaagcagaagaaatcatcgggctggaagccacaggtttcgcctcaggtgatcagctagaagcatttaactgcatcccagtggacagtgctgtggcagtagagtgtgacgaacaagttctgggagaatttgaagagttctcccgaaggatctatgcactgaatgaaaacgtatccagcttccgccggccgcgcaggagttccgataagtgaagtgagcaggtcaacagtaggactggggcagaagctctgcctaaaatgaagtgaaagctgcacttaaccctttgtgataatgatgacacaaaatgaatattaatggaggatattcctcggaaaaacagactttgggaatgaaggagggactcaggatcattgttatcagtgggccaaagttagattttgctttcaagatttgcttttcgggcctgatgattttaaagcaaaaatcaccctctagttgaaagagcttacagctcgagtcaccttttagctatttgtctgctttttatttacccttgtatgttatcctcagagggaagatgataatatataaataatataatgaacacacccttagtttctcataagcatttgccctcaccatggtttataaaactttgggaaaacggaatattcagaaataggtttccgccatgtactgaaaggtctgtggccatctgtgaggtagatgaagaagcagcatagtggtctccttacatctaggcctaactgtccctcttcctgcccccgggtaccacagtccacctttagaccctactgtcgccccatcttctccgtggatgggccatgcgtcctgaaaacaggacatcagattcactggttctgtaacccagtagctgtgacgttccatctcttctaaccagccatggccttcccctcctctgccatacccttaatgcggccctcagattagatgaaaaacttgctcctggtggatcccaagggaccctcaaggacctcgaggttactgcagtcagatgccatctcatcccctgtgggggccaaagtttttatgtgggcagatgctgtggtcaggaactaggcatgctttctggcaatgcactcaccagacaaaaatcccttgatgtaaatcccatgttaatttattaaatttcagtcagaaggtcagcatttacatgacagaatgtatgtagagagttggggtgtctggtaggcaaactgcaaggcagttgagatagttggattaagaggctagacgagacatagaatactattggtatgtgtgcaatttcatgaatattaaattatgtttcgaagtccagttgtcattcccgcattcagatttcatttgctgttgctttatacgttacgtacccaaggacattgcctcagggttgcaaactctttaaaggaaaatttatccatatatccatgtattatatagaagaataaaaattgagtttacttca

SEQ ID NO: 296559 - DNA, 3394 bp, Homo sapiens
cactgcggtaatatggctcttccttagccagcggcggcaacggcggcagcggcggcagcggcggcggctactgtctgggctgagcagtagtgcctctcgggtggcgggtttctaggctgcaggggcttggtaggtggtggcaagggggcggcggcggatgccggaagagtgcccgccccgccgcttggcggcccctggatcgagatgagcgcctccgcgtcggtcgggggccccgtcccccagccacccccgggcccggccgctgctctgcctcccggttctgccgcgcgggccctgcatgtggagctgccgtctcagcagcggcgtcttcgacatcttcggaacattgctgcccggaacattgttaatagaaatggccatcagctccttgatacctactttacacttcacttgtgtagtactgaaaagatatataaagaattttatagaagtgaagtgattaagaattccttgaatcccacgtggcgaagtctcgattttggaattatgccagaccgtcttgatacatctgtgtcttgtttcgtggtgaagatatggggtggaaaggagaacatctaccagctgttgattgaatggaaagtctgtttggatgggctgaaatacttgggtcagcagattcatgcccgaaaccaaaatgaaataatttttgggctgaatgatggatactatggtgctccatttgaacataagggttattcaaatgctcagaagactattcttctgcaggtggatcagaactgtgttcgcaattcttacgatgtcttctctttgctacggcttcatagagcccagtgtgcaattaaacagactcaggtaactgttcagaaaattggaaaggaaattgaagaaaaactaagactcacatctacaagcaatgaactgaaaaaaaaaagtgaatgcctgcagttaaaaattttggtgcttcagaatgaactggaacggcagaagaaagctttgggacgggaggtggcattactgcataagcaacaaattgcattacaagacaaaggaagtgcattttcagctgagcacctcaaacttcaactccagaaggaatccctaaatgagctgaggaaggagtgcactgcaaaaagagaactcttcttgaagactaatgctcagttgacaattcgttgcaggcagttactctctgagctttcctacatttaccctattgatttgaatgaacataaggattactttgtatgcggtgtcaagttgcctaattctgaggacttccaagcaaaagatgatggaagcattgctgttgcccttggttatactgcacatctggtctccatgatttcctttttcctacaagtgcccctcagatatcctataattcataaggggtctagatcaacaatcaaagacaatatcaatgacaaactgacggaaaaggagagagagtttccactgtatccaaaaggaggggagaagttgcagtttgattatggtgtctatcttctgaacaaaaatatagcacagctaagatatcaacatggactagggactccagacttgcggcaaacccttcccaacctgaaaaacttcatggagcatggactaatggtcaggtgtgacagacatcacacctccagtgcaatccctgttcctaagagacaaagctccatatttgggggtgcagatgtaggcttctctggggggatcccttcaccagacaaaggacatcgaaaacgggccagctctgagaatgagagacttcagtacaaaacccctcctcccagttacaactcagcattagcccagcctgtgaccaccgtcccctccatgggagagaccgagagaaagataacatctctatcctcctccttggatacctccttggacttctccaaagaaaacaagaaaaaaggagaggatctagttggcagcttaaacggaggccacgcgaatgtgcaccctagccaagaacaaggagaagccctctccgggcaccgggccacagtcaatggcactctcctacccagcgagcaggccgggtccgccagtgtccagcttccaggcgagttccacccagtctcagaagctgagctctgctgtactgtggagcaagcagaagaaatcatcgggctggaagccacaggtttcgcctcaggtgatcagctagaagcatttaactgcatcccagtggacagtgctgtggcagtagagtgtgacgaacaagttctgggagaatttgaagagttctcccgaaggatctatgcactgaatgaaaacgtatccagcttccgccggccgcgcaggagttccgataagtgaagtgagcaggtcaacagtaggactggggcagaagctctgcctaaaatgaagtgaaagctgcacttaaccctttgtgataatgatgacacaaaatgaatattaatggaggatattcctcggaaaaacagactttgggaatgaaggagggactcaggatcattgttatcagtgggccaaagttagattttgctttcaagatttgcttttcgggcctgatgattttaaagcaaaaatcaccctctagttgaaagagcttacagctcgagtcaccttttagctatttgtctgctttttatttacccttgtatgttatcctcagagggaagatgataatatataaataatataatgaacacacccttagtttctcataagcatttgccctcaccatggtttataaaactttgggaaaacggaatattcagaaataggtttccgccatgtactgaaaggtctgtggccatctgtgaggtagatgaagaagcagcatagtggtctccttacatctaggcctaactgtccctcttcctgcccccgggtaccacagtccacctttagaccctactgtcgccccatcttctccgtggatgggccatgcgtcctgaaaacaggacatcagattcactggttctgtaacccagtagctgtgacgttccatctcttctaaccagccatggccttcccctcctctgccatacccttaatgcggccctcagattagatgaaaaacttgctcctggtggatcccaagggaccctcaaggacctcgaggttactgcagtcagatgccatctcatcccctgtgggggccaaagtttttatgtgggcagatgctgtggtcaggaactaggcatgctttctggcaatgcactcaccagacaaaaatcccttgatgtaaatcccatgttaatttattaaatttcagtcagaaggtcagcatttacatgacagaatgtatgtagagagttggggtgtctggtaggcaaactgcaaggcagttgagatagttggattaagaggctagacgagacatagaatactattggtatgtgtgcaatttcatgaatattaaattatgtttcgaagtcca

SEQ ID NO: 296560 - DNA, 1349 bp, Homo sapiens
cactgcggtaatatggctcttccttagccagcggcggcaacggcggcagcggcggcagcggcggcggctactgtctgggctgagcagtagtgcctctcgggtggcgggtttctaggctgcaggggcttggtaggtggtggcaagggggcggcggcggatgccggaagagtgcccgccccgccgcttggcggcccctggatcgagatgagcgcctccgcgtcggtcgggggccccgtcccccagccacccccgggcccggccgctgctctgcctcccggttctgccgcgcgggccctgcatgtggagctgccgtctcagcagcggcgtcttcgacatcttcggaacattgctgcccggaacattgttaatagaaatggccatcagctccttgatacctactttacacttcacttgtgtagtactgaaaagatatataaagaattttatagaagtgaagtgattaagaattccttgaatcccacgtggcgaagtctcgattttggaattatgccagaccgtcttgatacatctgtgtcttgtttcgtggtgaagatatggggtggaaaggagaacatctaccagctgttgattgaatggaaagtctgtttggatgggctgaaatacttgggtcagcagattcatgcccgaaaccaaaatgaaataatttttgggctgaatgatggatactatggtgctccatttgaacataagggttattcaaatgctcagaagactattcttctgcaggtggatcagaactgtgttcgcaattcttacgatgtcttctctttgctacggcttcatagagcccagtgtgcaattaaacagactcaggtaactgttcagaaaattggaaaggaaattgaagaaaaactaagactcacatctacaagcaatgaactgaaaaaaaaaagtgaatgcctgcagttaaaaattttggtgcttcagaatgaactggaacggcagaagaaagctttgggacgggaggtggcattactgcataagcaacaaattgcattacaagacaaaggtgagtggaaataccatacaaacagcctaacctccacattcagtagttctcctttcttcttcttcacaagctcaaatagtcattttttgtgtaaatacagtcacacatcacttaatgacagggatatattctggaaatgcatcctttggtgatttccttgctgagctgccatcatagagtatgtttacacaagctcagatggtataaactactactacacacctaggctatatggctgtaaacttgtacagcatgttaccatactgaatactgtaggcaactataacacaatggtgagtatttatgtatctaaatatat

SEQ ID NO: 296561 - DNA, 4072 bp, Homo sapiens
cactgcggtaatatggctcttccttagccagcggcggcaacggcggcagcggcggcagcggcggcggctactgtctgggctgagcagtagtgcctctcgggtggcgggtttctaggctgcaggggcttggtaggtggtggcaagggggcggcggcggatgccggaagagtgcccgccccgccgcttggcggcccctggatcgagatgagcgcctccgcgtcggtcgggggccccgtcccccagccacccccgggcccggccgctgctctgcctcccggttctgccgcgcgggccctgcatgtggagctgccgtctcagcagcggcgtcttcgacatcttcggaacattgctgcccggaacattgttaatagaaatggccatcagctccttgatacctactttacacttcacttgtgtagtactgaaaagatatataaagaattttatagaagtgaagtgattaagaattccttgaatcccacgtggcgaagtctcgattttggaattatgccagaccgtcttgatacatctgtgtcttgtttcgtggtgaagatatggggtggaaaggagaacatctaccagctgttgattgaatggaaagtctgtttggatgggctgaaatacttgggtcagcagattcatgcccgaaaccaaaatgaaataatttttgggctgaatgatggatactatggtgctccatttgaacataagggttattcaaatgctcagaagactattcttctgcaggtggatcagaactgtgttcgcaattcttacgatgtcttctctttgctacggcttcatagagcccagtgtgcaattaaacagactcaggtaactgttcagaaaattggaaaggaaattgaagaaaaactaagactcacatctacaagcaatgaactgaaaaaaaaaagtgaatgcctgcagttaaaaattttggtgcttcagaatgaactggaacggcagaagaaagctttgggacgggaggtggcattactgcataagcaacaaattgcattacaagacaaaggaagtgcattttcagctgagcacctcaaacttcaactccagaaggaatccctaaatgagctgaggaaggagtgcactgcaaaaagagaactcttcttgaagactaatgctcagttgacaattcgttgcaggcagttactctctgagctttcctacatttaccctattgatttgaatgaacataaggattactttgtatgcggtgtcaagttgcctaattctgaggacttccaagcaaaagatgatggaagcattgctgttgcccttggttatactgcacatctggtctccatgatttcctttttcctacaagtgcccctcagatatcctataattcataaggggtctagatcaacaatcaaagacaatatcaatgacaaactgacggaaaaggagagagagtttccactgtatccaaaaggaggggagaagttgcagtttgattatggtgtctatcttctgaacaaaaatatagcacagctaagatatcaacatggactagggactccagacttgcggcaaacccttcccaacctgaaaaacttcatggagcatggactaatggtcaggtgtgacagacatcacacctccagtgcaatccctgttcctaagagacaaagctccatatttgggggtgcagatgtaggcttctctggggggatcccttcaccagacaaaggacatcgaaaacgggccagctctgagaatgagagacttcagtacaaaacccctcctcccagttacaactcagcattagcccagcctgtgaccaccgtcccctccatgggagagaccgagagaaagataacatctctatcctcctccttggatacctccttggacttctccaaagaaaacaagaaaaaaggagaggatctagttggcagcttaaacggaggccacgcgaatgtgcaccctagccaagaacaaggagaagccctctccgggcaccgggccacagtcaatggcactctcctacccagcgagcaggccgggtccgccagtgtccagcttccaggcgagttccacccagtctcagaagctgagctctgctgtactgtggagcaagcagaagaaatcatcgggctggaagccacaggtttcgcctcaggtgatcagctagaagcatttaactgcatcccagtggacagtgctgtggcagtagagtgtgacgaacaagttctgggagaatttgaagagttctcccgaaggatctatgcactgaatgaaaacgtatccagcttccgccggccgcgcaggagttccgataagtgaagtgagcaggtcaacagtaggactggggcagaagctctgcctaaaatgaagtgaaagctgcacttaaccctttgtgataatgatgacacaaaatgaatattaatggaggatattcctcggaaaaacagactttgggaatgaaggagggactcaggatcattgttatcagtgggccaaagttagattttgctttcaagatttgcttttcgggcctgatgattttaaagcaaaaatcaccctctagttgaaagagcttacagctcgagtcaccttttagctatttgtctgctttttatttacccttgtatgttatcctcagagggaagatgataatatataaataatataatgaacacacccttagtttctcataagcatttgccctcaccatggtttataaaactttgggaaaacggaatattcagaaataggtttccgccatgtactgaaaggtctgtggccatctgtgaggtagatgaagaagcagcatagtggtctccttacatctaggcctaactgtccctcttcctgcccccgggtaccacagtccacctttagaccctactgtcgccccatcttctccgtggatgggccatgcgtcctgaaaacaggacatcagattcactggttctgtaacccagtagctgtgacgttccatctcttctaaccagccatggccttcccctcctctgccatacccttaatgcggccctcagattagatgaaaaacttgctcctggtggatcccaagggaccctcaaggacctcgaggttactgcagtcagatgccatctcatcccctgtgggggccaaagtttttatgtgggcagatgctgtggtcaggaactaggcatgctttctggcaatgcactcaccagacaaaaatcccttgatgtaaatcccatgttaatttattaaatttcagtcagaaggtcagcatttacatgacagaatgtatgtagagagttggggtgtctggtaggcaaactgcaaggcagttgagatagttggattaagaggctagacgagacatagaatactattggtatgtgtgcaatttcatgaatattaaattatgtttcgaagtccagttgtcattcccgcattcagatttcatttgctgttgctttatacgttacgtacccaaggacattgcctcagggttgcaaactctttaaaggaaaatttatccatatatccatgtattatatagaagaataaaaattgagtttacttcacccgacctgatttttttttaccagcttggaaattcctcttgaacctacgtctccatatgtcacatcatgacaggactagcctgaacaaaagccatgtctatctaagcggaggctgttgacttcattcagtttgcatattgtatatagcaacacaaacacttgacaggtatatactccagtcgccacatttgtcctgcataacagcttcactcacaggcctcaccgtcactttattttgtgtccaagcattcctgggctcaagtttaatgtatagctacattgttgttttccatgtagagaactcacaggatgactacatcacaaataaacccaactctcaggcagtcgaaagctttaactggatctgcagaagcccatcttcctccacatgaagaagtggggctccttcacctagagcaggagcttctctgcagtgtactgtctgtcgctcattttggagtcagtgtgggtggagacagcatcgtggatatgcacgtgctgcggggccctccagggaagtaacatttacc

SEQ ID NO: 296562 - DNA, 1381 bp, Homo sapiens
cactgcggtaatatggctcttccttagccagcggcggcaacggcggcagcggcggcagcggcggcggctactgtctgggctgagcagtagtgcctctcgggtggcgggtttctaggctgcaggggcttggtaggtggtggcaagggggcggcggcggatgccggaagagtgcccgccccgccgcttggcggcccctggatcgagatgagcgcctccgcgtcggtcgggggccccgtcccccagccacccccgggcccggccgctgctctgcctcccggttctgccgcgcgggccctgcatgtggagctgccgtctcagcagcggcgtcttcgacatcttcggaacattgctgcccggaacattgttaatagaaatggccatcagctccttgatacctactttacacttcacttgtgtagtactgaaaagatatataaagaattttatagaagtgaagtgattaagaattccttgaatcccacgtggcgaagtctcgattttggaattatgccagaccgtcttgatacatctgtgtcttgtttcgtggtgaagatatggggtggaaaggagaacatctaccagctgttgattgaatggaaagtctgtttggatgggctgaaatacttgggtcagcagattcatgcccgaaaccaaaatgaaataatttttgggctgaatgatggatactatggtgctccatttgaacataagggttattcaaatgctcagaagactattcttctgcaggtggatcagaactgtgttcgcaattcttacgatgtcttctctttgctacggcttcatagagcccagtgtgcaattaaacagactcaggtaactgttcagaaaattggaaaggaaattgaagaaaaactaagactcacatctacaagcaatgaactgaaaaaaaaaagtgaatgcctgcagttaaaaattttggtgcttcagaatgaactggaacggcagaagaaagctttgggacgggaggtggcattactgcataagcaacaaattgcattacaagacaaagcaagcatcaattatcttcatatttacgttggttctccttgcctcctaagtcctgtgaggagcatttcaggttaatcctgtgaatgcagtggtttgtggtaaagctgaagaacctcaggctcaggaaacctgaatctttcttaatagattggaagtaaacctctctgatgcttgtcccagaggaaaattattatcatgatgtttgatcgttggacaaaactgccctctgctgtggagggagacaccatctctgtcttacaacaaaagtcagtgtctgtgcttgtaacacaaacagaaatgagaaacctatttagaattatctcccaataataaattcattattttgattgtg

SEQ ID NO: 296563 - DNA, 1446 bp, Homo sapiens
cactgcggtaatatggctcttccttagccagcggcggcaacggcggcagcggcggcagcggcggcggctactgtctgggctgagcagtagtgcctctcgggtggcgggtttctaggctgcaggggcttggtaggtggtggcaagggggcggcggcggatgccggaagagtgcccgccccgccgcttggcggcccctggatcgagatgagcgcctccgcgtcggtcgggggccccgtcccccagccacccccgggcccggccgctgctctgcctcccggttctgccgcgcgggccctgcatgtggagctgccgtctcagcagcggcgtcttcgacatcttcggaacattgctgcccggaacattgttaatagaaatggccatcagctccttgatacctactttacacttcacttgtgtagtactgaaaagatatataaagaattttatagaagtgaagtgattaagaattccttgaatcccacgtggcgaagtctcgattttggaattatgccagaccgtcttgatacatctgtgtcttgtttcgtggtgaagatatggggtggaaaggagaacatctaccagctgttgattgaatggaaagtctgtttggatgggctgaaatacttgggtcagcagattcatgcccgaaaccaaaatgaaataatttttgggctgaatgatggatactatggtgctccatttgaacataagggttattcaaatgctcagaagactattcttctgcaggtggatcagaactgtgttcgcaattcttacgatgtcttctctttgctacgaaatatcctgcttttgccagtttaataagtggaagtatggtggaaaataaagggctttggtccttcacctaaattccagtcctaaaactgccatgtgtaggtagactggatgcaagactttgagcaagtaacgtcaactttttgtataccttagtctgcttttgtaaaatggggctaatatttgtctcttctattaggaatattgttagaattaaataagataaaatatttgaaagatcttaggatagttactggcatatagtagacatttaataaatgttagttttcttcttcctctttacttacctggtcttggatatagctttctcctctaagccagtattccttttccttgttaccactagcttttctacttttcagcatattttccctttctctccccagcattctagtgttttccatatctgcttttataactgcatgatggattcttcttgctcactgcccagaaaagtcaatgcattgagaacaggttttgcagcaaagaaagagtttaattattacagggccagccaaatggaaggatgggagataattctcagatccgcttcctcagaattcacaggctagagtgtttcaaggatagtttggtaggcagaggtctaggaaatggggaaacctgattagt

SEQ ID NO: 296564 - DNA, 3515 bp, Homo sapiens
ccacaaagcagtggaaatcgagcaggagcgggtgaagtcagcgggggcctggatcatccacccctacagcgacttccggttttactgggacctgatcatgctgctgctgatggtggggaacctcatcgtcctgcctgtgggcatcaccttcttcaaggaggagaactccccgccttggatcgtcttcaacgtattgtctgatactttcttcctactggatctggtgctcaacttccgaacgggcatcgtggtggaggagggtgctgagatcctgctggcaccgcgggccatccgcacgcgctacctgcgcacctggttcctggttgacctcatctcttctatccctgtggattacatcttcctagtggtggagctggagccacggttggacgctgaggtctacaaaacggcacgggccctacgcatcgttcgcttcaccaagatcctaagcctgctgaggctgctccgcctctcccgcctcatccgctacatacaccagtgggaggagatctttcacatgacctatgacctggccagtgctgtggttcgcatcttcaacctcattgggatgatgctgctgctatgtcactgggatggctgtctgcagttcctggtgcccatgctgcaggacttccctcccgactgctgggtctccatcaaccacatggtgaaccactcgtggggccgccagtattcccatgccctgttcaaggccatgagccacatgctgtgcattggctatgggcagcaggcacctgtaggcatgcccgacgtctggctcaccatgctcagcatgatcgtaggtgccacatgctacgccatgttcatcggccatgccacggcactcatccagtccctggactcttcccggcgtcagtaccaggagaagtacaagcaggtggagcagtacatgtccttccacaagctgccagcagacacgcggcagcgcatccacgagtactatgagcaccgctaccagggcaagatgttcgatgaggaaagcatcctgggcgagctgagcgagccgcttcgcgaggagatcattaacttcacctgtcggggcctggtggcccacatgccgctgtttgcccatgccgaccccagcttcgtcactgcagttctcaccaagctgcgctttgaggtcttccagccgggggatctcgtggtgcgtgagggctccgtggggaggaagatgtacttcatccagcatgggctgctcagtgtgctggcccgcggcgcccgggacacacgcctcaccgatggatcctactttggggagatctgcctgctaactaggggccggcgcacagccagtgttcgggctgacacctactgccgcctttactcactcagcgtggaccatttcaatgctgtgcttgaggagttccccatgatgcgccgggcctttgagactgtggccatggatcggctgctccgcatcggcaagaagaattccatactgcagcggaagcgctccgagccaagtccaggcagcagtggtggcatcatggagcagcacttggtgcaacatgacagagacatggctcggggtgttcggggtcgggccccgagcacaggagctcagcttagtggaaagccagtactgtgggagccactggtacatgcgccccttcaggcagctgctgtgacctccaatgtggccattgccctgactcatcagcggggccctctgcccctctcccctgactctccagccaccctccttgctcgctctgcttggcgctcagcaggctctccagcttccccgctggtgcccgtccgagctggcccatgggcatccacctcccgcctgcccgccccacctgcccgaaccctgcacgccagcctatcccgggcagggcgctcccaggtctccctgctgggtccccctccaggaggaggtggacggcggctaggacctcggggccgcccactctcagcctcccaaccctctctgcctcagcgggcaacaggcgatggctctcctgggcgtaagggatcaggaagtgagcggctgcctccctcagggctcctggccaaacctccaaggacagcccagccccccaggccaccagtgcctgagccagccacaccccggggtctccagctttctgccaacatgtaaaacctttgagtacatccagccttagttcttggggtgcagtagtatgtacccaagggcagatgcctcttggggaaggccatggggacctgaaacattgccccatggaaatgtcgaccctgtgcggacattccgcatactgccatgaagacggtctctgtgtcctcagctcaagaatcctgtagcttgtcccatcataatccattcacccgttcatcatgtgtactgagcagctaccatgttcaaggtaatatgccaggcgctgtatgtctccactgccaagtagaagtgactcaaaaccctctgacaaggatattcccttggctatggtcctgccaggtgcaggcccaggcccatgaccccacctttactaagcacaagtacttgccactgccatcactgccaagtaactagatgtctctgtttccctgccaatgatcctgcaggttctgcccggtctggttatcttcctgttcctgtagcatagccaggcactgccagtcacctgtgcccccattgctgtcagcagatgtcttgggtcctgagtgtgggtatccacttttacccgctcactgccacctgtggacactctgtgtctaccctctgagtgggaacatacttctaagttccctgcagtctctgtcctgtggtagaccatctttttgtaaactgcgagcttcctcttccctgtaccctctgccccagtcgtgaccccctaaaagttaaggggtagttggcacctccttattaatatgccagcctagatcccccccggtggaggggcaaatggctgaatccttgtgtgatatttttttcttcgcttgtttatttattcatttatttaattgtatttattcatttactaactttatgtgttaccaattaattttgtttacccattcctttatccatccctcccctccttttcaggtaaggagacaggaggagtaggaggaggcagggcctctccatgccagcctctgtggtccttgcccaaacccatcagcgcaatacttgaaccttctcccaggtaggggcaggaggagccacatgagagagggagaaggaccgcgtttacctttagagttttgttttgttttttccttctgagtttgctgttggtgcaggaataagggaaaggcccaaggtatccaagcctggggaagggcaggccagccagcacctctgccttctcagggacaagagtagtcctttaccaccctcactctgcctgtcccctctcctactctacagcattaaagactgtgggaccaggaccctaagtctcctttccttctgggtggggagttctggggttcttggtgtgtgggagaagttttataattgcttccaaacagctgggtttaaatataaaatagacacactcattttt

SEQ ID NO: 296565 - DNA, 900 bp, Homo sapiens
aatctagacgatccccttagacggtacccaacacatgaagacggtctctgtgtcctcagctcaagaatcctgtagcttgtcccatcataatccattcacccgttcatcatgtgtactgagcagctaccatgttcaaggtaatatgccaggcgctgtatgtctccactgccaagtagaagtgactcaaaaccctctgacaaggatattcccttggctatggtcctgccaggtgcaggcccaggcccatgaccccacctttactaagcacaagtacttgccactgccatcactgccaagtaactagatgtctctgtttccctgccaatgatcctgcaggttctgcccggtctggttatcttcctgttcctgtagcatagccaggcactgccagtcacctgtgcccccattgctgtcagcagatgtcttgggtcctgagtgtaaggagacaggaggagtaggaggaggcagggcctctccatgccagcctctgtggtccttgcccaaacccatcagcgcaatacttgaaccttctcccaggtaggggcaggaggagccacatgagagagggagaaggaccgcgtttacctttagagttttgttttgttttttccttctgagtttgctgttggtgcaggaataagggaaaggcccaaggtatccaagcctggggaagggcaggccagccagcacctctgccttctcagggacaagagtagtcctttaccaccctcactctgcctgtcccctctcctactctacagcattaaagactgtgggaccaggaccctaagtctcctttccttctgggtggggagttctggggttcttggtgtgtgggagaagttttataattgcttccaaacagctgggtttaaatataaaatagacacactcattttt

SEQ ID NO: 296566 - DNA, 443 bp, Homo sapiens
ctcgtggtgcgtgagggctccgtggggaggaagatgtacttcatccagcatgggctgctcagtgtgctggcccgcggcgcccgggacacacgcctcaccgatggatcctactttgggggtcagcaggcctcagggagggtggcagggtcacgagcagacagtggagagggcaactgctcccaggctctgggtccctgcctcagtacgctgcagaatcacagagctccagcccctccccaggcctactcagtgagaatctctgggctggggtctggagctctatagtttttgtttgtttgtttgtttgtttgttttttgaggtggagtctcgctctgttgcccaggctggagtgcagtggcgcaatctcggctcactgaaagctctgcctcctgggttcacgccattctcctgcctcacactcccgagtagctgggaccacagg

SEQ ID NO: 296567 - DNA, 435 bp, Homo sapiens
gtactttttagagcgactgccggaagtgactgcggacgaatcggcgtttgccgaggctggcatagatttggctgtctccgctcatagctgcttttggcgcgaaagatgccgggtctggttgactcaaaccctgccccgcctgagtctcaggagaagaagccgctgaagccctgctgcgcttgcccggagaccaagaaggcgcgcgatgcgtgtatcatcgagaaaggagaagaacactgtggacatctaattgaggcccacaaggaatgcatgagagccctaggatttaaaatatgaaatggtggtctgctgtgtgaataaataattcctgaagaatgaagaagattaattttgggagttctttgacgaactttgatatgtggaaaaagtatttataatttattgtaagaagaaagtaaaatattactagtggaa

SEQ ID NO: 296568 - DNA, 700 bp, Homo sapiens
gtactttttagagcgactgccggaagtgactgcggacgaatcggcgtttgccgaggctggcatagatttggctgtctccgctcatagctgcttttggcgcgaaagatgccgggtctggttgactcaaaccctgccccgcctgagtctcaggagaagaagccgctgaagccctgctgcgcttgcccggagaccaagaaggcgcgcgatgcgtgtatcatcgagaaaggagaagaacactgtggacatctaattgaggcccacaaggaatgcatgagagccctaggatttaaaatatgaaatgggtctcactctgttacccaggctggggtgaagtggcccaatcacagctcattgcagcctcaacctgggaggttcaggtgatcctcccctcagcctcctaagtaactgggactacaggtgtgggccaccgtgcctggctaattttttgtgttgttttttagagatggggtttcaccatcttgcccaggctggtctcaacctcttggactcaggcaatcctcctgccttggtctcccaaagtgctgggattaagaggtgtgagccactatgcctggccaagaaatgcttttaagtagggagtgggtatcccacggaagtattgctttctgaaaaatgaaaatggaattgtagcatgctttattcgaataaaactaaacctcaggccattttttttttaatt

SEQ ID NO: 296569 - DNA, 681 bp, Homo sapiens
gtactttttagagcgactgccggaagtgactgcggacgaatcggcgtttgccgaggctggcatagatttggctgtctccgctcatagctgcttttggcgcgaaagatgccgggtctggttgactcaaaccctgccccgcctgagtctcaggagaagaagccgctgaagccctgctgcgcttgcccggagaccaagaaggcgcgcgatgcgtgtatcatcgagaaaggagaagaacactgtggacatctaattgaggcccacaaggaatgcatgagagccctaggatttaaaatatgaaatggtggtctgctgtgtgaataaataattcctgaagaatgaagaagattaattttgggagttctttgacgaactttgatatgtggaaaaagtatttataatttattgtaagaagaaagtaaaatattactagtggaaaaaaaaaaaaacaaaaaaaacacaacacaaacacaaacaaaaacaagaaaataaaaacaaaagaaaaaaaccaagctgggggccgccgccgccctgcccccccgcagaagcacttctcacacacacacccggcggcggcgcggccgccccacccgtagcacatacgcagcccaccgggaccacggtgggcttccccaacagcaacgcgtggcccggtaaccggggcgggccacccccacaaaaaag

SEQ ID NO: 296570 - DNA, 692 bp, Homo sapiens
gtactttttagagcgactgccggaagtgactgcggacgaatcggcgtttgccgaggctggcatagatttggctgtctccgctcatagctgcttttggcgcgaaagatgccgggtctggttgactcaaaccctgccccgcctgagtctcaggagaagaagccgctgaagccctgctgcgcttgcccggagaccaagaaggcgcgcgatgcgtgtatcatcgagaaaggagaagaacactgtggacatctaattgaggcccacaaggaatgcatgagagccctaggatttaaaatatgaaatggtggtctgctgtgtgaataaataattcctgaagaatgaagaagattaattttgggagttctttgacgaactttgatatgtggaaaaagtatttataatttattgtaagaagaaagtaaaatattactagtggaattcagttgtgtttcttttttgtgttcctcatttgctcacgtggctttttcccccaaaggatatataccaacaaatcttgtaacataaggttcttatgttcttattactatgtcattctgggaactctggatatctgttgtcaggagaaagcagatactgacctcaaccaatgaaatctccagaaataggtgcatagaagtaaaagaaccctttaccaattcagaatcagtgtggtagccatatcatctcattcaaca

SEQ ID NO: 296571 - DNA, 551 bp, Homo sapiens
gtactttttagagcgactgccggaagtgactgcggacgaatcggcgtttgccgaggctggcatagatttggctgtctccgctcatagctgcttttggcgcgaaagatgccgggtctggttgactcaaaccctgccccgcctgagtctcaggagaagaagccgctgaagccctgctgcgcttgcccggagaccaagaaggcgcgcgatgcgtgtatcatcgagaaaggagaagaacactgtggacatctaattgaggcccacaaggaatgcatgagagccctaggatttaaaatatgaaatgggtctcactctgttacccaggctggggtgaagtggcccaatcacagctcattgcagcctcaacctgggaggttcaggtgatcctcccctcagcctcctaagtaactgggactacaggtggtctgctgtgtgaataaataattcctgaagaatgaagaagattaattttgggagttctttgacgaactttgatatgtggaaaaagtatttataatttattgtaagaagaaagtaaaatattactagtggaa

SEQ ID NO: 296572 - DNA, 766 bp, Homo sapiens
ggggtttgcaggtcttgtttcttgaatatctgtaaaaataactgctttagccttttttggaggatatttttgagaaatatgtatttctcaaacacacacatatgtattatatatatatacacgcagagagagtttttacttcaaaaacttttaaagagtaaataatatcatgaataatttcactaatgtttttagttaggcaaacctagaattttaaaatgttgattttgaattttatgactgatttggaataattctggcaattagttaattactcatctgaggcattcatttctagtggtcttaattccctgactccatagatctggcatgatgtttgaaatctgactttctaaaataaatatttttctgtaggtggtctgctgtgtgaataaataattcctgaagaatgaagaagattaattttgggagttctttgacgaactttgatatgtggaaaaagtatttataatttattgtaagaagaaagtaaaatattactagtggaattcagttgtgtttcttttttgtgttcctcatttgctcacgtggctttttcccccaaaggatatataccaacaaatcttgtaacataaggttcttatgttcttattactatgtcattctgggaactctggatatctgttgtcaggagaaagcagatactgacctcaaccaatgaaatctccagaaataggtgcatagaagtaaaagaaccctttaccaattcagaatcagtgtggtagccatatcatctcattcaaca

SEQ ID NO: 296573 - DNA, 540 bp, Homo sapiens
gtactttttagagcgactgccggaagtgactgcggacgaatcggcgtttgccgaggctggcatagatttggctgtctccgctcatagctgcttttggcgcgaaagatgccgggtctggttgactcaaaccctgccccgcctgagtctcaggagaagaagccgctgaagccctgctgcgcttgcccggagaccaagaaggcgcgcgatgcgtggtttcgtggtcgggtctctgttgacttatcccgtagcttagtaccgggaaacgatggagagagaggagaacggcaagcttcaaccactcattccttcctacaaattatcatcgagaaaggagaagaacactgtggacatctaattgaggcccacaaggaatgcatgagagccctaggatttaaaatatgaaatggtggtctgctgtgtgaataaataattcctgaagaatgaagaagattaattttgggagttctttgacgaactttgatatgtggaaaaagtatttataatttattgtaagaagaaagtaaaatattactagtggaa

SEQ ID NO: 296574 - DNA, 567 bp, Homo sapiens
ttgagctgttctctgtgcccttcatttagcataaatattttactcagtttatttctttatagagcagtgctactccttggatattgactagaggcaatatttaatatgcgtgattatttcttatcagatttcccccccaaaatcacttatctgtggaatgtcttcataggcatgggcatatcataagatcaaataaaaacaaagctgtttgaggtaatagcgtttgttttaattccagctacattccattatacccgtgttttgtctcactccccatcactatcatgcatacttaataatgtgcttaatgcatatttagataacaagtacattttgttttatagtatcatcgagaaaggagaagaacactgtggacatctaattgaggcccacaaggaatgcatgagagccctaggatttaaaatatgaaatggtggtctgctgtgtgaataaataattcctgaagaatgaagaagattaattttgggagttctttgacgaactttgatatgtggaaaaagtatttataatttattgtaagaagaaagtaaaatattactagtggaa

SEQ ID NO: 296575 - DNA, 564 bp, Homo sapiens
gtactttttagagcgactgccggaagtgactgcggacgaatcggcgtttgccgaggctggcatagatttggctgtctccgctcatagctgcttttggcgcgaaagatgccgggtctggttgactcaaaccctgccccgcctgagtctcaggagaagaagccgctgaagccctgctgcgcttgcccggagaccaagaaggcgcgcgatgcgtggtttcgtggtcgggtctctgttgacttatcccgtagcttagtaccgggaaacgatggagagagaggagaacggcaagcttcaaccactcattccttcctacaaattatcatcgagaaaggagaagaacactgtggacatctaattgaggcccacaaggaatgcatgagagccctaggatttaaaatatgaaatggtggtctgctgtgtgaataaataattcctgaagaatgaagaagattaattttgggagttctttgacgaactttgatatgtggaaaaagtatttataatttattgtaagaagaaagtaaaatattactagtggaaaaataaaaaaaggaaaaaaaaagg

SEQ ID NO: 296576 - DNA, 519 bp, Homo sapiens
aaagcttaccgcagtgtcacaatcatagatcctctcatatttttaaaggtaaacaaatgcatttcttatgggagtcatggaataggtaaatgcaagtagaagagaaaaagcagatgtgacagtcaagggcagagagatgacagatactcagatttcatagattagcacagaacttctttcggcctttattaataagattgccctagcggtaaaagcttaagcttttaccgccaggagaagaagccgctgaagccctgctgcgcttgcccggagaccaagaaggcgcgcgatgcgtgtatcatcgagaaaggagaagaacactgtggacatctaattgaggcccacaaggaatgcatgagagccctaggatttaaaatatgaaatggtggtctgctgtgtgaataaataattcctgaagaatgaagaagattaattttgggagttctttgacgaactttgatatgtggaaaaagtatttataatttattgtaagaagaaagtaaaatattactagtggaa

SEQ ID NO: 296577 - DNA, 458 bp, Homo sapiens
gcgaggtgatctagaggatcccagtcgacggagactctctctgcgtgtatatgtattatatatatatacacgcagagagagtttttacttcaaaaacttttaaagagtaaataatatcatgaataatttcactaatgtttttagttaggcaaacctagaattttaaaatgttgattttgaattttatgactgatttggaataattctggcaattagttaattactcatctgaggcattcatttctagtggtcttaattccctgactccatagatctggcatgatgtttgaaatctgactttctaaaataaatatttttctgtaggtggtctgctgtgtgaataaataattcctgaagaatgaagaagattaattttgggagttctttgacgaactttgatatgtggaaaaagtatttataatttattgtaagaagaaagtaaaatattactagtggaa

SEQ ID NO: 296578 - DNA, 471 bp, Homo sapiens
gcagtgcaatatccatctttcattcctctttttaaaaccctaaaccgctttcctccaactgtatcaaccacagaccttccgtccgattggtagaaagaaagagaaggataaaggcaatgcccagttctgtctgaggtatgggaaaaatggcagcatgggggcactctgaaacagcacaggcacgctaaagaacatggctacagacagcagaaaccttacgttgttggcaggaaatgttcatgttcttggaaccaaccagcttattttcagacataagcagagtggcaatctttcttctgtggaaggcacctggctcactgaagacatctgatgggcacatgttgataaaggagtctacaagcacagcttttcttagaaagtgacatacaaaatgttcaatttatattttgaaaatcaatggaaacaaaaagttgttaaataaaacagcatatacaaattataattttgttt

SEQ ID NO: 296579 - DNA, 1741 bp, Homo sapiens
tgcgcattgtcagctggagcgttcggtggacagtgagcatgcgtaccatatctgaagttcgtaaattgaaattgaacatgcgtaattaatctttctgaataggaaaaaatatatacacaacaaaactctccgtttatggaacatgcgcatttgttctcagtaagtttttcgttttgaaagtgagcatgcgcatggtgagtaggttggtccgaagtttgaaccggacagaagcgctggtcggcgtctggcggttgtttttagaggtaatacacctagtttgtggctcagcatgtcaattgtaacagtgcaacttggtcagtgtggcaatcagattggttttgaagtttttgatgctttgcttagtgactcacacagttcccagggactctgctctatgagagagaatgaggcatatcaagcatcttgcaaagaaagattcttcagtgaggaggagaatggaggtattgataggcatgtatggcctcctttatcaggacttcctcctcttagtaaaatgtctctcaacaaggacctgcattttaacacttccattgctaacttggtcattcttcgtgggaaagatgtgcaaagtgcagatgtggagggatttaaagatccagctctgtatacttcctggttgaagcctgttaatgctttcaacgtgtggaaaacccagcgggcctttagcaaatatgagaagtctgcagtgttggtcagcaacagccagttcttagtaaaaccacttgatatgattgttgggaaggcatggaatatgtttgcttcaaaagcctacattcatcagtacacaaaatttggaatcgaagaagaggactttttagacagtttcacgtcattagagcaggttgttgccagttactgtaatctctgatcttgaacaatgggaaaagtataccttaaggcatttctggactaaaatattttcaatactattttctctgtaaagttttcaaagttctccatcctggctaacacggtgaaacaccgtctctaccagaaaatacaaaaaattagccaggcgcggtggcgggtgcctgtagtcccagctactcgggaggctgaggcaggagaatgacgtgaacccaggaggcggagcttgcagtgagccgagatcgcgccactgcactccagcctgggcgacagagcgagactccgtctcaaaaaaaaaaaaaaaaaaaaaatgttttcaaagttccattctgttaaagtaaccacgtagaatgctgagtctattctgcatactatgcccacagaaaaggaagaaaactttttaaaatggagaatcgcatgttttcaatgaaaacattcacttggtatttcatttgtaagaaaaaaaaatggtgcttttataaagaactttggggaaacactttgctgaaatgttgggactctggaactagccaagaaaagagaatattctctttgtctacatgttcctaaatctttactccaaaacaactccaaaaacaactcacaaagcatgaaccaaactttcacagcataatttcaagctaaggaattgtaattctgtacttaatatattcatgtttgaaatgaatgctttgaaccacaggagggagatgttgtcaaatgctacagtgtgaacatgtattttgaatattctgtaacagggcaagtttccactctaagcagctatttaaaaataaatatgaggattttggtaataaatgcttatgcttaagtacaaaagtaaataggaaaa

SEQ ID NO: 296580 - DNA, 2504 bp, Homo sapiens
tgcgcattgtcagctggagcgttcggtggacagtgagcatgcgtaccatatctgaagttcgtaaattgaaattgaacatgcgtaattaatctttctgaataggaaaaaatatatacacaacaaaactctccgtttatggaacatgcgcatttgttctcagtaagtttttcgttttgaaagtgagcatgcgcatggtgagtaggttggtccgaagtttgaaccggacagaagcgctggtcggcgtctggcggttgtttttagaggtaatacacctagtttgtggctcagcatgtcaattgtaacagtgcaacttggtcagtgtggcaatcagattggttttgaagtttttgatgctttgcttagtgactcacacagttcccagggactctgctctatgagagagaatgaggcatatcaagcatcttgcaaagaaagattcttcagtgaggaggagaatggagttccaattgcccgggctgttcttgttgacatggaacccaaagttatcaatcaaatgctgtcaaaggctgcccagtctggccaatggaaatatggtcaacatgcatgcttctgtcaaaaacaaggttctggaaacaactgggcatatggttactctgttcatggacccaggcatgaagaatctataatgaacataatccggaaggaagtggagaaatgtgactctttcagtggttttttcatcataatgagtatggctgggggcacaggatcaggattaggagctttcgttacacagaatttagaagatcagtactcaaactcattgaaaatgaatcagattatttggccttatggaactggtgaggttattgttcaaaactacaactccattttgacactttctcacttgtaccgatcttcagacgccctccttcttcatgagaatgatgccatccataagatctgtgcaaaactgatgaatatcaagcagatctcctttagtgatatcaatcaagtcctcgcacatcagctgggaagtgtgttccagcctacttattctgcagaaagctcatttcactacagacgaaatccactagggagacttaatggagcatttagttccccatcctgaattcaagatgctgagtgttcgtaacattcctcacatgtctgagaattcattggcatacaccacatttacttgggctggcctcctcaagcatttgagacagatgctcatttctaatgcaaagatggaagaaggtattgataggcatgtatggcctcctttatcaggacttcctcctcttagtaaaatgtctctcaacaaggacctgcattttaacacttccattgctaacttggtcattcttcgtgggaaagatgtgcaaagtgcagatgtggagggatttaaagatccagctctgtatacttcctggttgaagcctgttaatgctttcaacgtgtggaaaacccagcgggcctttagcaaatatgagaagtctgcagtgttggtcagcaacagccagttcttagtaaaaccacttgatatgattgttgggaaggcatggaatatgtttgcttcaaaagcctacattcatcagtacacaaaatttggaatcgaagaagaggactttttagacagtttcacgtcattagagcaggttgttgccagttactgtaatctctgatcttgaacaatgggaaaagtataccttaaggcatttctggactaaaatattttcaatactattttctctgtaaagttttcaaagttctccatcctggctaacacggtgaaacaccgtctctaccagaaaatacaaaaaattagccaggcgcggtggcgggtgcctgtagtcccagctactcgggaggctgaggcaggagaatgacgtgaacccaggaggcggagcttgcagtgagccgagatcgcgccactgcactccagcctgggcgacagagcgagactccgtctcaaaaaaaaaaaaaaaaaaaaaatgttttcaaagttccattctgttaaagtaaccacgtagaatgctgagtctattctgcatactatgcccacagaaaaggaagaaaactttttaaaatggagaatcgcatgttttcaatgaaaacattcacttggtatttcatttgtaagaaaaaaaaatggtgcttttataaagaactttggggaaacactttgctgaaatgttgggactctggaactagccaagaaaagagaatattctctttgtctacatgttcctaaatctttactccaaaacaactccaaaaacaactcacaaagcatgaaccaaactttcacagcataatttcaagctaaggaattgtaattctgtacttaatatattcatgtttgaaatgaatgctttgaaccacaggagggagatgttgtcaaatgctacagtgtgaacatgtattttgaatattctgtaacagggcaagtttccactctaagcagctatttaaaaataaatatgaggattttggtaataaatgcttatgcttaagtacaaaagtaaataggaaaa

SEQ ID NO: 296581 - DNA, 2338 bp, Homo sapiens
tgcgcattgtcagctggagcgttcggtggacagtgagcatgcgtaccatatctgaagttcgtaaattgaaattgaacatgcgtaattaatctttctgaataggaaaaaatatatacacaacaaaactctccgtttatggaacatgcgcatttgttctcagtaagtttttcgttttgaaagtgagcatgcgcatggtgagtaggttggtccgaagtttgaaccggacagaagcgctggtcggcgtctggcggttgtttttagaggtaatacacctagtttgtggctcagcatgtcaattgtaacagtgcaacttggtcagtgtggcaatcagattggttttgaagtttttgatgctttgcttagtgactcacacagttcccagggactctgctctatgagagagaatgaggcatatcaagcatcttgcaaagaaagattcttcagtgaggaggagaatggagttccaattgcccgggctgttcttgttgacatggaacccaaagttatcaatcaaatgctgtcaaaggctgcccagtctggccaatggaaatatggtcaacatgcatgcttctgtcaaaaacaaggttctggaaacaactgggcatatggttactctgttcatggacccaggcatgaagaatctataatgaacataatccggaaggaagtggagaaatgtgactctttcagtggttttttcatcataatgagtatggctgggggcacaggatcaggattaggagctttcgttacacagaatttagaagatcagtactcaaactcattgaaaatgaatcagattatttggccttatggaactggtgaggttattgttcaaaactacaactccattttgacactttctcacttgtaccgatcttcagacgccctccttcttcatgagaatgatgccatccataagatctgtgcaaaactgatgaatatcaagcagatctcctttagtgatatcaatcaagtcctcgcacatcagctgggaagtgtgttccagcctacttattctgcagaaagctcatttcactacagacgaaatccactaggtattgataggcatgtatggcctcctttatcaggacttcctcctcttagtaaaatgtctctcaacaaggacctgcattttaacacttccattgctaacttggtcattcttcgtgggaaagatgtgcaaagtgcagatgtggagggatttaaagatccagctctgtatacttcctggttgaagcctgttaatgctttcaacgtgtggaaaacccagcgggcctttagcaaatatgagaagtctgcagtgttggtcagcaacagccagttcttagtaaaaccacttgatatgattgttgggaaggcatggaatatgtttgcttcaaaagcctacattcatcagtacacaaaatttggaatcgaagaagaggactttttagacagtttcacgtcattagagcaggttgttgccagttactgtaatctctgatcttgaacaatgggaaaagtataccttaaggcatttctggactaaaatattttcaatactattttctctgtaaagttttcaaagttctccatcctggctaacacggtgaaacaccgtctctaccagaaaatacaaaaaattagccaggcgcggtggcgggtgcctgtagtcccagctactcgggaggctgaggcaggagaatgacgtgaacccaggaggcggagcttgcagtgagccgagatcgcgccactgcactccagcctgggcgacagagcgagactccgtctcaaaaaaaaaaaaaaaaaaaaaatgttttcaaagttccattctgttaaagtaaccacgtagaatgctgagtctattctgcatactatgcccacagaaaaggaagaaaactttttaaaatggagaatcgcatgttttcaatgaaaacattcacttggtatttcatttgtaagaaaaaaaaatggtgcttttataaagaactttggggaaacactttgctgaaatgttgggactctggaactagccaagaaaagagaatattctctttgtctacatgttcctaaatctttactccaaaacaactccaaaaacaactcacaaagcatgaaccaaactttcacagcataatttcaagctaaggaattgtaattctgtacttaatatattcatgtttgaaatgaatgctttgaaccacaggagggagatgttgtcaaatgctacagtgtgaacatgtattttgaatattctgtaacagggcaagtttccactctaagcagctatttaaaaataaatatgaggattttggtaataaatgcttatgcttaagtacaaaagtaaataggaaaa

SEQ ID NO: 296582 - DNA, 2517 bp, Homo sapiens
tgcgcattgtcagctggagcgttcggtggacagtgagcatgcgtaccatatctgaagttcgtaaattgaaattgaacatgcgtaattaatctttctgaataggaaaaaatatatacacaacaaaactctccgtttatggaacatgcgcatttgttctcagtaagtttttcgttttgaaagtgagcatgcgcatggtgagtaggttggtccgaagtttgaaccggacagaagcgctggtcggcgtctggcggttgtttttagaggtaatacacctagtttgtggctcagcatgtcaattgtaacagtgcaacttggtcagtgtggcaatcagattggttttgaagtttttgatgctttgcttagtgactcacacagttcccagggactctgctctatgagagagaatgaggcatatcaagcatcttgcaaagaaagattcttcagtgaggaggagaatggagttccaattgcccgggctgttcttgttgacatggaacccaaagttatcaatcaaatgctgtcaaaggctgcccagtctggccaatggaaatatggtcaacatgcatgcttctgtcaaaaacaaggttctggaaacaactgggcatatggttactctgttcatggacccaggcatgaagaatctataatgaacataatccggaaggaagtggagaaatgtgactctttcagtggttttttcatcataatgagtatggctgggggcacaggatcaggattaggagctttcgttacacagaatttagaagatcagtactcaaactcattgaaaatgaatcagattatttggccttatggaactggtgaggttattgttcaaaactacaactccattttgacactttctcacttgtaccgatcttcagacgccctccttcttcatgagaatgatgccatccataagatctgtgcaaaactgatgaatatcaagcagatctcctttagtgatatcaatcaagtcctcgcacatcagctgggaagtgtgttccagcctacttattctgcagaaagctcatttcactacagacgaaatccactaggtattgataggcatgtatggcctcctttatcaggacttcctcctcttagtaaaatgtctctcaacaaggacctgcattttaacacttccattgctaacttggtcattcttcgtgggaaagatgtgcaaagtgcagatgtggagggatttaaagatccagctctgtatacttcctggttgaagcctgttaatgctttcaacgtgtggaaaacccagcgggcctttagcaaatatgagaagtctgcagtgttggtcagcaacagccagttcttagtaaaaccacttgatatgattgttgggaaggcatggaatatgtttgcttcaaaagcctacattcatcagtacacaaaatttggaatcgaagaagaggactttttagacagtttcacgtcattagagcaggttgttgccagttactgtaatctctgatcttgaacaatgggaaaagtataccttaaggcatttctggactaaaatattttcaatactattttctctgtaaagttttcaaagttctccatcctggctaacacggtgaaacaccgtctctaccagaaaatacaaaaaattagccaggcgcggtggcgggtgcctgtagtcccagctactcgggaggctgaggcaggagaatgacgtgaacccaggaggcggagcttgcagtgagccgagatcgcgccactgcactccagcctgggcgacagagcgagactccgtctcaaaaaaaaaaaaaaaaaaaaaatgttttcaaagttccattctgttaaagtaaccacgtagaatgctgagtctattctgcatactatgcccacagaaaaggaagaaaactttttaaaatggagaatcgcatgttttcaatgaaaacattcacttggtatttcatttgtaagaaaaaaaaatggtgcttttataaagaactttggggaaacactttgctgaaatgttgggactctggaactagccaagaaaagagaatattctctttgtctacatgttcctaaatctttactccaaaacaactccaaaaacaactcacaaagcatgaaccaaactttcacagcataatttcaagctaaggaattgtaattctgtacttaatatattcatgtttgaaatgaatgctttgaaccacaggagggagatgttgtcaaatgctacagtgtgaacatgtattttgaatattctgtaacagggcaagtttccactctaagcagctatttaaaaataaatatgaggattttggtaataaatgcttatgcttaagtacaaaagtaaataggaaaaaaaaaaaaaaaaaaaaaaaaaaaaaaaaaaaaaaaaaaaaaaaaaaaaaaaaaaaaaaaaatatttttgggggggccgaagctttttcccttttggggggggttatttttttttggcccgggcccgctttttaaaaccgggggagtgggaaaacccgtgggttccccaatttaaaatgc

SEQ ID NO: 296583 - DNA, 1748 bp, Homo sapiens
tgcgcattgtcagctggagcgttcggtggacagtgagcatgcgtaccatatctgaagttcgtaaattgaaattgaacatgcgtaattaatctttctgaataggaaaaaatatatacacaacaaaactctccgtttatggaacatgcgcatttgttctcagtaagtttttcgttttgaaagtgagcatgcgcatggtgagtaggttggtccgaagtttgaaccggacagaagcgctggtcggcgtctggcggttgtttttagaggtaatacacctagtttgtggctcagcatgtcaattgtaacagtgcaacttggtcagtgtggcaatcagattggttttgaagtttttgatgctttgcttagtgactcacacagttcccagggactctgctctatgagagagaatgaggcatatcaagcatcttgcaaagaaagattcttcagtgaggaggagaatggagttccaattgcccgggctgttcttgttgacatggaacccaaagttatcaatcaaatgctgtcaaaggctgcccagtctggccaatggaaatatggtcaacatgcatgcttctgtcaaaaacaaggttctggaaacaactgggcatatggagggatttaaagatccagctctgtatacttcctggttgaagcctgttaatgctttcaacgtgtggaaaacccagcgggcctttagcaaatatgagaagtctgcagtgttggtcagcaacagccagttcttagtaaaaccacttgatatgattgttgggaaggcatggaatatgtttgcttcaaaagcctacattcatcagtacacaaaatttggaatcgaagaagaggactttttagacagtttcacgtcattagagcaggttgttgccagttactgtaatctctgatcttgaacaatgggaaaagtataccttaaggcatttctggactaaaatattttcaatactattttctctgtaaagttttcaaagttctccatcctggctaacacggtgaaacaccgtctctaccagaaaatacaaaaaattagccaggcgcggtggcgggtgcctgtagtcccagctactcgggaggctgaggcaggagaatgacgtgaacccaggaggcggagcttgcagtgagccgagatcgcgccactgcactccagcctgggcgacagagcgagactccgtctcaaaaaaaaaaaaaaaaaaaaaatgttttcaaagttccattctgttaaagtaaccacgtagaatgctgagtctattctgcatactatgcccacagaaaaggaagaaaactttttaaaatggagaatcgcatgttttcaatgaaaacattcacttggtatttcatttgtaagaaaaaaaaatggtgcttttataaagaactttggggaaacactttgctgaaatgttgggactctggaactagccaagaaaagagaatattctctttgtctacatgttcctaaatctttactccaaaacaactccaaaaacaactcacaaagcatgaaccaaactttcacagcataatttcaagctaaggaattgtaattctgtacttaatatattcatgtttgaaatgaatgctttgaaccacaggagggagatgttgtcaaatgctacagtgtgaacatgtattttgaatattctgtaacagggcaagtttccactctaagcagctatttaaaaataaatatgaggattttggtaataaatgcttatgcttaagtacaaaagtaaataggaaaa

SEQ ID NO: 296584 - DNA, 1897 bp, Homo sapiens
  misc_feature (1870)..(1870): n is a, c, g, or t
  misc_feature (1886)..(1886): n is a, c, g, or t
tgcgcattgtcagctggagcgttcggtggacagtgagcatgcgtaccatatctgaagttcgtaaattgaaattgaacatgcgtaattaatctttctgaataggaaaaaatatatacacaacaaaactctccgtttatggaacatgcgcatttgttctcagtaagtttttcgttttgaaagtgagcatgcgcatggtgagtaggttggtccgaagtttgaaccggacagaagcgctggtcggcgtctggcggttgtttttagaggtaatacacctagtttgtggctcagcatgtcaattgtaacagtgcaacttggtcagtgtggcaatcagattggttttgaagtttttgatgctttgcttagtgactcacacagttcccagggactctgctctatgagagagaatgaggcatatcaagcatcttgcaaagaaagattcttcagtgaggaggagaatggagttccaattgcccgggctgttcttgttgacatggaacccaaagttatcaatcaaatgctgtcaaaggctgcccagtctggccaatggaaatatggtcaacatgcatgcttctgtcaaaaacaaggttctggaaacaactgggcatatggttactctgttcatggacccaggcatgaagaatctataatgaacataatccggaaggaagtggagaaatgtgactctttcagtggttttttcatcataatgagtatggctgggggcacaggatcaggattaggagctttcgttacacagaatttagaagatcagtactcaaactcattgaaaatgaatcagattatttggccttatggaactggtgaggttattgttcaaaactacaactccattttgacactttctcacttgtaccgatcttcagacgccctccttcttcatgagaatgatgccatccataagatctgtgcaaaactgatgaatatcaagcagatctcctttagtgatatcaatcaagtcctcgcacatcagctgggaagtgtgttccagcctacttattctgcagaaagctcatttcactacagacgaaatccactagggagacttaatggagcatttagttccccatcctgaattcaagatgctgagtgttcgtaacattcctcacatgtctgagaattcattggcatacaccacatttacttgggctggcctcctcaagcatttgagacagatgctcatttctaatgcaaagatggaagaaggtattgataggcatgtatggcctcctttatcaggacttcctcctcttagtaaaatgtctctcaacaaggacctgcattttaacacttccattgctaacttggtcattcttcgtgggaaagatgtgcaaagtgcagatgtggagggatttaaagatccagctctgtatacttcctggttgaagcctgttaatgctttcaacgtgtggaaaacccagcgggcctttagcaaatatgagaagtctgcagtgttggtcagcaacagccagttcttagtaaaaccacttgatatgattgttgggaaggcatggaatatgtttgcttcaaaagcctacattcatcagtacacaaaatttggaatcgaagaagaggactttttagacagtttcacgtcattagagcaggttgttgccagttactgtaatctctgatcttgaacaatgggaaaagtataccttaaggcatttctggactaaaatattttcaatactattttctctgtaaagttttcaaagttctccatcctggctaacacggtgaaacaccgtctctaccagaaaatacaaaaaattagccaggcgcggtggcgggtgcctgtagtcccagctactcgggaggctgaggcaggagaatgacgtgaacccaggantaccgccgggggggangtggaggtgtc

SEQ ID NO: 296585 - DNA, 314 bp, Homo sapiens
gtattgataggcatgtatggcctcctttatcaggacttcctcctcttagtaaaatgtctctcaacaaggacctgcattttaacacttccattgctaacttggtcattcttcgtgggaaagatgtgcaaagtgcagatgtgggtaagaaattcaggtgaaaattaagatttacattttgtacctgtacatgctatatggtacaaatggtttttaaaaagtccctgtgttcttggagaaaggaaagtaataactgtgtgttttagtggcaaaatttgaccatggcatcagttagtatgtgactagacaccaatata

SEQ ID NO: 296586 - DNA, 2037 bp, Homo sapiens
  misc_feature (78)..(78): n is a, c, g, or t
atcctaatttctaaagcaatcaggagagaaagcttttagaatggcacatcatatctcattgatgccaacatggttttntccatggttctgactttctgtgaaggcaccagcttgcaatatgccatcccgtttcaccttgcatgtgagacagcaaacaaaatccacaaatggtgtgaactaatatgctggctgctaccttgcataaattaatgatttgatcacacgggttcttcgtggggttacatctgtgaatagcctgttttccacatgtaaatttgtgccttacaccttgagttgtgtacacttgtaaactctttatgatcaactgttcccccttttgaaataagtgcagatatttatttaaccctcccttccccaccctctgccccacttccagccctctgaaagattggagtcaagcagatggaagaatgcagtggtgatagttgtcatgcgacagctggagaacgctgggcagcaccacaccctccaattcacactgccttctagttgtgccaactggaaccaccctttggctgtgctgcgaaatggaccccagtgttgttgtgggtgtgtcaaatcccctttcatcctcaagagctccctgcttcccttagattatttcaatacggtgatatccttatttgctagcagaaaagggactaacgtccccattcctcttttctgctgcgtcccactggctcagagaagcaaggcggtgcgcggttgggcagaaacctgggaggagtctccaagcccaattcacagcacacaacggcagtgcacacaaagaaatgacatggaaatagatgcaggcaggctggtccctgctgtgattaacgagtaactccaagtacaaggccgaccacaatggatgctgcaaaaacgttgactggggcaaaggattttttattttattttttattttgttaattatgtttttaggggatgggaggtggtgtgtgtttttctcctcttggttttcatttgctcaagcacacaaaagggacttttgtttactctatcatgaacaaaggaactgtccacatactgtaaaccatgagcagtgttgttgttgtttttttaaacagtatatttggtggtctctttgtctgcttttatttccagttcgatcttctgggtttagttttgtctttaaaaagaattcaaaaaaagactgacaatgacagttttgagttggatagtgaaaaagtggagcctccataatcagtgtggttgccttcagacctgagtacttagctgagggtgggtgagagccctttgttccaaaagtccattagttttgctgttgtttaggagtaggtggttgttgttgtttttactttttttttttttggcttttgtaatggaatccatgttcacatcctgtgaactctgtctcctgaaaccctgaagtatttcctagaacctgaaatattgttttcttccttgaattttctctagaaatgcagaaattaggaaggtgatgggtctgtatccccctgcccccttctttcccatgcttgactcccgagagtactggcagtgcagcacccatcattgacgtaagcggctgtcttgtccagtgtttgtaggcatcactgcctcagctgttaaggagacctgtgtcaaaacttacatccacattcctacacccccacaacccatcacttctggtgttaaccctaaaatacccacatgtattgagctgggtcttctgcatttaagtatttctccccagtttttttccccactgtgtgtggggggagggtccataaacccgagtgtgcctttgctttccacccttgctagacactggtagatgcaacaaactcagatttatatttgttgtaaagttgtaaaaatattgtgatgtcaccaattttccttccatctccacatcccctaacatctgattcacgacttaatgtatgttgtaagaaaagaaaaaagaaaagaaaaaaagggaaaaaagaaaagcaaggaaaaggctctttattacttaaaagtaataaaacctgactgttctatattatc

SEQ ID NO: 296587 - DNA, 1983 bp, Homo sapiens
  misc_feature (78)..(78): n is a, c, g, or t
atcctaatttctaaagcaatcaggagagaaagcttttagaatggcacatcatatctcattgatgccaacatggttttntccatggttctgactttctgtgaaggcaccagcttgcaatatgccatcccgtttcaccttgcatgtgagacagcaaacaaaatccacaaatggtgtgaactaatatgctggctgctaccttgcataaattaatgatttgatcacacgggttcttcgtggggttacatctgtgaatagcctgttttccacatgtaaatttgtgccttacaccttgagttgtgtacacttgtaaactctttatgatcaactgttcccccttttgaaataagtgcagatatttatttaaccctcccttccccaccctctgccccacttccagccctctgaaagattggagtcaagcagatggaagaatgcagtggtgatagttgtcatgcgacagctggagaacgctgggcagcaccacaccctccaattcacactgccttctagttgtgccaactggaaccaccctttggctgtgctgcgaaatggaccccagtgttgttgtgggtgtgtcaaatcccctttcatcctcaagagctccctgcttcccttagattatttcaatacggtgatatccttatttgctagcagaaaagggactaacgtccccattcctcttttctgctgcgtcccactggctcagagaagcaaggcggtgcgcggttgggcagaaacctgggaggagtctccaagcccaattcacagcacacaacggcagtgcacacaaagaaatgacatggaaatagatgcaggcaggctggtccctgctgtgattaacgagtaactccaagtacaaggccgaccacaatggatgctgcaaaaacgttgactggggcaaaggattttttattttattttttattttgttaattatgtttttaggggatgggaggtggtgtgtgtttttctcctcttggttttcatttgctcaagcacacaaaagggacttttgtttactctatcatgaacaaaggaactgtccacatactgtaaaccatgagcagtgttgttgttgtttttttaaacagtatatttggtggtctctttgtctgcttttatttccagttcgatcttctgggtttagttttgtctttaaaaagaattcaaaaaaagactgacaatgacagttttgagttggatagtgaaaaagtggagcctccataatcagtgtggttgccttcagacctgagtacttagctgagggtgggtgagagccctttgttccatttttttttttttggcttttgtaatggaatccatgttcacatcctgtgaactctgtctcctgaaaccctgaagtatttcctagaacctgaaatattgttttcttccttgaattttctctagaaatgcagaaattaggaaggtgatgggtctgtatccccctgcccccttctttcccatgcttgactcccgagagtactggcagtgcagcacccatcattgacgtaagcggctgtcttgtccagtgtttgtaggcatcactgcctcagctgttaaggagacctgtgtcaaaacttacatccacattcctacacccccacaacccatcacttctggtgttaaccctaaaatacccacatgtattgagctgggtcttctgcatttaagtatttctccccagtttttttccccactgtgtgtggggggagggtccataaacccgagtgtgcctttgctttccacccttgctagacactggtagatgcaacaaactcagatttatatttgttgtaaagttgtaaaaatattgtgatgtcaccaattttccttccatctccacatcccctaacatctgattcacgacttaatgtatgttgtaagaaaagaaaaaagaaaagaaaaaaagggaaaaaagaaaagcaaggaaaaggctctttattacttaaaagtaataaaacctgactgttctatattatc

SEQ ID NO: 296588 - DNA, 1750 bp, Homo sapiens
tagtcttaggaaacaaaaggtttattgaaatgcatgtagataaattatcatcagcataaaactgttatggagttttcaacatggggtcttttgctcttaaaatgaagtgaagctttgcaagtccattgtccaataggaaaaatattatatctctctgttcagataaagtcctttaaaaaagtaaatctcttttgaaacggtcttttaaacgtctccagcctgtttggctccccccaggtggtgttgctgtccttctccaattgtgagtctgttgaatgggattatcttcatagtggttttcttcatggaataccaccgggttttccaagtggcccaaataatgccattatcataaccattaggagtagatgcttttgagtaagtgccaccttggtaataaactccattgagatggccagcgtgacacttgttcatccaccaaccagatccatcctgttcagcacagttgccttcaaacttatcattgtcattgtcccaggtactgaactgcatgccattatgggatgtgaaaaacttgtcactaggatcatcgccaaaatcaaagccatcaaaggcatctccagcatccccaccagcgaagtaggcatatgttaggcggtacttgtcagcttcaggtcccaccttgaacatggcatagtctgcagtactggttctgccattccagtcttccagttccactcttaatgcatatgggatggcagactgtgtgcttatcaaatgaatcttctcatttcccagccaaaattctgttgtgccagtaggagacagatgtccaaatccttctttatattgaatccagtttttcttgaaatctacactgccatcaagtctcttctgaaacacagtccatccatttccagacccatcgatttcacagtagactaagaattgctggttagctttcagaggtttaataaagtaaagcccgctctgtttagctcccttattggcaatgtcttgacaatctttcccagtgatatcatggatttgcaccgtgtctttgcaaggttcctggcactgtgcttcaagctgggctaccttctctttcaggttaacaatcttttgattatttgaattatatatttcctgcaaatatcgaatacttgagtcatgtgttaaaatcgatgcttcatatttcataatttcttctaacattttcctggacttcaaagtagcagcgtctatcatatttggttttgatgattcatcaggattataagtgagttggattgcttttatcagctgtttgacttctgatgttttgttttcaacttgatgtaagatgtcttccaaagactgtagatccttgtctactttggtttgataagtagacaggaaatctgcaatgccacaggtagttggacaataactaccgaatctttcatctaagatgcagcagttgtctctggtagcaacatatgctacacatgttgaagagagaaataaaagagcatagaagtagagaattaaattccgggggtgcaaggaccaactcatgatgtctgagtgcccggagctccgagccttgtagtgtcagcatttatttatttatgtacctttgttatgatgggatatttttcatttgaaacttgttcataaaaatgtcaatgacattgatgactgatttgtacatatttttcatatagttttgtttaaaaaataattcacgcaaaatcttgaagtcatttttgctattgaaataaaccttaattaaaatatttcatcatca

SEQ ID NO: 296589 - DNA, 1250 bp, Homo sapiens
ggcggggcccggtagccaaaaggctagggggaggcccgcgcagccggtcggcttcggggcgggaccctgcatacctggaagcggcgggtggcgtcctccttgtcgccctcacccacccggtccgggtgtacctgcagggacaccttgtggtagcctcgtcggacctcgccgtcggaggcctcgcgtcgcacgcccagcacccggtaaaggtcggcggtgccgaacacttcctcgcaaaggtccagcagccccatgccgggcggagatacgaccccggaggaagcagccgctcccagctgcgccgggtacaacccaggactgcttctttttcgcgcccaaaaagcccagggcgcctgcgtcacaagcactgaaggggcgtggccacgccgcgcatccgcgctttacggcggccgcaaaatgaggtgtggcgagtcaggcgcgggcccggatccaagatcaaactcagctgaagtcagttcctctcaacctgccctggcatcaaagtctcaaagcaagtgggggccaaccagcaacaaccccaggggagctttgacaaccacagaatttgagatggctggtaatcgttctcagaacataaaacacaaacagacagccctgattgctattccaatgtcatcacaaacccccaggatgcttggaaggccaaggaatcaaggtcagctgtatccacagccctagtctcaagccttcatcctcttacccgatagcaggcgattcccagtcctagccagatagatgagccccagtctcaggaagatgaagtgcatctcagaagcatccactacaaagctaatggttcgttcatagcatgccttggcctcagaatgatttccactcagaaaatagagatggcccttcaggccccagacattggggttctgggaaagtgaaaagcaagtagtatatgggataaggtagtatttaaaagtaccttgatgatctttgtttaacatttaaatttagatagattgtccatttcctttctcttttctttttcagatcaaccgttttctttttctaagagcactcagaaacataaccatttaattgtacaaggagacatttttctagctctgccctcagatttctttcttgcattcttcaaagccattttgggtgtggagtaaatattaagaaaaacattcaagcataaccccaatactgttcacatgagaaaatataagaaatctagaaaaattgaaataaacactatcagctaaagatatcct

SEQ ID NO: 296590 - DNA, 802 bp, Homo sapiens
ggcggggcccggtagccaaaaggctagggggaggcccgcgcagccggtcggcttcggggcgggaccctgcatacctggaagcggcgggtggcgtcctccttgtcgccctcacccacccggtccgggtgtacctgcagggacaccttgtggtagcctcgtcggacctcgccgtcggaggcctcgcgtcgcacgcccagcacccggtaaaggtcggcggtgccgaacacttcctcgcaaaggtccagcagccccatgccgggcggagatacgaccccggaggaagcagccgctcccagctgcgccgggtacaacccaggactgcttctttttcgcgcccaaaaagcccagggcgcctgcgtcacaagcactgaaggggcgtggccacgccgcgcatccgcgctttacggcggccgcaaaatgaggtgtggcgagtcaggcgcgggcccggatccaagatcaaactcagctgaagtcagttcctctcaacctgccctggcatcaaagtctcaaagcaagtgggggccaaccagcaacaaccccaggggagctttgacaaccacagaatttgagatggctggtaatcgttctcagaacataaaacacaaacggtcccatcaggacatctataaaccatggagtttcaggtgcaaggttggaaatccacaggaactcactctcatgtgtgcatcattcagtgatttctccacacacagtgggctgtcagatacatttatagttttttttctttacattgtgcatccttttcttgaggtaaaaatctgatttgcctgttgaaaaaaaa

SEQ ID NO: 296591 - DNA, 515 bp, Homo sapiens
tcggctccaggaggtttctcagctcctctcctcccctagcttctttcctgcggcttgacctgagcctctcgtctacttgctttggcttccacctggaccgaggaatttttcctgccctttatctcacctgcctcgggagaagttgggtcattatccgttgttattttaattttgattaccacagcaataatcgtaattgacaagaggcattacaaggagctgcaacaaaagcaacgactaccaagtgtccagcactcacgaggggccagcaactatgctacgcacctcactggccgtcttttgagaaccctgtctacagatgggaaaactgaggcacactgaagtgaggccacatggctggcgaaagcaggcaccatttcctttgcatctacagctcgggtgcacacaagcttgacatgcgttgtcgctactccttgtggcttcccagggaaggcttttgacccctctccaccccatcacagatgaataaacaggctcagctggcttaaaaaaaa

SEQ ID NO: 296592 - DNA, 458 bp, Homo sapiens
cctcaccttcttctgtaaggcgcagtgaaagacgaagatgaagaccccctggaaggcgttgaaggtggtgaagagataggccatgaccaccgactccttgttgatgaagaggaggccgaaagcccagcaataatcgtaattgacaagaggcattacaaggagctgcaacaaaagcaacgactaccaagtgtccagcactcacgaggggccagcaactatgctacgcacctcactggccgtcttttgagaaccctgtctacagatgggaaaactgaggcacactgaagtgaggccacatggctggcgaaagcaggcaccatttcctttgcatctacagctcgggtgcacacaagcttgacatgcgttgtcgctactccttgtggcttcccagggaaggcttttgacccctctccaccccatcacagatgaataaacaggctcagctggcttaaaaaaaa

SEQ ID NO: 296593 - DNA, 403 bp, Homo sapiens
tggtatgcaggtaagctttcgtcgcagaacaacttcagtatagttgaactttgaagtcgagaatagatatgtagactaggtaaatcacttaggatttttatggtctactttcctatgatgaggtttttaatttaaactttgtgagtgtcaaaatatcacattgtatcagcaacttggtgagcagatcttttagcagattaactgggaacataacccaagaaccaggaaagaatccaaaagaacctgaatagctaaaataaatgttccaaagcatattactgaaagcatgtgcactttatagcctaattttctagcctacaatgggttaaaagcaaaatattaaagggaagaggattgctaggaatagataaacacacagtgatacaattcataaacagcagca

SEQ ID NO: 296594 - DNA, 827 bp, Homo sapiens
tggttgacacaagtgactcaaatatcctaagagtacaaggaacagcctaaaaacagctgttttaagagtcaggaggacttatttctttagagctatttgcaacttctaacaagacacatttggagaaactggttattttaccaaggctttaagtgaaatggcacgcttcctttaaagaatcaaagttgacttataaagccaattaaagcccgttggggaatctgttctcataccttgttcacaaagtccctgtacaaggttcctgacctgtggaaagaaaagctcatatagtaaagaaacatggatctgacgttccacaattctttcagtttcatgtccacttcttccgttaaattattttaaatactttttgtaacatattcaatcttattttatcaacactgtttttgttgcctacctagccctttagtttcatttttatgcaatatctagataatattcagcaaatcttaacaacgattaactctgggtggtaggattttgggtaattagtggcttttatttgaacttctctttgtacaaatgaaaatgttcataatgtgccttcctcatttttagaaaaaaataaagccattattcccctcccaaagttcgaaatatttccttaaaaagtttttcttgaaaatgttaatacattttgaaaaagaactttatttttcaatggagtgattgattacctacatttggtatattatctgcataatacgagttttctttcactaagggggaaaaaaaatccccttctccccagctaaggcagttttcccattggatcccattagaatctttagagccagggagtctgc

SEQ ID NO: 296595 - DNA, 551 bp, Homo sapiens
aggaaacaaaagggaaacagaacagagagttatactcaccttgattatctgaggcacaaatgcagcctcagccatgaacatattgaaggaagggatagtccagtatgtaacagacgcaccctgctattggcaagcaaagcacagatggagtgaatttaaagagtcctttactaaaggactttgtttcaggacgaaagtccacacagagcccacagggtgtgggagatctgagatctggaactgggatctctgggctctgaacttgttctgttgggcaatctgctgatggagaccttgtcttcgagtgtcaggatgcacactgtggtcagctccccctaggttgcaaagggcattctatctgggacttgtcttccctgcccatctgctctccttttcaacagcttcttggttcttttgaaacctatgctgtcttcccaaagccctacctcctattgtgttggcctcctgtaagccatgctttcatctgtccagtcctgctcttggtgggatgaacgagaggcctctacagatctcaaggtggaggaggagag

SEQ ID NO: 296596 - DNA, 2873 bp, Homo sapiens
  misc_feature (236)..(236): n is a, c, g, or t
  misc_feature (419)..(419): n is a, c, g, or t
  misc_feature (438)..(438): n is a, c, g, or t
  misc_feature (441)..(441): n is a, c, g, or t
  misc_feature (725)..(725): n is a, c, g, or t
  misc_feature (802)..(802): n is a, c, g, or t
  misc_feature (845)..(845): n is a, c, g, or t
  misc_feature (999)..(999): n is a, c, g, or t
  misc_feature (1026)..(1026): n is a, c, g, or t
  misc_feature (1032)..(1032): n is a, c, g, or t
  misc_feature (1037)..(1037): n is a, c, g, or t
  misc_feature (1043)..(1044): n is a, c, g, or t
  misc_feature (1047)..(1047): n is a, c, g, or t
  misc_feature (1050)..(1050): n is a, c, g, or t
  misc_feature (1083)..(1083): n is a, c, g, or t
  misc_feature (1106)..(1106): n is a, c, g, or t
  misc_feature (1111)..(1111): n is a, c, g, or t
  misc_feature (1120)..(1120): n is a, c, g, or t
  misc_feature (1653)..(1653): n is a, c, g, or t
  misc_feature (1690)..(1690): n is a, c, g, or t
  misc_feature (2183)..(2183): n is a, c, g, or t
  misc_feature (2222)..(2222): n is a, c, g, or t
ttggagagaggggtgatgcctggtgctggtggaacccctgcacagagacggacacaggatgagctctaagtacccgcggtctgtccggcgctgcctgcccctctgggccctaacactggaagcagctctcattctcctcttctatttttttacccactatgacgcttccttagaggatcaaaaggggctcgtggcatcctatcaagttggccaagatctgaccgtgatggcggccnttggcttgggcttcctcacctcgagtttccggagacacagctggagcagtgtggccttcaacctcttcatgctggcgcttggtgtgcagtgggcaatcctgctggacggcttcctgagccagttccctcctgggaaggtggtcatcacactgttcagtattcggctggccaccatgagtgctntgtcggtgctgatctcagnggntgctgtcttggggaaggtcaacttggcgcagttggtggtgatggtgctggtggaggtgacagctttaggcaccctgaggatggtcatcagtaatatcttcaacacagactaccacatgaacatgatgcacatctacgtgttcgcagcctattttgggctgtctgtggcctggtgcctgccaaagcctctacccgagggaacggaggataaagatcagagagcaacgatacccagtttgtctgccatgctgggcgccctcttcttgtggatgttctggccaagtntcaactctgctctgctgagaagtccaatcgaaaggaagaatgccgtgttcaacacctactatgctgtagcagtcagngtggtgacagccatctcagggtcatccttggctcacccccaanggaagatcagcaagacttatgtgcacagtgcggtgttggcaggaggcgtggctgtgggtacctcgtgtcacctgatcccttctccgtggcttgccatggtgctgggtcttgtggctgggctgatctccgtcgggggagccaagtacctgccggngtgttgtaaccgagtgctggggattcnccacanctccntcatgnnctncancttcagcttgctgggtctgcttggagagatcanctacattgtgctgctggtgcttnatacngtctggagncggcaatggcatgattggcttccaggtcctcctcagcattggggaactcagcttggccatcgtgatagctctcacgtctggtctcctgacaggtttgctcctaaatctcaaaatatggaaagcacctcatgtggctaaatattttgatgaccaagttttctggaagtttcctcatttggctgttggattttaagcaaaagcatccaagaaaaacaaggcctgttcaaaaacaagacaacttcctctcactgttgcctgcatttgtacgtgagaaacgctcatgacagcaaagtctccaatgttcgcgcaggcactggagtcagagaaaatggagttgaatcctttctctgccactctttgaggagaatctcaccatttattatgcactgtagaatacaacaataaaatacagccatgtaccacataacaacatcttggtaaacaacagactgcatatatgatggtggtcatccagtaagctaaggttaatttattattattccttgtttttttttttttttttttttttttgngatgtagtcttactctgtcacccaggctagagtgcantggcaccatcttggctcactgcaacctctacctcctgggttcaagcaaatctcctgtcagcctccaaagtagctgggattacaggcacccaccacatctggctaattttttgtatttttagtaaagatggggtttcaccatgttggccaggctgatctcaaactcctgacctcaagtgatctgcccgcctcggcctcccaaagtgctggaaccacaggcctgagccactgtgcccagccttgtttgcttttttaacagataacagtgtgctcatagaaactgctttgacatgactgcaatcatgtgcttcatagaaacttaattagattataccactagagtcttcagatttttatacttttttttttgaaacggagtctcactctgtcaccaggctggagtgcagtgccgcaatctcggctcactgcaacctccgcctcccaggttcaagcaattctcctgcctcactcccgagtagctggattacaagtgngcactaccacacccagctaatttttgcatttttacttgncagggtttcaccatgttggctaggatagtttcaccaggatctcttggcctcatgatcagcctgcctcggcctcccaaagtgctgggattacaggtgtgagccaccgtgcccagcctatacttccctttttgaataccatttggtgttttgaagaattaacagctttgtgaacgtggcagtgcttgtgattcaggcttccattgagaccaaggggagaacctggttgcaggacaaacagacggacagcgtgtggcagtgtttaaatgctcttctgaaggctgatacgacagctctctgtgcactgattgcatatgcatcccaagattatattattgttttctactgctatgtgtcacactttgccaaacaggatgtggaaaatgaataagcggttttcttaggcacttcttaacagacaattggtcaaaatgaactccattgcttaagaaacacataaacaccatttagtcactgaacatagctatatgtatggttgttactatgggaaatcttgttttgccaattttctttgaaaattctggcagaccaaggttctttttgtttacataatacttgaaaaataaaaatgaacaagctaacaactaccaagttttcacttacataaatgtagttgcatacagaaaatgtgac

SEQ ID NO: 296597 - DNA, 1137 bp, Homo sapiens
  misc_feature (236)..(236): n is a, c, g, or t
  misc_feature (419)..(419): n is a, c, g, or t
  misc_feature (438)..(438): n is a, c, g, or t
  misc_feature (441)..(441): n is a, c, g, or t
  misc_feature (684)..(684): n is a, c, g, or t
  misc_feature (711)..(711): n is a, c, g, or t
  misc_feature (717)..(717): n is a, c, g, or t
  misc_feature (722)..(722): n is a, c, g, or t
  misc_feature (728)..(729): n is a, c, g, or t
  misc_feature (732)..(732): n is a, c, g, or t
  misc_feature (735)..(735): n is a, c, g, or t
  misc_feature (768)..(768): n is a, c, g, or t
  misc_feature (791)..(791): n is a, c, g, or t
  misc_feature (796)..(796): n is a, c, g, or t
  misc_feature (805)..(805): n is a, c, g, or t
ttggagagaggggtgatgcctggtgctggtggaacccctgcacagagacggacacaggatgagctctaagtacccgcggtctgtccggcgctgcctgcccctctgggccctaacactggaagcagctctcattctcctcttctatttttttacccactatgacgcttccttagaggatcaaaaggggctcgtggcatcctatcaagttggccaagatctgaccgtgatggcggccnttggcttgggcttcctcacctcgagtttccggagacacagctggagcagtgtggccttcaacctcttcatgctggcgcttggtgtgcagtgggcaatcctgctggacggcttcctgagccagttccctcctgggaaggtggtcatcacactgttcagtattcggctggccaccatgagtgctntgtcggtgctgatctcagnggntgctgtcttggggaaggtcaacttggcgcagttggtggtgatggtgctggtggaggtgacagctttaggcaccctgaggatggtcatcagtaatatcttcaacacttatgtgcacagtgcggtgttggcaggaggcgtggctgtgggtacctcgtgtcacctgatcccttctccgtggcttgccatggtgctgggtcttgtggctgggctgatctccgtcgggggagccaagtacctgccggngtgttgtaaccgagtgctggggattcnccacanctccntcatgnnctncancttcagcttgctgggtctgcttggagagatcanctacattgtgctgctggtgcttnatacngtctggagncggcaatggcatgtttgctcctaaatctcaaaatatggaaagcacctcatgtggctaaatattttgatgaccaagttttctggaagtttcctcatttggctgttggattttaagcaaaagcatccaagaaaaacaaggcctgttcaaaaacaagacaacttcctctcactgttgcctgcatttgtacgtgagaaacgctcatgacagcaaagtctccttatgtataatgaaacaaggtcagagacagatttgatattaaaaaattaaagactaaaaacttagtttaagagtcaatttaataagtttaaaataaatgtttagtttcattagga

SEQ ID NO: 296598 - DNA, 1079 bp, Homo sapiens
  misc_feature (236)..(236): n is a, c, g, or t
  misc_feature (419)..(419): n is a, c, g, or t
  misc_feature (438)..(438): n is a, c, g, or t
  misc_feature (441)..(441): n is a, c, g, or t
  misc_feature (546)..(546): n is a, c, g, or t
  misc_feature (573)..(573): n is a, c, g, or t
  misc_feature (579)..(579): n is a, c, g, or t
  misc_feature (584)..(584): n is a, c, g, or t
  misc_feature (590)..(591): n is a, c, g, or t
  misc_feature (594)..(594): n is a, c, g, or t
  misc_feature (597)..(597): n is a, c, g, or t
  misc_feature (630)..(630): n is a, c, g, or t
  misc_feature (653)..(653): n is a, c, g, or t
  misc_feature (658)..(658): n is a, c, g, or t
  misc_feature (667)..(667): n is a, c, g, or t
ttggagagaggggtgatgcctggtgctggtggaacccctgcacagagacggacacaggatgagctctaagtacccgcggtctgtccggcgctgcctgcccctctgggccctaacactggaagcagctctcattctcctcttctatttttttacccactatgacgcttccttagaggatcaaaaggggctcgtggcatcctatcaagttggccaagatctgaccgtgatggcggccnttggcttgggcttcctcacctcgagtttccggagacacagctggagcagtgtggccttcaacctcttcatgctggcgcttggtgtgcagtgggcaatcctgctggacggcttcctgagccagttccctcctgggaaggtggtcatcacactgttcagtattcggctggccaccatgagtgctntgtcggtgctgatctcagnggntgctgtcttggggaaggtcaacttggcgcagttggtggtgatggtgctggtggaggtgacagctttaggcaccctgaggatggtcatcagtaatatcttcaacgngtgttgtaaccgagtgctggggattcnccacanctccntcatgnnctncancttcagcttgctgggtctgcttggagagatcanctacattgtgctgctggtgcttnatacngtctggagncggcaatggcatgattggcttccaggtcctcctcagcattggggaactcagcttggccatcgtgatagctctcacgtctggtctcctgacaggtttgctcctaaatctcaaaatatggaaagcacctcatgtggctaaatattttgatgaccaagttttctggaagtttcctcatttggctgttggattttaagcaaaagcatccaagaaaaacaaggcctgttcaaaaacaagacaacttcctctcactgttgcctgcatttgtacgtgagaaacgctcatgacagcaaagtctccttatgtataatgaaacaaggtcagagacagatttgatattaaaaaattaaagactaaaaacttagtttaagagtcaatttaataagtttaaaataaatgtttagtttcattagga

SEQ ID NO: 296599 - DNA, 1004 bp, Homo sapiens
  misc_feature (882)..(882): n is a, c, g, or t
cccgccccgatccaatctctccgcctcactcttcgacatacacaccacgcaatcatgcaaggcaggattggcttccaggtcctcctcagcattggggaactcagcttggccatcgtgatagctctcacgtctggtctcctgacaggtttgctcctaaatctcaaaatatggaaagcacctcatgtggctaaatattttgatgaccaagttttctggaagtaagatccctcattatggctctccggcaaattatacccaccctcattcccgaaataccccaaacgtctggacacatacacaatcagctctctatcccttcacctgttgcgcttcgttcatgcaccgacagacaacgctctatgaccaccactcgactaacataccacctgctcaacccaccacgcaacctcacccacccccatcaccataacgacgacagactccccagccaaccctcctcacccctagtttgcacccgaccacccctacgtcagacaagccgagccactatacacttccgactccttcgccgccgcgttctcactcccgagcccccgtaaagaccttatcctccccccatctccacacccgatccccaaccatccacatcgctagccctccctccccgtactatacaccactcccttataaaactcgcccattaatttcgccagccactaccacacccagcactccccaccacgatatcctccttccctactgttccgtttcgttcacacttgcccagactccaccccgagccacaacaacgcacaacccgccgacatcagctctcgaccaccatatactgtccatcacccctctaactccgattacacatgcatccctcccgctcatctagtcgaacatacactaactacnctcagccccccgtagtaccaaccgtacctcgtcccgcacgccgtcgttcataaccactaaccacaacctacctagtgcacacctgctaccttctatccacaaccatcaacctccgccccgcg

SEQ ID NO: 296600 - DNA, 340 bp, Homo sapiens
aatattttggagctatgttgctgatttttgttagttcagatttgttatattttctgatatgtgttttaaactgattaatcagtattacacaactttaagctgagactacactcagaaataagtttagaaaatggcattacaaaaggttgggagtgagcagtaaaaaaacaaacaaacccatgcagggctgttgtgctgtgggaaatcagatgtgttcactgccataagtcttcagtgcggccaaacttaaaaaccagccctccaaaaaagatgaaggcattctggaaaaatacagcaattccagggtatactatgtctttttcttttgtgtaaaatgatt

SEQ ID NO: 296601 - DNA, 696 bp, Homo sapiens
acaaacaaaaacagaaaaaaaaaaaaaaaaaagagagagagagaaaactggaggctctgagaggttgagggacttgcccagggtcttgcagctagtaagtgacagagctgggacttgagcttgggttttctgactcctggtctggttcattatccatgaggtgctgggaactaaaataagccacaatcttggaatctccgtcgcctccctccctcccacatgtctgcgtggctttttgggaaaatgccaggggaatgtaccagccagggagaggacccttgttttcctcatggcccttcctggcaatggcactactgacaccgacagtcctttttgtccctgatgacctctgctgcctgatgcccaagtgaccacctctgctttgtcatttctaggattggcttccaggtcctcctcagcattggggaactcagcttggccatcgtgatagctctcacgtctggtctcctgacaggtcagtgtgaggccacctttcttccaccattgccaggacacagcacccacgtccagagcgcaccctgccgtgtggctggatgtctatgtgccccatctccttccctgaggatcacataatttcagaattggaaaggttcttagaggtcacctgctgctaatgtggactgtgaggccagggcagggaagggacatccctgaggttataagtagggtgagtgg

SEQ ID NO: 296602 - DNA, 591 bp, Homo sapiens
  misc_feature (416)..(416): n is a, c, g, or t
ggcgtgtgcggcggtgcggcccgggctccacgtccacaggctgggcagcgctgtgggccccgcgggcgccgagtccgcaggacccgcgagggcactaccgcgaagcatcggcctccgggccgggccgggccggaccgggagcctgctcggcgggtccgggctcctgcaaggcggggacgcggggccggcgacccttcacgcttcgtactcattgagcgccgattttatgccaggcaccgtgctggatctcccagtgcctggaagagaaaacccattctgtttcgaagggcatccagagctggtcacagtggggacccaccctccttttccaggctacgccaggggctgggaagtctgcatgctgtctataaatccagaaccagaagttggccaagatctgaccgtgatggcggccnttggcttgggcttcctcacctcgagtttccggagacacagctggagcagtgtggccttcaacctcttcatgctggcgcttggtgtgcagtgggcaatcctgctggacggcttcctgagccagttccctcctgggaaggtggtcatcacactgttcaggtattgggatggtggctg

SEQ ID NO: 296603 - DNA, 545 bp, Homo sapiens
tgagacagagtcttgctctgtcgcccaggctggatgagactcttgtctctaaaaaagaaacaaagcttgctaactagctagataacatatgttctgcttttgagatttttggaagccaaagaaaagcagtgtttagagctgtctcatcccttccaggctctggataagaagaaaaatgactgaagaaaggaatactaaaaatatataagacaaagaaaaccaaacactgtcggtggagggtggggggtcccggatataaatgcatcgctagtagttggcccaactataggaaaaaaattttattctaaaataaccaactttaatgcaaaattccagtattccactgaagtaaattgtaacctatgttttctcttacctttagcaacataacctccaaaaagaatccacatagatgcaatcagagatccaaaggccaacatgaaaccaacgaaaagccaaatgcgagcaccttcaaagaaataatattttaccagaattctttcttatagggcagtacaattaactttcaaaaagaaaataaaacc

SEQ ID NO: 296604 - DNA, 2100 bp, Homo sapiens
  misc_feature (236)..(236): n is a, c, g, or t
  misc_feature (419)..(419): n is a, c, g, or t
  misc_feature (438)..(438): n is a, c, g, or t
  misc_feature (441)..(441): n is a, c, g, or t
  misc_feature (725)..(725): n is a, c, g, or t
  misc_feature (802)..(802): n is a, c, g, or t
  misc_feature (845)..(845): n is a, c, g, or t
  misc_feature (999)..(999): n is a, c, g, or t
  misc_feature (1026)..(1026): n is a, c, g, or t
  misc_feature (1032)..(1032): n is a, c, g, or t
  misc_feature (1037)..(1037): n is a, c, g, or t
  misc_feature (1043)..(1044): n is a, c, g, or t
  misc_feature (1047)..(1047): n is a, c, g, or t
  misc_feature (1050)..(1050): n is a, c, g, or t
  misc_feature (1083)..(1083): n is a, c, g, or t
  misc_feature (1106)..(1106): n is a, c, g, or t
  misc_feature (1111)..(1111): n is a, c, g, or t
  misc_feature (1120)..(1120): n is a, c, g, or t
ttggagagaggggtgatgcctggtgctggtggaacccctgcacagagacggacacaggatgagctctaagtacccgcggtctgtccggcgctgcctgcccctctgggccctaacactggaagcagctctcattctcctcttctatttttttacccactatgacgcttccttagaggatcaaaaggggctcgtggcatcctatcaagttggccaagatctgaccgtgatggcggccnttggcttgggcttcctcacctcgagtttccggagacacagctggagcagtgtggccttcaacctcttcatgctggcgcttggtgtgcagtgggcaatcctgctggacggcttcctgagccagttccctcctgggaaggtggtcatcacactgttcagtattcggctggccaccatgagtgctntgtcggtgctgatctcagnggntgctgtcttggggaaggtcaacttggcgcagttggtggtgatggtgctggtggaggtgacagctttaggcaccctgaggatggtcatcagtaatatcttcaacacagactaccacatgaacatgatgcacatctacgtgttcgcagcctattttgggctgtctgtggcctggtgcctgccaaagcctctacccgagggaacggaggataaagatcagagagcaacgatacccagtttgtctgccatgctgggcgccctcttcttgtggatgttctggccaagtntcaactctgctctgctgagaagtccaatcgaaaggaagaatgccgtgttcaacacctactatgctgtagcagtcagngtggtgacagccatctcagggtcatccttggctcacccccaanggaagatcagcaagacttatgtgcacagtgcggtgttggcaggaggcgtggctgtgggtacctcgtgtcacctgatcccttctccgtggcttgccatggtgctgggtcttgtggctgggctgatctccgtcgggggagccaagtacctgccggngtgttgtaaccgagtgctggggattcnccacanctccntcatgnnctncancttcagcttgctgggtctgcttggagagatcanctacattgtgctgctggtgcttnatacngtctggagncggcaatggcatgattggcttccaggtcctcctcagcattggggaactcagcttggccatcgtgatagctctcacgtctggtctcctgacaggtttgctcctaaatctcaaaatatggaaagcacctcatgtggctaaatattttgatgaccaagttttctggaagtttcctcatttggctgttggattttaagcaaaagcatccaagaaaaacaaggcctgttcaaaaacaagacaacttcctctcactgttgcctgcatttgtacgtgagaaacgctcatgacagcaaagtctccaatgttcgcgcaggcactggagtcagagaaaatggagttgaatcctttctctgccactctttgaggagaatctcaccatttattatgcactgtagaatacaacaataaaatacagccatgtaccacataacaacatcttggtaaacaacagactgcatatatgatggtggtcatccagtaagctaaggttaatttattattattccttgtttttttttttttttttttttttttaatttttttttttcttttgtaatttctttttatttttacaaattataccatgataaaatttgacaaaaattattcatgtgaaagtttcctctaacattttataagttaatcaagtgcataccacaatagatttttggttgttgtttaggtgttctcgtgattttagtattacacaactttaagctgagactacactcagaaataagtttagaaaatggcattacaaaaggttgggagtgagcagtaaaaaaacaaacaaacccatgcagggctgttgtgctgtgggaaatcagatgtgttcactgccataagtcttcagtgcggccaaacttaaaaaccagccctcccaaaaaaggatggaagggcattctgggggaaaaatacagcaattccagggggggtatacctatggtcctttttttcctttaggggccacccattacccctcc

SEQ ID NO: 296605 - DNA, 1397 bp, Homo sapiens
  misc_feature (236)..(236): n is a, c, g, or t
  misc_feature (419)..(419): n is a, c, g, or t
  misc_feature (438)..(438): n is a, c, g, or t
  misc_feature (441)..(441): n is a, c, g, or t
  misc_feature (725)..(725): n is a, c, g, or t
  misc_feature (802)..(802): n is a, c, g, or t
  misc_feature (845)..(845): n is a, c, g, or t
ttggagagaggggtgatgcctggtgctggtggaacccctgcacagagacggacacaggatgagctctaagtacccgcggtctgtccggcgctgcctgcccctctgggccctaacactggaagcagctctcattctcctcttctatttttttacccactatgacgcttccttagaggatcaaaaggggctcgtggcatcctatcaagttggccaagatctgaccgtgatggcggccnttggcttgggcttcctcacctcgagtttccggagacacagctggagcagtgtggccttcaacctcttcatgctggcgcttggtgtgcagtgggcaatcctgctggacggcttcctgagccagttccctcctgggaaggtggtcatcacactgttcagtattcggctggccaccatgagtgctntgtcggtgctgatctcagnggntgctgtcttggggaaggtcaacttggcgcagttggtggtgatggtgctggtggaggtgacagctttaggcaccctgaggatggtcatcagtaatatcttcaacacagactaccacatgaacatgatgcacatctacgtgttcgcagcctattttgggctgtctgtggcctggtgcctgccaaagcctctacccgagggaacggaggataaagatcagagagcaacgatacccagtttgtctgccatgctgggcgccctcttcttgtggatgttctggccaagtntcaactctgctctgctgagaagtccaatcgaaaggaagaatgccgtgttcaacacctactatgctgtagcagtcagngtggtgacagccatctcagggtcatccttggctcacccccaanggaagatcagcaagacttatgtgcacagtgcggtgttggcaggaggcgtggctgtgggtacctcgtgtcacctgatcccttctccgtggcttgccatggtgctgggtcttgtggctgggctgatctccgtcgggggagccaagtacctgccggattggcttccaggtcctcctcagcattggggaactcagcttggccatcgtgatagctctcacgtctggtctcctgacaggtttgctcctaaatctcaaaatatggaaagcacctcatgtggctaaatattttgatgaccaagttttctggaagtttcctcatttggctgttggattttaagcaaaagcatccaagaaaaacaaggcctgttcaaaaacaagacaacttcctctcactgttgcctgcatttgtacgtgagaaacgctcatgacagcaaagtctccttatgtataatgaaacaaggtcagagacagatttgatattaaaaaattaaagactaaaaacttagtttaagagtcaatttaataagtttaaaataaatgtttagtttcattagga

SEQ ID NO: 296606 - DNA, 960 bp, Homo sapiens
tatatatccaagatctcttccaattcagattttatgaaagaatttctaaggtctttgtaatgagacatttaggctgtttcaagaggtcaagccaaaatcagtatgtgggttcatctgcaataaaaatgtttgttttgcttttacagtttcctcatttggctgttggattttaagcaaaagcatccaagaaaaacaaggcctgttcaaaaacaagacaacttcctctcactgttgcctgcatttgtacgtgagaaacgctcatgacagcaaagtctccaatgttcgcgcaggcactggagtcagagaaaatggagttgaatcctttctctgccactctttgaggagaatctcaccatttattatgcactgtagaatacaacaataaaatacagccatgtaccacataacaacatcttggtaaacaacagactgcatatatgatggtggtcatccagtaagctaaggttaatttattattattccttgtttttttttttttttttttttttttaatttttttttttcttttgtaatttctttttatttttacaaattataccatgataaaatttgacaaaaattattcatgtgaaagtttcctctaacattttataagttaatcaagtgcataccacaatagatttttggttgttgtttaggtgttctcgtgattttagtattacacaactttaagctgagactacactcagaaataagtttagaaaatggcattacaaaaggttgggagtgagcagtaaaaaaacaaacaaacccatgcagggctgttgtgctgtgggaaatcagatgtgttcactgccataagtcttcagtgcggccaaacttaaaaaccagccctcccaaaaaaggatggaagggcattctgggggaaaaatacagcaattccagggggggtatacctatggtcctttttttcctttaggggccacccattacccctcc

SEQ ID NO: 296607 - DNA, 452 bp, Homo sapiens
tatactatatttcacagtcaaagatagtcaagcgtacggaagtcagctagaggattggcttccaggtcctcctcagcattggggaactcagcttggccatcgtgatagctctcacgtctggtctcctgacaggtttgctcctaaatctcaaaatatggaaagcacctcatgtggctaaatattttgatgaccaagttttctggaagtttcctcatttggctgttggattttaagcaaaagcatccaagaaaaacaaggcctgttcaaaaacaagacaacttcctctcactgttgcctgcatttgtacgtgagaaacgctcatgacagcaaagtctccttatgtataatgaaacaaggtcagagacagatttgatattaaaaaattaaagactaaaaacttagtttaagagtcaatttaataagtttaaaataaatgtttagtttcattagga

SEQ ID NO: 296608 - DNA, 450 bp, Homo sapiens
tttcttttcatgacttatttacaattcacttattttaataattaacaaaggattggcttccaggtcctcctcagcattggggaactcagcttggccatcgtgatagctctcacgtctggtctcctgacaggtttgctcctaaatctcaaaatatggaaagcacctcatgtggctaaatattttgatgaccaagttttctggaagtttcctcatttggctgttggattttaagcaaaagcatccaagaaaaacaaggcctgttcaaaaacaagacaacttcctctcactgttgcctgcatttgtacgtgagaaacgctcatgacagcaaagtctccttatgtataatgaaacaaggtcagagacagatttgatattaaaaaattaaagactaaaaacttagtttaagagtcaatttaataagtttaaaataaatgtttagtttcattagga

SEQ ID NO: 296609 - DNA, 519 bp, Homo sapiens
tatactatatttcacagtcaaagatagtcaagcgtacggaagtcagctagaggattggcttccaggtcctcctcagcattggggaactcagcttggccatcgtgatagctctcacgtctggtctcctgacaggtttgctcctaaatctcaaaatatggaaagcacctcatgtggctaaatattttgatgaccaagttttctggaagtttcctcatttggctgttggattttaagcaaaagcatccaagaaaaacaaggcctgttcaaaaacaagacaacttcctctcactgttgcctgcatttgtacgtgagaaacgctcatgacagcaaagtctccttatgtataatgaaacaagcaacataacctccaaaaagaatccacatagatgcaatcagagatccaaaggccaacatgaaaccaacgaaaagccaaatgcgagcaccttcaaagaaataatattttaccagaattctttcttatagggcagtacaattaactttcaaaaagaaaataaaacc

SEQ ID NO: 296610 - DNA, 304 bp, Homo sapiens
attgcactccagcctgggcaaagcctgctgggttgggctgggtaagctctgaacaccagtctcgtggcttcaagtcacacctcctaagtgaagctctgaactttctccaaggaccatcagggctttcccctgggcagaggatgccgacactcactgctcttactgggttttattgcagacagactaccacatgaacatgatgcacatctacgtgttcgcagcctattttgggctgtctgtggcctggtgcctgccaaagcctctacccgagggaacggaggataaagatcagagagcaacgata

SEQ ID NO: 296611 - DNA, 1399 bp, Homo sapiens
cgcgcgggtctgggcgtgccgcgggtgacggcggggccgggcgggccaatgggcgctgggtggcgggcgggcgggcctggcggccgggggctttaggacgtgagcgggcggccggccggacagactgacgtgtgagctgcatcgcgggaggcgcatggcggggatggcgctggcgcgggcctggaagcagatgtcctggttctactaccagtacctgctggtcacggcgctctacatgctggagccctgggagcggacggtgttcaattccatgctggtttccattgtggggatggcactatacacaggatacgtcttcatgccccagcacatcatggcgatattgcactactttgaaatcgtacaatgaccaagatgcgaccaggatcagaggttccttggggaagacccaccctacgaagttggaatgagaccatcagatgtgataagaaactcttctagatgtcaacataaccaaccttataaagactaaaattcatgagtagaacaggaaaatcatcctgactcatgtgttgtgttctttatttttaattttcaaagaggctcttgtatagcagtttttgtctattttaacattgtagtcatttgtactttgatatcagtattttcttaacctttgtgactgtttcaatattacccccgtgaaagcttttcttaatgtaactttgagtacattttaattgccttctatttttaaaactcaaaatcattagttgggctttactgttcttgctattgtatggcatatacatctgcctggatatatttctactcttgaccaaagttttgtaaagaacaatataagatttcgggtaggggtatggggagggaagatattttattgagaactacttaacaaaagatttatctgtaagcttgaactcaggagtacagttttagctatctagactctaacagcttttgctttaaaattattaaagtgtttcttaatgaaaaagaaaagatcttgctaaagttaaaataaggaacatttcaccttttaaatatttaattcttatgtggacttatttccagaaaactttggtgataattcttgagacaaaaggtggttaagtagcattattatgtaatgcttatataccatagagtttttaatagaagagaaatccatttcctccgagggtcactattaacaatgtacttccttaaatttagtttaatgattgtaatgggtgctgcatttgcacattgcattaagttatgatgagacgaattgttgttaaaaattatagcaaaaagaaatgtaaacttggttaaaatcctttcactctttgtattgttttttttaaggtttttattccttaaatgtaaaatgactacctaattttttgatgtaaatacattaaattcaaagaga

SEQ ID NO: 296612 - DNA, 2630 bp, Homo sapiens
cgcgcgggtctgggcgtgccgcgggtgacggcggggccgggcgggccaatgggcgctgggtggcgggcgggcgggcctggcggccgggggctttaggacgtgagcgggcggccggccggacagactgacgtgtgagctgcatcgcgggaggcgcatggcggggatggcgctggcgcgggcctggaagcagatgtcctggttctactaccagtacctgctggtcacggcgctctacatgctggagccctgggagcggacggtgttcaattccatgctggtttccattgtggggatggcactatacacaggatacgtcttcatgccccagcacatcatggcgatattgcactactttgaaatcgtacaatgaccaagatgcgaccaggatcagaggttccttggggaagacccaccctacgaagttggaatgagaccatcagatgtgataagaaactcttctagatgtcaacataaccaaccttataaagactaaaattcatgagtagaacaggaaaatcatcctgactcatgtgttgtgttctttatttttaattttcaaagaggctcttgtatagcagtttttgtctattttaacattgtagtcatttgtactttgatatcagtattttcttaacctttgtgactgtttcaatattacccccgtgaaagcttttcttaatgtaactttgagtacattttaattgccttctatttttaaaactcaaaatcattagttgggctttactgttcttgctattgtatggcatatacatctgcctggatatatttctactcttgaccaaagttttgtaaagaacaatataagatttcgggtaggggtatggggagggaagatattttattgagaactacttaacaaaagatttatctgtaagcttgaactcaggagtacagttttagctatctagactctaacagcttttgctttaaaattattaaagtgtttcttaatgaaaaagaaaagatcttgctaaagttaaaataaggaacatttcaccttttaaatatttaattcttatgtggacttatttccagaaaactttggtgataattcttgagacaaaaggtggttaagtagcattattatgtaatgcttatataccatagagtttttaatagaagagaaatccatttcctccgagggtcactattaacaatgtacttccttaaatttagtttaatgattgtaatgggtgctgcatttgcacattgcattaagttatgatgagacgaattgttgttaaaaattatagcaaaaagaaatgtaaacttggttaaaatcctttcactctttgtattgttttttttaaggtttttattccttaaatgtaaaatgactacctaattttttgatgtaaatacattaaattcaaagagaaaaaaaatcagctgatgtagcagtatatcttttccttgatggttaaatattgatctagtatttatattgctgaattattttctgtggaggaccagataagcagtaagtatgtcttatcctatatgttttgcaacataaaaatattgctaattgaaaagaattaggcaattatgtgtgttgctgggttgtttttttgtttttttttttttgagacggagtcttgaccctgtcgcccaggatggagtgcaacagcatgatctcggttcactgcaacctccatctcctgggatcaagtgattctcctgcctcagcctcctgaatagctgggattacaggcacctgccaccatgcctggctaattttttgtatctgtagtagagacggggtttcactgtgttggccaggatggtctcaaactcctgacctcctgatccacctgcctcggcctcccaaagtgctgggtttacaggcgtgagccaccgcgcccggccaaaattgaggtattttttgccctacgttttaaggactagacttttgaagtattttatagtctagaggtctcaagtaatatatatgtgtttaatatttttagagccaattgataccacaattagataggagtagtgagaataatatggaattacttggtttgaagtagttaaaaattggatatggttatatctgagctgtagtcatattatctcaagaaaaataatacgaggatttaacataagatttgttctattaatgcccaaatttggctttcctctactatcccccatagagaaccactaacaagtggatgtctaatattcctctggtgagttgaaggcaggagaagttgagaatcattagtttcaatgagtatccaggtgacctatcctggccctctactcagaaaccggcaatttgtcttcactctgagattcattaaattgctgttgtataactgatggttattatgaacactgacctgtgagacatatggaagataaagtttggtcttacaggaaatcttgaggagagtcaaaagagaaatgggagatgtctcttgagaggtgatcagagaagtttatgctcactgtctgatgcaaatgtctggtctatttgttagtaaataacagggaaatcattttcactttttgttaaaaataaggtatttacaagcataccttgtagttattgtgggttcagtttcagaccactgcaataaagtgaatatctcaataaa

SEQ ID NO: 296613 - DNA, 3276 bp, Homo sapiens
cgcgcgggtctgggcgtgccgcgggtgacggcggggccgggcgggccaatgggcgctgggtggcgggcgggcgggcctggcggccgggggctttaggacgtgagcgggcggccggccggacagactgacgtgtgagctgcatcgcgggaggcgcatggcggggatggcgctggcgcgggcctggaagcagatgtcctggttctactaccagtacctgctggtcacggcgctctacatgctggagccctgggagcggacggtgttcaattccatgctggtttccattgtggggatggcactatacacaggatacgtcttcatgccccagcacatcatggcgatattgcactactttgaaatcgtacaatgaccaagatgcgaccaggatcagaggttccttggggaagacccaccctacgaagttggaatgagaccatcagatgtgataagaaactcttctagatgtcaacataaccaaccttataaagactaaaattcatgagtagaacaggaaaatcatcctgactcatgtgttgtgttctttatttttaattttcaaagaggctcttgtatagcagtttttgtctattttaacattgtagtcatttgtactttgatatcagtattttcttaacctttgtgactgtttcaatattacccccgtgaaagcttttcttaatgtaactttgagtacattttaattgccttctatttttaaaactcaaaatcattagttgggctttactgttcttgctattgtatggcatatacatctgcctggatatatttctactcttgaccaaagttttgtaaagaacaatataagatttcgggtaggggtatggggagggaagatattttattgagaactacttaacaaaagatttatctgtaagcttgaactcaggagtacagttttagctatctagactctaacagcttttgctttaaaattattaaagtgtttcttaatgaaaaagaaaagatcttgctaaagttaaaataaggaacatttcaccttttaaatatttaattcttatgtggacttatttccagaaaactttggtgataattcttgagacaaaaggtggttaagtagcattattatgtaatgcttatataccatagagtttttaatagaagagaaatccatttcctccgagggtcactattaacaatgtacttccttaaatttagtttaatgattgtaatgggtgctgcatttgcacattgcattaagttatgatgagacgaattgttgttaaaaattatagcaaaaagaaatgtaaacttggttaaaatcctttcactctttgtattgttttttttaaggtttttattccttaaatgtaaaatgactacctaattttttgatgtaaatacattaaattcaaagagaaaaaaaatcagctgatgtagcagtatatcttttccttgatggttaaatattgatctagtatttatattgctgaattattttctgtggaggaccagataagcagtaagtatgtcttatcctatatgttttgcaacataaaaatattgctaattgaaaagaattaggcaattatgtgtgttgctgggttgtttttttgtttttttttttttgagacggagtcttgaccctgtcgcccaggatggagtgcaacagcatgatctcggttcactgcaacctccatctcctgggatcaagtgattctcctgcctcagcctcctgaatagctgggattacaggcacctgccaccatgcctggctaattttttgtatctgtagtagagacggggtttcactgtgttggccaggatggtctcaaactcctgacctcctgatccacctgcctcggcctcccaaagtgctgggtttacaggcgtgagccaccgcgcccggccaaaattgaggtattttttgccctacgttttaaggactagacttttgaagtattttatagtctagaggtctcaagtaatatatatgtgtttaatatttttagagccaattgataccacaattagataggagtagtgagaataatatggaattacttggtttgaagtagttaaaaattggatatggttatatctgagctgtagtcatattatctcaagaaaaataatacgaggatttaacataagatttgttctattaatgcccaaatttggctttcctctactatcccccatagagaaccactaacaagtggatgtctaatattcctctggtgagttgaaggcaggagaagttgagaatcattagtttcaatgagtatccaggtgacctatcctggccctctactcagaaaccggcaatttgtcttcactctgagattcattaaattgctgttgtataactgatggttattatgaacactgacctgtgagacatatggaagataaagtttggtcttacaggaaatcttgaggagagtcaaaagagaaatgggagatgtctcttgagaggtgatcagagaagtttatgctcactgtctgatgcaaatgtctggtctatttgttagtaaataacagggaaatcattttcactttttgttaaaaataaggtatttacaagcataccttgtagttattgtgggttcagtttcagaccactgcaataaagtgaatatctcaataaaaaaaaaaaaaaaaaaaaaaaaaaaaaaaaaaaaaaaaaaaaaaaaaaaaaccaaacaaacaaaagcaaacagcaacctaacacaagcaagagaaaataaaaaaataaccaaaaacaaaacgcaaagaggggagggggcgccctagataaacagaacccgcgaagagcagcaacgacacaaccgaccagacaacacccgatcagttcactgagaagagcgccgcacacagagtgagatagatataatacaaagaaacgaccagcggcgtaatcgacacgaatggagggagaaaaaaacgcagcgccacgcactgctataagagaaagacaccaccggttgagggcggctggaaggtacgacaccacccccaacgaatgaacgccgaagcacgaaaaacacacacagatgacgtgtgcagacaagcacagcattgccgggaagcacaagcgctcagactagagtatggatcatatacggaggggcggaataacacggcgggagagaggagacaaccgaaccacaagcacgcagacccagccgccggacgcacaacacggcacaaccagcgaacagagacgacggtcgacgcaagcagcaaggcagcggaaatagaaagaaaggaagaggacaagacggagaagagaac

SEQ ID NO: 296614 - DNA, 2946 bp, Homo sapiens
cgcgcgggtctgggcgtgccgcgggtgacggcggggccgggcgggccaatgggcgctgggtggcgggcgggcgggcctggcggccgggggctttaggacgtgagcgggcggccggccggacagactgacgtgtgagctgcatcgcgggaggcgcatggcggggatggcgctggcgcgggcctggaagcagatgtcctggttctactaccagtacctgctggtcacggcgctctacatgctggagccctgggagcggacggtgttcaattccatgctggtttccattgtggggatggcactatacacaggatacgtcttcatgccccagcacatcatggcgatattgcactactttgaaatcgtacaatgaccaagatgcgaccaggatcagaggttccttggggaagacccaccctacgaagttggaatgagaccatcagatgtgataagaaactcttctagatgtcaacataaccaaccttataaagactaaaattcatgagtagaacaggaaaatcatcctgactcatgtgttgtgttctttatttttaattttcaaagaggctcttgtatagcagtttttgtctattttaacattgtagtcatttgtactttgatatcagtattttcttaacctttgtgactgtttcaatattacccccgtgaaagcttttcttaatgtaactttgagtacattttaattgccttctatttttaaaactcaaaatcattagttgggctttactgttcttgctattgtatggcatatacatctgcctggatatatttctactcttgaccaaagttttgtaaagaacaatataagatttcgggtaggggtatggggagggaagatattttattgagaactacttaacaaaagatttatctgtaagcttgaactcaggagtacagttttagctatctagactctaacagcttttgctttaaaattattaaagtgtttcttaatgaaaaagaaaagatcttgctaaagttaaaataaggaacatttcaccttttaaatatttaattcttatgtggacttatttccagaaaactttggtgataattcttgagacaaaaggtggttaagtagcattattatgtaatgcttatataccatagagtttttaatagaagagaaatccatttcctccgagggtcactattaacaatgtacttccttaaatttagtttaatgattgtaatgggtgctgcatttgcacattgcattaagttatgatgagacgaattgttgttaaaaattatagcaaaaagaaatgtaaacttggttaaaatcctttcactctttgtattgttttttttaaggtttttattccttaaatgtaaaatgactacctaattttttgatgtaaatacattaaattcaaagagaaaaaaaatcagctgatgtagcagtatatcttttccttgatggttaaatattgatctagtatttatattgctgaattattttctgtggaggaccagataagcagtaagtatgtcttatcctatatgttttgcaacataaaaatattgctaattgaaaagaattaggcaattatgtgtgttgctgggttgtttttttgtttttttttttttgagacggagtcttgaccctgtcgcccaggatggagtgcaacagcatgatctcggttcactgcaacctccatctcctgggatcaagtgattctcctgcctcagcctcctgaatagctgggattacaggcacctgccaccatgcctggctaattttttgtatctgtagtagagacggggtttcactgtgttggccaggatggtctcaaactcctgacctcctgatccacctgcctcggcctcccaaagtgctgggtttacaggcgtgagccaccgcgcccggccaaaattgaggtattttttgccctacgttttaaggactagacttttgaagtattttatagtctagaggtctcaagtaatatatatgtgtttaatatttttagagccaattgataccacaattagataggagtagtgagaataatatggaattacttggtttgaagtagttaaaaattggatatggttatatctgagctgtagtcatattatctcaagaaaaataatacgaggatttaacataagatttgttctattaatgcccaaatttggctttcctctactatcccccatagagaaccactaacaagtggatgtctaatattcctctggtgagttgaaggcaggagaagttgagaatcattagtttcaatgagtatccaggtgacctatcctggccctctactcagaaaccggcaatttgtcttcactctgagattcattaaattgctgttgtataactgatggttattatgaacactgacctgtgagacatatggaagataaagtttggtcttacaggaaatcttgaggagagtcaaaagagaaatgggagatgtctcttgagaggtgatcagagaagtttatgctcactgtctgatgcaaatgtctggtctatttgttagtaaataacagggaaatcattttcactttttgttaaaaataaggtatttacaagcataccttgtagttattgtgggttcagtttcagaccactgcaataaagtgaatatctcaataaagtgagtcacatgaagttttttggttttcccctgcatataaaagttacatttacaccatcctgtagtctattaagtgtgcagtagcattatggctaaaaaaaaaaaacacccaatatacctatcttaattaaagaattatttattgctgaaaaaagctaatgattatttgagccttcaacaagtcataattttttgttggtggagggtcttgccttgatgttgatggctgctgactgatctgggtcatggttgcggaaggttggggtggctatggcaatttttaaaaataagacaacaataaagtttgctgcattga

SEQ ID NO: 296615 - DNA, 2576 bp, Homo sapiens
cgcgcgggtctgggcgtgccgcgggtgacggcggggccgggcgggccaatgggcgctgggtggcgggcgggcgggcctggcggccgggggctttaggacgtgagcgggcggccggccggacagactgacgtgtgagctgcatcgcgggaggcgcatggcggggatggcgctggcgcgggcctggaagcagatgtcctggttctactaccagtacctgctggtcacggcgctctacatgctggagccctgggagcggacggtgttcaattccatgctggtttccattgtggggatggcactatacacaggatacgtcttcatgccccagcacatcatggcgatattgcactactttgaaatcgtacaatgaccaagatgcgaccaggatcagaggttccttggggaagacccaccctacgaagttggaatgagaccatcagatgtgataagaaactcttctagatgtcaacataaccaaccttataaagactaaaattcatgagtagaacaggaaaatcatcctgactcatgtgttgtgttctttatttttaattttcaaagaggctcttgtatagcagtttttgtctattttaacattgtagtcatttgtactttgatatcagtattttcttaacctttgtgactgtttcaatattacccccgtgaaagcttttcttaatgtaactttgagtacattttaattgccttctatttttaaaactcaaaatcattagttgggctttactgttcttgctattgtatggcatatacatctgcctggatatatttctactcttgaccaaagttttgtaaagaacaatataagatttcgggtaggggtatggggagggaagatattttattgagaactacttaacaaaagatttatctgtaagcttgaactcaggagtacagttttagctatctagactctaacagcttttgctttaaaattattaaagtgtttcttaatgaaaaagaaaagatcttgctaaagttaaaataaggaacatttcaccttttaaatatttaattcttatgtggacttatttccagaaaactttggtgataattcttgagacaaaaggtggttaagtagcattattatgtaatgcttatataccatagagtttttaatagaagagaaatccatttcctccgagggtcactattaacaatgtacttccttaaatttagtttaatgattgtaatgggtgctgcatttgcacattgcattaagttatgatgagacgaattgttgttaaaaattatagcaaaaagaaatgtaaacttggttaaaatcctttcactctttgtattgttttttttaaggtttttattccttaaatgtaaaatgactacctaattttttgatgtaaatacattaaattcaaagagaaaaaaaatcagctgatgtagcagtatatcttttccttgatggttaaatattgatctagtatttatattgctgaattattttctgtggaggaccagataagcagtaagtatgtcttatcctatatgttttgcaacataaaaatattgctaattgaaaagaattaggcaattatgtgtgttgctgggttgtttttttgtttttttttttttgagacggagtcttgaccctgtcgcccaggatggagtgcaacagcatgatctcggttcactgcaacctccatctcctgggatcaagtgattctcctgcctcagcctcctgaatagctgggattacaggcacctgccaccatgcctggctaattttttgtatctgtagtagagacggggtttcactgtgttggccaggatggtctcaaactcctgacctcctgatccacctgcctcggcctcccaaagtgctgggtttacaggcgtgagccaccgcgcccggccaaaattgaggtattttttgccctacgttttaaggactagacttttgaagtattttatagtctagaggtctcaagtaatatatatgtgtttaatatttttagagccaattgataccacaattagataggagtagtgagaataatatggaattacttggtttgaagtagttaaaaattggatatggttatatctgagctgtagtcatattatctcaagatttcctctactatcccccatagagaaccactaacaagtggatgtctaatattcctctggtgagttgaaggcaggagaagttgagaatcattagtttcaatgagtatccaggtgacctatcctggccctctactcagaaaccggcaatttgtcttcactctgagattcattaaattgctgttgtataactgatggttattatgaacactgacctgtgagacatatggaagataaagtttggtcttacaggaaatcttgaggagagtcaaaagagaaatgggagatgtctcttgagaggtgatcagagaagtttatgctcactgtctgatgcaaatgtctggtctatttgttagtaaataacagggaaatcattttcactttttgttaaaaataaggtatttacaagcataccttgtagttattgtgggttcagtttcagaccactgcaataaagtgaatatctcaataaa

SEQ ID NO: 296616 - DNA, 2576 bp, Homo sapiens
cgcgcgggtctgggcgtgccgcgggtgacggcggggccgggcgggccaatgggcgctgggtggcgggcgggcgggcctggcggccgggggctttaggacgtgagcgggcggccggccggacagactgacgtgtgagctgcatcgcgggaggcgcatggcggggatggcgctggcgcgggcctggaagcagatgtcctggttctactaccagtacctgctggtcacggcgctctacatgctggagccctgggagcggacggtgttcaattccatgctggtttccattgtggggatggcactatacacaggatacgtcttcatgccccagcacatcatggcgatattgcactactttgaaatcgtacaatgaccaagatgcgaccaggatcagaggttccttggggaagacccaccctacgaagttggaatgagaccatcagatgtgataagaaactcttctagatgtcaacataaccaaccttataaagactaaaattcatgagtagaacaggaaaatcatcctgactcatgtgttgtgttctttatttttaattttcaaagaggctcttgtatagcagtttttgtctattttaacattgtagtcatttgtactttgatatcagtattttcttaacctttgtgactgtttcaatattacccccgtgaaagcttttcttaatgtaactttgagtacattttaattgccttctatttttaatctgcctggatatatttctactcttgaccaaagttttgtaaagaacaatataagatttcgggtaggggtatggggagggaagatattttattgagaactacttaacaaaagatttatctgtaagcttgaactcaggagtacagttttagctatctagactctaacagcttttgctttaaaattattaaagtgtttcttaatgaaaaagaaaagatcttgctaaagttaaaataaggaacatttcaccttttaaatatttaattcttatgtggacttatttccagaaaactttggtgataattcttgagacaaaaggtggttaagtagcattattatgtaatgcttatataccatagagtttttaatagaagagaaatccatttcctccgagggtcactattaacaatgtacttccttaaatttagtttaatgattgtaatgggtgctgcatttgcacattgcattaagttatgatgagacgaattgttgttaaaaattatagcaaaaagaaatgtaaacttggttaaaatcctttcactctttgtattgttttttttaaggtttttattccttaaatgtaaaatgactacctaattttttgatgtaaatacattaaattcaaagagaaaaaaaatcagctgatgtagcagtatatcttttccttgatggttaaatattgatctagtatttatattgctgaattattttctgtggaggaccagataagcagtaagtatgtcttatcctatatgttttgcaacataaaaatattgctaattgaaaagaattaggcaattatgtgtgttgctgggttgtttttttgtttttttttttttgagacggagtcttgaccctgtcgcccaggatggagtgcaacagcatgatctcggttcactgcaacctccatctcctgggatcaagtgattctcctgcctcagcctcctgaatagctgggattacaggcacctgccaccatgcctggctaattttttgtatctgtagtagagacggggtttcactgtgttggccaggatggtctcaaactcctgacctcctgatccacctgcctcggcctcccaaagtgctgggtttacaggcgtgagccaccgcgcccggccaaaattgaggtattttttgccctacgttttaaggactagacttttgaagtattttatagtctagaggtctcaagtaatatatatgtgtttaatatttttagagccaattgataccacaattagataggagtagtgagaataatatggaattacttggtttgaagtagttaaaaattggatatggttatatctgagctgtagtcatattatctcaagaaaaataatacgaggatttaacataagatttgttctattaatgcccaaatttggctttcctctactatcccccatagagaaccactaacaagtggatgtctaatattcctctggtgagttgaaggcaggagaagttgagaatcattagtttcaatgagtatccaggtgacctatcctggccctctactcagaaaccggcaatttgtcttcactctgagattcattaaattgctgttgtataactgatggttattatgaacactgacctgtgagacatatggaagataaagtttggtcttacaggaaatcttgaggagagtcaaaagagaaatgggagatgtctcttgagaggtgatcagagaagtttatgctcactgtctgatgcaaatgtctggtctatttgttagtaaataacagggaaatcattttcactttttgttaaaaataaggtatttacaagcataccttgtagttattgtgggttcagtttcagaccactgcaataaagtgaatatctcaataaa

SEQ ID NO: 296617 - DNA, 547 bp, Homo sapiens
gataatacagggggataggcttatggagggccctgagaatccgtacctgctactctgggagttttagagtcagggaatgacacaatgtaaacacactgtggcatacgatgttaccttatgtgttttctttctaagtccctgtatagtggggactttctcatgtttctctatgttccccacatatttgttaaatgcatgttaaatgaatggtgggcttcttaaattatatttttgtggattttattcaggtgaggaatactgtatctatcattcaacaagtttcagctttctggctaaatggcttttgtgccagtgataccagagtcctacagccatgttcttgcagagtttgaatctctggatccattactctcagccctgcggctggactccagtcgtctaaaggtgaatttcttgatccttgtatcagtttcattttcacgtgctctctgttactgtgcccctaccctccagttccttaacgttttgtggaatcttgggtgttcttacctgtcctagtcatacttttgtgggggaaaaaaaagaa

SEQ ID NO: 296618 - DNA, 625 bp, Homo sapiens
gaggaatgctgagtaaaggcagaggccttgatacaaagcatgcttgaaaaatgcgatcggtttctctggtcccagcaggcctagtgggagaagattcagcaggatgtcatgacattttgagaaaaactaaatcatgctcctgaaccttctgaacgcatttgttattgaaggaaagacaccacccccaaatcctgccatcttattggggctacttttgtcagtgtctgtacccttggcatcggcatctgtgactctttatccatgacctcagtgtttcttaaccaaagttgtactcagcattcctcgcaacagctgttgcgaggaatgctgaggaagccacaagggaggacatttcctgcagttgccgaaccagtagcaaccaggtcctgagaaagccctctcttgtggaagaataactgccaagcaggaaagcttttcattctgcaaagctgggacagaaggttcttccttgaatgtggtcatctgcatttcagctcaggaatcctgttggctgaagtccagagtgtcctttctgattcctgaagtagatgaacagcccaggcaccacaaggaagagcaggcccagcacgaagcccccgactccactcagcattcctcgcaacag

SEQ ID NO: 296619 - DNA, 4666 bp, Homo sapiens
cctgagggggagggaccacgcggaaggaggggcgtgactcgtcacgtgatgaggaagtgccgttagtagcgttgtttccagtctgcggctctcctggatgacgtcagcaaggaaggggaggaacgcgaggggagactgaagttcacgttccgctcttagtgcgcgtgcacgagcatagctgtgtctcggaaatggttggctttgggcagttcaggaggaggactccatctcattcagaaagaaggctggaagcacaggctttttctttcacacagggaaggtgcaatttctcaagtcgcctgttgtttacatgatgatgattatgttgctgtagctaccagtcaaggtcttgtggttgtttgggaattaaatcaagagcgtcgtgggaaaccggaacaaatgtatgtgtcttcagaacacaaaggccgaagagtcacagctctctgctgggatacagctattcttagagtttttgtaggtgatcatgctgggaaggtttctgctatcaaactcaatacttctaaacaagcaaaggcagctgctgcttttgtgatgtttcctgttcagacaatcacaactgttgactcctgtgttgtacagttagattatttggatggaaggctacttatatcttcacttactcgatccttcttgtgtgacactgagagagaaaagttttggaaaattggaaacaaggaaagagatggagaatatggagcttgtttctttcctggaagatgttctgggggccagcaacctctgatatattgtgctcgcccaggctctaggatgtgggaagtgaactttgatggagaagttataagtacacatcagttcaagaaactcctctcgttgccacctctccctgtgattactctaagatcagaacctcagtatgatcatacagctggatcctcccagtctttgtctttccccaaactcttacatcttagtgagcattgtgtgctgacttggacagaaagaggaatttatattttcattcctcagaatgttcaagttcttctttggagtgaagtcaaagatattcaggatgtggctgtctgtaggaatgaattgttctgtttgcacctaaatgggaaagtctcacatctctccctgatatctgtggagcgctgtgtggaacgcctgctaagaagaggcctatggaacttggctgctcgtacatgctgtcttttccaaaattctgtcattgccagcagagcaagaaaaactttgactgcagataaattggagcatttgaaatctcagctggaccatggcacctacaatgatctaatttctcaaatggaagaattgatcttaaaatttgaacctttggattcagcttgtagcagtagaagaagctccatttcatcacatgaaagtttcagcatcttggactctggtatttatcgtatcattagtagtagaagaggcagtcagtcagatgaagactcttgctcccttcacagccaaaccctctcagaagatgagagatttaaagaattcacctcacagcaggaagaggacctgccagatcagtgttgtggctcacacggaaatgaagacaatgtttctcatgctccagtgatgtttgagacagataagaatgaaacttttctcccgttcggcattccattaccatttcgttctccatctcctcttgtgtctcttcaggctgtcaaagaaagtgtttctagctttgtgcgtaaaactactgagaagattggcacccttcacacgagccctgatctgaaagtgagaccagagctcaggggtgatgagcaatcatgtgaagaggatgtgagttcagatacctgcccaaaggaggaagacactgaggaggaaaaagaggtaactagtccacctccagaagaagacaggttccaggagcttaaagtagcaacagcagaagcaatgaccaagctacaggaccctctggttttatttgaatccgagtctctgagaatggttttacaggagtggctttcacatttagaaaaaacatttgccatgaaggacttttcaggtgtttcagatactgacaactcatccatgaaattgaaccaggatgtgctattagttaatgaatcaaaaaagggaatattagatgaagataatgaaaaagaaaaaagggactctttaggcaatgaagaatctgttgataaaacagcatgtgaatgtgtaaggagtccaagggagtctttggatgacctgtttcaaatatgttctccatgcgccattgcaagtggtcttcggaacgacctggctgaattgacaacattatgtttggagttgaatgtattgaattctaagatcaaaagcaccagtggacatgtggaccacactttgcaacagtactctcctgaaattctggcttgccagttcctgaagaagtacttttttctcctgaacttgaaaagagcgaaggagagtatcaagcttagttacagtaatagcccttctgtttgggatacttttattgaaggattgaaagaaatggcaagttccaatcctgtgtatatggagatggaaaaaggagatctaccaacaaggttaaagttactagatgacgaggttccttttgatagtccgttgttggttgtttatgctacccggttgtatgaaaagtttggggagtctgctcttcgatccttaatcaagttctttccatccattttgccatcggatatcatacaactttgtcatcatcatcctgctgagtttttggcctatttagacagtctggtgaaatcaaggcctgaagatcagcggtcatcttttcttgagtcccttctgcaaccagagtctttaaggttggattggctgcttttggcagtgtcccttgatgctccaccaagcaccagcacaatggatgatgaaggttatcccaggcctcattcacacttgctttcctggggttacagtcagctgatccttcatctaattaaacttcctgcagattttataaccaaagagaaaatgacagacatctgcaggtcttgtggtttctggcctggatatctaattctctgtttggagctggagagaagaagagaggccttcaccaatattgtgtatctgaatgatatgagcctgatggaaggggacaatggttggatcccagagaccgtggaggaatggaagcttctccttcatctcatacagagcaagagcacgaggccagccccccaggagtcactaaatgggagcctcagtgatgggccttcccccatcaatgtggagaatgtggcacttctgttagctaaggccatgggcccagatcgggcttggtcactgctacaggaatgtggtctggcccttgagttgtcagagaagtttaccagaacctgcgatatcctgaggattgctgagaaaaggcagagggccttgatacaaagcatgcttgaaaaatgcgatcggtttctctggtcccagcaggcctagtgggagaagattcagcaggatgtcatgacattttgagaaaaactaaatcatgctcctgaaccttctgaacgcatttgttattgaaggaaagacaccacccccaaatcctgccatcttattggggctacttttgtcagtgtctgtacccttggcatcggcatctgtgactctttatccatgacctcagtgtttcttaaccaaagttgtactcagcatttcttaaccaaagttgaattttgaaaagagtcagtccttgtttgctggaattagaatgttaatgtcctagtattattccgaactacagtattaactgcttgttgctagtggattagacagattcttttcttactgtggcttccatgttgggagcagaagcttttcatcctggtcacatgaagacagatggtattattgactggagttgaattatttttatatcttgtctggcacaatatggaaattactgaaataagacggtgtataatggaattaacacccaaaataagtagaacactgaagatttgaatttgatatttaagtaaaatgggactgggtgcagtggctcaggcctgtaatcccaaccctttggaaggtaaagacgggaggatcacttgaggccaggagttcaagaccagcctgggcaacatagtgagaatgcatctctacaaaaaataaaaaaaattagctaggcatagtacctgaggccaggaggtccaggccgcaatgagatgtgtttgtgccattgcacaccagtctgggtgacagagaaagaccctgtctcaaaaacaaattaaataaaatatcttcatatataaattaagctaattaaaaatatttttccctgtatttatttaatattttctaatctgaacccatatacagctgactaattcattcttagaaatgtgttatctgtaatctttcctaaacagagtagcccacaagaatcatgcactttttaaaattatttctaagaagccataacaaagctgtgtactaataaagactgcagcaagcacttgtgttatttaaattatgtaagtagattgtcatttgtcaggctcctgtacatttacatagcatgttatattaataataaatgtaaaatatgactaaagttttcattggaacacaatgtagacaggaggtttattatgagcattttgcagaaaggtgtggagtaagtaaagtgttggatgcactgaacaattcaactctt

SEQ ID NO: 296620 - DNA, 4492 bp, Homo sapiens
cctgagggggagggaccacgcggaaggaggggcgtgactcgtcacgtgatgaggaagtgccgttagtagcgttgtttccagtctgcggctctcctggatgacgtcagcaaggaaggggaggaacgcgaggggagactgaagttcacgttccgctcttagtgcgcgtgcacgagcatagctgtgtctcggaaatggttggctttgggcagttcaggaggaggactccatctcattcagaaagaaggctggaagcacaggctttttctttcacacagggaaggtgcaatttctcaagtcgcctgttgtttacatgatgatgattatgttgctgtagctaccagtcaaggtcttgtggttgtttgggaattaaatcaagagcgtcgtgggaaaccggaacaaatgtatgtgtcttcagaacacaaaggccgaagagtcacagctctctgctgggatacagctattcttagagtttttgtaggtgatcatgctgggaaggtttctgctatcaaactcaatacttctaaacaagcaaaggcagctgctgcttttgtgatgtttcctgttcagacaatcacaactgttgactcctgtgttgtacagttagattatttggatggaaggctacttatatcttcacttactcgatccttcttgtgtgacactgagagagaaaagttttggaaaattggaaacaaggaaagagatggagaatatggagcttgtttctttcctggaagatgttctgggggccagcaacctctgatatattgtgctcgcccaggctctaggatgtgggaagtgaactttgatggagaagttataagtacacatcagttcaagaaactcctctcgttgccacctctccctgtgattactctaagatcagaacctcagtatgatcatacagctggatcctcccagtctttgtctttccccaaactcttacatcttagtgagcattgtgtgctgacttggacagaaagaggaatttatattttcattcctcagaatgttcaagttcttctttggagtgaagtcaaagatattcaggatgtggctgtctgtaggaatgaattgttctgtttgcacctaaatgggaaagtctcacatctctccctgatatctgtggagcgctgtgtggaacgcctgctaagaagaggcctatggaacttggctgctcgtacatgctgtcttttccaaaattctgtcattgccagcagagcaagaaaaactttgactgcagataaattggagcatttgaaatctcagctggaccatggcacctacaatgatctaatttctcaaatggaagaattgatcttaaaatttgaacctttggattcagcttgtagcagtagaagaagctccatttcatcacatgaaagtttcagcatcttggactctggtatttatcgtatcattagtagtagaagaggcagtcagtcagatgaagactcttgctcccttcacagccaaaccctctcagaagatgagagatttaaagaattcacctcacagcaggaagaggacctgccagatcagtgttgtggctcacacggaaatgaagacaatgtttctcatgctccagtgatgtttgagacagataagaatgaaacttttctcccgttcggcattccattaccatttcgttctccatctcctcttgtgtctcttcaggctgtcaaagaaagtgtttctagctttgtgcgtaaaactactgagaagattggcacccttcacacgagccctgatctgaaagtgagaccagagctcaggggtgatgagcaatcatgtgaagaggatgtgagttcagatacctgcccaaaggaggaagacactgaggaggaaaaagaggtaactagtccacctccagaagaagacaggttccaggagcttaaagtagcaacagcagaagcaatgaccaagctacaggaccctctggttttatttgaatccgagtctctgagaatggttttacaggagtggctttcacatttagaaaaaacatttgccatgaaggacttttcaggtgtttcagatactgacaactcatccatgaaattgaaccaggatgtgctattagttaatgaatcaaaaaagggaatattagatgaagataatgaaaaagaaaaaagggactctttaggcaatgaagaatctgttgataaaacagcatgtgaatgtgtaaggagtccaagggagtctttggatgacctgtttcaaatatgttctccatgcgccattgcaagtggtcttcggaacgacctggctgaattgacaacattatgtttggagttgaatgtattgaattctaagatcaaaagcaccagtggacatgtggaccacactttgcaacagtactctcctgaaattctggcttgccagttcctgaagaagtacttttttctcctgaacttgaaaagagcgaaggagagtatcaagcttagttacagtaatagcccttctgtttgggatacttttattgaaggattgaaagaaatggcaagttccaatcctgtgtatatggagatggaaaaaggagatctaccaacaaggttaaagttactagatgacgaggttccttttgatagtccgttgttggttgtttatgctacccggttgtatgaaaagtttggggagtctgctcttcgatccttaatcaagttctttccatccattttgccatcggatatcatacaactttgtcatcatcatcctgctgagtttttggcctatttagacagtctggtgaaatcaaggcctgaagatcagcggtcatcttttcttgagtcccttctgcaaccagagtctttaaggttggattggctgcttttggcagtgtcccttgatgctccaccaagcaccagcacaatggatgatgaaggttatcccaggcctcattcacacttgctttcctggggttacagtcagctgatccttcatctaattaaacttcctgcagattttataaccaaagagaaaatgacagacatctgcaggtcttgtggtttctggcctggatatctaattctctgtttggagctggagagaagaagagaggccttcaccaatattgtgtatctgaatgatatgagcctgatggaaggggacaatggttggatcccagagaccgtggaggaatggaagcttctccttcatctcatacagagcaagagcacgaggccagccccccaggagtcactaaatgggagcctcagtgatgggccttcccccatcaatgtggagaatgtggcacttctgttagctaaggccatgggcccagatcgggcttggtcactgctacaggaatgtggtctggcccttgagttgtcagagaagtttaccagaacctgcgatatcctgaggattgctgagaaaaggcagagggccttgatacaaagcatgcttgaaaaatgcgatcggtttctctggtcccagcaggcctagtgggagaagattcagcaggatgtcatgacattttgagaaaaactaaatcatgctcctgaaccttctgaacgcatttgttattgaaggaaagacaccacccccaaatcctgccatcttattggggctacttttgtcagtgtctgtacccttggcatcggcatctgtgactctttatccatgacctcagtgtttcttaaccaaagttgtactcagcatttcttaaccaaagttgaattttgaaaagagtcagtccttgtttgctggaattagaatgttaatgtcctagtattattccgaactacagtattaactgcttgttgctagtggattagacagattcttttcttactgtggcttccatgttgggagcagaagcttttcatcctggtcacatgaagacagatggtattattgactggagttgaattatttttatatcttgtctggcacaatatggaaattactgaaataagacggtgtataatggaattaacacccaaaataagtagaacactgaagatttgaatttgatatttaagtaaaatgggactgggtgcagtggctcaggcctgtaatcccaaccctttggaaggtaaagacgggaggatcacttgaggccaggagttcaagaccagcctgggcaacatagtgagaatgcatctctacaaaaaataaaaaaaattagctaggcatagtacctgaggccaggaggtccaggccgcaatgagatgtgtttgtgccattgcacaccagtctgggtgacagagaaagaccctgtctcaaaaacaaattaaataaaatatcttcatatataaattaagctaattaaaaatatttttccctgtatttatttaatattttctaatctgaacccatatacagctgactaattcattcttagaaatgtgttatctgtaatctttcctaaacagagtagcccacaagaatcatgcactttttaaaattatttctaagaagccataacaaagctgtgtactaataaagactgcagcaagcacttgtgtagactgattgggtcctcggg

SEQ ID NO: 296621 - DNA, 5011 bp, Homo sapiens
cctgagggggagggaccacgcggaaggaggggcgtgactcgtcacgtgatgaggaagtgccgttagtagcgttgtttccagtctgcggctctcctggatgacgtcagcaaggaaggggaggaacgcgaggggagactgaagttcacgttccgctcttagtgcgcggtgagttccccggcgctaagccgggagacaagatccgatctactgagagctgcgaggtactgccctggatgtggtggagctgggctgggacctccgggctgctggtctgtgagcctggctttgaaaattggttactgggtctcctctcaagaaatctcaagatattaaagttactgctgttaaaaagtgtgaggaatactgtatctatcattcaacaagtttcagctttctggctaaatggcttttgtgccagtgataccagagtcctacagccatgttcttgcagagtttgaatctctggatccattactctcagccctgcggctggactccagtcgtctaaagtgcacgagcatagctgtgtctcggaaatggttggctttgggcagttcaggaggaggactccatctcattcagaaagaaggctggaagcacaggctttttctttcacacagggaaggtgcaatttctcaagtcgcctgttgtttacatgatgatgattatgttgctgtagctaccagtcaaggtcttgtggttgtttgggaattaaatcaagagcgtcgtgggaaaccggaacaaatgtatgtgtcttcagaacacaaaggccgaagagtcacagctctctgctgggatacagctattcttagagtttttgtaggtgatcatgctgggaaggtttctgctatcaaactcaatacttctaaacaagcaaaggcagctgctgcttttgtgatgtttcctgttcagacaatcacaactgttgactcctgtgttgtacagttagattatttggatggaaggctacttatatcttcacttactcgatccttcttgtgtgacactgagagagaaaagttttggaaaattggaaacaaggaaagagatggagaatatggagcttgtttctttcctggaagatgttctgggggccagcaacctctgatatattgtgctcgcccaggctctaggatgtgggaagtgaactttgatggagaagttataagtacacatcagttcaagaaactcctctcgttgccacctctccctgtgattactctaagatcagaacctcagtatgatcatacagctggatcctcccagtctttgtctttccccaaactcttacatcttagtgagcattgtgtgctgacttggacagaaagaggaatttatattttcattcctcagaatgttcaagttcttctttggagtgaagtcaaagatattcaggatgtggctgtctgtaggaatgaattgttctgtttgcacctaaatgggaaagtctcacatctctccctgatatctgtggagcgctgtgtggaacgcctgctaagaagaggcctatggaacttggctgctcgtacatgctgtcttttccaaaattctgtcattgccagcagagcaagaaaaactttgactgcagataaattggagcatttgaaatctcagctggaccatggcacctacaatgatctaatttctcaaatggaagaattgatcttaaaatttgaacctttggattcagcttgtagcagtagaagaagctccatttcatcacatgaaagtttcagcatcttggactctggtatttatcgtatcattagtagtagaagaggcagtcagtcagatgaagactcttgctcccttcacagccaaaccctctcagaagatgagagatttaaagaattcacctcacagcaggaagaggacctgccagatcagtgttgtggctcacacggaaatgaagacaatgtttctcatgctccagtgatgtttgagacagataagaatgaaacttttctcccgttcggcattccattaccatttcgttctccatctcctcttgtgtctcttcaggctgtcaaagaaagtgtttctagctttgtgcgtaaaactactgagaagattggcacccttcacacgagccctgatctgaaagtgagaccagagctcaggggtgatgagcaatcatgtgaagaggatgtgagttcagatacctgcccaaaggaggaagacactgaggaggaaaaagaggtaactagtccacctccagaagaagacaggttccaggagcttaaagtagcaacagcagaagcaatgaccaagctacaggaccctctggttttatttgaatccgagtctctgagaatggttttacaggagtggctttcacatttagaaaaaacatttgccatgaaggacttttcaggtgtttcagatactgacaactcatccatgaaattgaaccaggatgtgctattagttaatgaatcaaaaaagggaatattagatgaagataatgaaaaagaaaaaagggactctttaggcaatgaagaatctgttgataaaacagcatgtgaatgtgtaaggagtccaagggagtctttggatgacctgtttcaaatatgttctccatgcgccattgcaagtggtcttcggaacgacctggctgaattgacaacattatgtttggagttgaatgtattgaattctaagatcaaaagcaccagtggacatgtggaccacactttgcaacagtactctcctgaaattctggcttgccagttcctgaagaagtacttttttctcctgaacttgaaaagagcgaaggagagtatcaagcttagttacagtaatagcccttctgtttgggatacttttattgaaggattgaaagaaatggcaagttccaatcctgtgtatatggagatggaaaaaggagatctaccaacaaggttaaagttactagatgacgaggttccttttgatagtccgttgttggttgtttatgctacccggttgtatgaaaagtttggggagtctgctcttcgatccttaatcaagttctttccatccattttgccatcggatatcatacaactttgtcatcatcatcctgctgagtttttggcctatttagacagtctggtgaaatcaaggcctgaagatcagcggtcatcttttcttgagtcccttctgcaaccagagtctttaaggttggattggctgcttttggcagtgtcccttgatgctccaccaagcaccagcacaatggatgatgaaggttatcccaggcctcattcacacttgctttcctggggttacagtcagctgatccttcatctaattaaacttcctgcagattttataaccaaagagaaaatgacagacatctgcaggtcttgtggtttctggcctggatatctaattctctgtttggagctggagagaagaagagaggccttcaccaatattgtgtatctgaatgatatgagcctgatggaaggggacaatggttggatcccagagaccgtggaggaatggaagcttctccttcatctcatacagagcaagagcacgaggccagccccccaggagtcactaaatgggagcctcagtgatgggccttcccccatcaatgtggagaatgtggcacttctgttagctaaggccatgggcccagatcgggcttggtcactgctacaggaatgtggtctggcccttgagttgtcagagaagtttaccagaacctgcgatatcctgaggattgctgagaaaaggcagagggccttgatacaaagcatgcttgaaaaatgcgatcggtttctctggtcccagcaggcctagtgggagaagattcagcaggatgtcatgacattttgagaaaaactaaatcatgctcctgaaccttctgaacgcatttgttattgaaggaaagacaccacccccaaatcctgccatcttattggggctacttttgtcagtgtctgtacccttggcatcggcatctgtgactctttatccatgacctcagtgtttcttaaccaaagttgtactcagcatttcttaaccaaagttgaattttgaaaagagtcagtccttgtttgctggaattagaatgttaatgtcctagtattattccgaactacagtattaactgcttgttgctagtggattagacagattcttttcttactgtggcttccatgttgggagcagaagcttttcatcctggtcacatgaagacagatggtattattgactggagttgaattatttttatatcttgtctggcacaatatggaaattactgaaataagacggtgtataatggaattaacacccaaaataagtagaacactgaagatttgaatttgatatttaagtaaaatgggactgggtgcagtggctcaggcctgtaatcccaaccctttggaaggtaaagacgggaggatcacttgaggccaggagttcaagaccagcctgggcaacatagtgagaatgcatctctacaaaaaataaaaaaaattagctaggcatagtacctgaggccaggaggtccaggccgcaatgagatgtgtttgtgccattgcacaccagtctgggtgacagagaaagaccctgtctcaaaaacaaattaaataaaatatcttcatatataaattaagctaattaaaaatatttttccctgtatttatttaatattttctaatctgaacccatatacagctgactaattcattcttagaaatgtgttatctgtaatctttcctaaacagagtagcccacaagaatcatgcactttttaaaattatttctaagaagccataacaaagctgtgtactaataaagactgcagcaagcacttgtgttatttaaattatgtaagtagattgtcatttgtcaggctcctgtacatttacatagcatgttatattaataataaatgtaaaatatgactaaagttttcattggaacacaatgtagacaggaggtttattatgagcattttgcagaaaggtgtggagtaagtaaagtgttggatgcactgaacaattcaactctt

SEQ ID NO: 296622 - DNA, 4725 bp, Homo sapiens
ggatcccccgggctgcatgaattcggcaccagggagactgaagttcacgttccgctcttagtgcgcggtgaggaatactgtatctatcattcaacaagtttcagctttctggctaaatggcttttgtgccagtgataccagagtcctacagccatgttcttgcagagtttgaatctctggatccattactctcagccctgcggctggactccagtcgtctaaagtgcacgagcatagctgtgtctcggaaatggttggctttgggcagttcaggaggaggactccatctcattcagaaagaaggctggaagcacaggctttttctttcacacagggaaggtgcaatttctcaagtcgcctgttgtttacatgatgatgattatgttgctgtagctaccagtcaaggtcttgtggttgtttgggaattaaatcaagagcgtcgtgggaaaccggaacaaatgtatgtgtcttcagaacacaaaggccgaagagtcacagctctctgctgggatacagctattcttagagtttttgtaggtgatcatgctgggaaggtttctgctatcaaactcaatacttctaaacaagcaaaggcagctgctgcttttgtgatgtttcctgttcagacaatcacaactgttgactcctgtgttgtacagttagattatttggatggaaggctacttatatcttcacttactcgatccttcttgtgtgacactgagagagaaaagttttggaaaattggaaacaaggaaagagatggagaatatggagcttgtttctttcctggaagatgttctgggggccagcaacctctgatatattgtgctcgcccaggctctaggatgtgggaagtgaactttgatggagaagttataagtacacatcagttcaagaaactcctctcgttgccacctctccctgtgattactctaagatcagaacctcagtatgatcatacagctggatcctcccagtctttgtctttccccaaactcttacatcttagtgagcattgtgtgctgacttggacagaaagaggaatttatattttcattcctcagaatgttcaagttcttctttggagtgaagtcaaagatattcaggatgtggctgtctgtaggaatgaattgttctgtttgcacctaaatgggaaagtctcacatctctccctgatatctgtggagcgctgtgtggaacgcctgctaagaagaggcctatggaacttggctgctcgtacatgctgtcttttccaaaattctgtcattgccagcagagcaagaaaaactttgactgcagataaattggagcatttgaaatctcagctggaccatggcacctacaatgatctaatttctcaaatggaagaattgatcttaaaatttgaacctttggattcagcttgtagcagtagaagaagctccatttcatcacatgaaagtttcagcatcttggactctggtatttatcgtatcattagtagtagaagaggcagtcagtcagatgaagactcttgctcccttcacagccaaaccctctcagaagatgagagatttaaagaattcacctcacagcaggaagaggacctgccagatcagtgttgtggctcacacggaaatgaagacaatgtttctcatgctccagtgatgtttgagacagataagaatgaaacttttctcccgttcggcattccattaccatttcgttctccatctcctcttgtgtctcttcaggctgtcaaagaaagtgtttctagctttgtgcgtaaaactactgagaagattggcacccttcacacgagccctgatctgaaagtgagaccagagctcaggggtgatgagcaatcatgtgaagaggatgtgagttcagatacctgcccaaaggaggaagacactgaggaggaaaaagaggtaactagtccacctccagaagaagacaggttccaggagcttaaagtagcaacagcagaagcaatgaccaagctacaggaccctctggttttatttgaatccgagtctctgagaatggttttacaggagtggctttcacatttagaaaaaacatttgccatgaaggacttttcaggtgtttcagatactgacaactcatccatgaaattgaaccaggatgtgctattagttaatgaatcaaaaaagggaatattagatgaagataatgaaaaagaaaaaagggactctttaggcaatgaagaatctgttgataaaacagcatgtgaatgtgtaaggagtccaagggagtctttggatgacctgtttcaaatatgttctccatgcgccattgcaagtggtcttcggaacgacctggctgaattgacaacattatgtttggagttgaatgtattgaattctaagatcaaaagcaccagtggacatgtggaccacactttgcaacagtactctcctgaaattctggcttgccagttcctgaagaagtacttttttctcctgaacttgaaaagagcgaaggagagtatcaagcttagttacagtaatagcccttctgtttgggatacttttattgaaggattgaaagaaatggcaagttccaatcctgtgtatatggagatggaaaaaggagatctaccaacaaggttaaagttactagatgacgaggttccttttgatagtccgttgttggttgtttatgctacccggttgtatgaaaagtttggggagtctgctcttcgatccttaatcaagttctttccatccattttgccatcggatatcatacaactttgtcatcatcatcctgctgagtttttggcctatttagacagtctggtgaaatcaaggcctgaagatcagcggtcatcttttcttgagtcccttctgcaaccagagtctttaaggttggattggctgcttttggcagtgtcccttgatgctccaccaagcaccagcacaatggatgatgaaggttatcccaggcctcattcacacttgctttcctggggttacagtcagctgatccttcatctaattaaacttcctgcagattttataaccaaagagaaaatgacagacatctgcaggtcttgtggtttctggcctggatatctaattctctgtttggagctggagagaagaagagaggccttcaccaatattgtgtatctgaatgatatgagcctgatggaaggggacaatggttggatcccagagaccgtggaggaatggaagcttctccttcatctcatacagagcaagagcacgaggccagccccccaggagtcactaaatgggagcctcagtgatgggccttcccccatcaatgtggagaatgtggcacttctgttagctaaggccatgggcccagatcgggcttggtcactgctacaggaatgtggtctggcccttgagttgtcagagaagtttaccagaacctgcgatatcctgaggattgctgagaaaaggcagagggccttgatacaaagcatgcttgaaaaatgcgatcggtttctctggtcccagcaggcctagtgggagaagattcagcaggatgtcatgacattttgagaaaaactaaatcatgctcctgaaccttctgaacgcatttgttattgaaggaaagacaccacccccaaatcctgccatcttattggggctacttttgtcagtgtctgtacccttggcatcggcatctgtgactctttatccatgacctcagtgtttcttaaccaaagttgtactcagcatttcttaaccaaagttgaattttgaaaagagtcagtccttgtttgctggaattagaatgttaatgtcctagtattattccgaactacagtattaactgcttgttgctagtggattagacagattcttttcttactgtggcttccatgttgggagcagaagcttttcatcctggtcacatgaagacagatggtattattgactggagttgaattatttttatatcttgtctggcacaatatggaaattactgaaataagacggtgtataatggaattaacacccaaaataagtagaacactgaagatttgaatttgatatttaagtaaaatgggactgggtgcagtggctcaggcctgtaatcccaaccctttggaaggtaaagacgggaggatcacttgaggccaggagttcaagaccagcctgggcaacatagtgagaatgcatctctacaaaaaataaaaaaaattagctaggcatagtacctgaggccaggaggtccaggccgcaatgagatgtgtttgtgccattgcacaccagtctgggtgacagagaaagaccctgtctcaaaaacaaattaaataaaatatcttcatatataaattaagctaattaaaaatatttttccctgtatttatttaatattttctaatctgaacccatatacagctgactaattcattcttagaaatgtgttatctgtaatctttcctaaacagagtagcccacaagaatcatgcactttttaaaattatttctaagaagccataacaaagctgtgtactaataaagactgcagcaagcacttgtgttatttaaattatgtaagtagattgtcatttgtcaggctcctgtacatttacatagcatgttatattaataataaatgtaaaatatgactaaagttttcattggaacacaatgtagacaggaggtttattatgagcattttgcagaaaggtgtggagtaagtaaagtgttggatgcactgaacaattcaactctt

SEQ ID NO: 296623 - DNA, 4568 bp, Homo sapiens
ggatcccccgggctgcatgaattcggcaccagggagactgaagttcacgttccgctcttagtgcgcgtgcacgagcatagctgtgtctcggaaatggttggctttgggcagttcaggaggaggactccatctcattcagaaagaaggctggaagcacaggctttttctttcacacagggaaggtgcaatttctcaagtcgcctgttgtttacatgatgatgattatgttgctgtagctaccagtcaaggtcttgtggttgtttgggaattaaatcaagagcgtcgtgggaaaccggaacaaatgtatgtgtcttcagaacacaaaggccgaagagtcacagctctctgctgggatacagctattcttagagtttttgtaggtgatcatgctgggaaggtttctgctatcaaactcaatacttctaaacaagcaaaggcagctgctgcttttgtgatgtttcctgttcagacaatcacaactgttgactcctgtgttgtacagttagattatttggatggaaggctacttatatcttcacttactcgatccttcttgtgtgacactgagagagaaaagttttggaaaattggaaacaaggaaagagatggagaatatggagcttgtttctttcctggaagatgttctgggggccagcaacctctgatatattgtgctcgcccaggctctaggatgtgggaagtgaactttgatggagaagttataagtacacatcagttcaagaaactcctctcgttgccacctctccctgtgattactctaagatcagaacctcagtatgatcatacagctggatcctcccagtctttgtctttccccaaactcttacatcttagtgagcattgtgtgctgacttggacagaaagaggaatttatattttcattcctcagaatgttcaagttcttctttggagtgaagtcaaagatattcaggatgtggctgtctgtaggaatgaattgttctgtttgcacctaaatgggaaagtctcacatctctccctgatatctgtggagcgctgtgtggaacgcctgctaagaagaggcctatggaacttggctgctcgtacatgctgtcttttccaaaattctgtcattgccagcagagcaagaaaaactttgactgcagataaattggagcatttgaaatctcagctggaccatggcacctacaatgatctaatttctcaaatggaagaattgatcttaaaatttgaacctttggattcagcttgtagcagtagaagaagctccatttcatcacatgaaagtttcagcatcttggactctggtatttatcgtatcattagtagtagaagaggcagtcagtcagatgaagactcttgctcccttcacagccaaaccctctcagaagatgagagatttaaagaattcacctcacagcaggaagaggacctgccagatcagtgttgtggctcacacggaaatgaagacaatgtttctcatgctccagtgatgtttgagacagataagaatgaaacttttctcccgttcggcattccattaccatttcgttctccatctcctcttgtgtctcttcaggctgtcaaagaaagtgtttctagctttgtgcgtaaaactactgagaagattggcacccttcacacgagccctgatctgaaagtgagaccagagctcaggggtgatgagcaatcatgtgaagaggatgtgagttcagatacctgcccaaaggaggaagacactgaggaggaaaaagaggtaactagtccacctccagaagaagacaggttccaggagcttaaagtagcaacagcagaagcaatgaccaagctacaggaccctctggttttatttgaatccgagtctctgagaatggttttacaggagtggctttcacatttagaaaaaacatttgccatgaaggacttttcaggtgtttcagatactgacaactcatccatgaaattgaaccaggatgtgctattagttaatgaatcaaaaaagggaatattagatgaagataatgaaaaagaaaaaagggactctttaggcaatgaagaatctgttgataaaacagcatgtgaatgtgtaaggagtccaagggagtctttggatgacctgtttcaaatatgttctccatgcgccattgcaagtggtcttcggaacgacctggctgaattgacaacattatgtttggagttgaatgtattgaattctaagatcaaaagcaccagtggacatgtggaccacactttgcaacagtactctcctgaaattctggcttgccagttcctgaagaagtacttttttctcctgaacttgaaaagagcgaaggagagtatcaagcttagttacagtaatagcccttctgtttgggatacttttattgaaggattgaaagaaatggcaagttccaatcctgtgtatatggagatggaaaaaggagatctaccaacaaggttaaagttactagatgacgaggttccttttgatagtccgttgttggttgtttatgctacccggttgtatgaaaagtttggggagtctgctcttcgatccttaatcaagttctttccatccattttgccatcggatatcatacaactttgtcatcatcatcctgctgagtttttggcctatttagacagtctggtgaaatcaaggcctgaagatcagcggtcatcttttcttgagtcccttctgcaaccagagtctttaaggttggattggctgcttttggcagtgtcccttgatgctccaccaagcaccagcacaatggatgatgaaggttatcccaggcctcattcacacttgctttcctggggttacagtcagctgatccttcatctaattaaacttcctgcagattttataaccaaagagaaaatgacagacatctgcaggtcttgtggtttctggcctggatatctaattctctgtttggagctggagagaagaagagaggccttcaccaatattgtgtatctgaatgatatgagcctgatggaaggggacaatggttggatcccagagaccgtggaggaatggaagcttctccttcatctcatacagagcaagagcacgaggccagccccccaggagtcactaaatgggagcctcagtgatgggccttcccccatcaatgtggagaatgtggcacttctgttagctaaggccatgggcccagatcgggcttggtcactgctacaggaatgtggtctggcccttgagttgtcagagaagtttaccagaacctgcgatatcctgaggattgctgagaaaaggcagagggccttgatacaaagcatgcttgaaaaatgcgatcggtttctctggtcccagcaggcctagtgggagaagattcagcaggatgtcatgacattttgagaaaaactaaatcatgctcctgaaccttctgaacgcatttgttattgaaggaaagacaccacccccaaatcctgccatcttattggggctacttttgtcagtgtctgtacccttggcatcggcatctgtgactctttatccatgacctcagtgtttcttaaccaaagttgtactcagcatttcttaaccaaagttgaattttgaaaagagtcagtccttgtttgctggaattagaatgttaatgtcctagtattattccgaactacagtattaactgcttgttgctagtggattagacagattcttttcttactgtggcttccatgttgggagcagaagcttttcatcctggtcacatgaagacagatggtattattgactggagttgaattatttttatatcttgtctggcacaatatggaaattactgaaataagacggtgtataatggaattaacacccaaaataagtagaacactgaagatttgaatttgatatttaagtaaaatgggactgggtgcagtggctcaggcctgtaatcccaaccctttggaaggtaaagacgggaggatcacttgaggccaggagttcaagaccagcctgggcaacatagtgagaatgcatctctacaaaaaataaaaaaaattagctaggcatagtacctgaggccaggaggtccaggccgcaatgagatgtgtttgtgccattgcacaccagtctgggtgacagagaaagaccctgtctcaaaaacaaattaaataaaatatcttcatatataaattaagctaattaaaaatatttttccctgtatttatttaatattttctaatctgaacccatatacagctgactaattcattcttagaaatgtgttatctgtaatctttcctaaacagagtagcccacaagaatcatgcactttttaaaattatttctaagaagccataacaaagctgtgtactaataaagactgcagcaagcacttgtgttatttaaattatgtaagtagattgtcatttgtcaggctcctgtacatttacatagcatgttatattaataataaatgtaaaatatgactaaagttttcattggaacacaatgtagacaggaggtttattatgagcattttgcagaaaggtgtggagtaagtaaagtgttggatgcactgaacaattcaactctt

SEQ ID NO: 296624 - DNA, 4756 bp, Homo sapiens
ggatcccccgggctgcatgaattcggcaccagggagactgaagttcacgttccgctcttagtgcgcggtgagttccccggcgctaagccgggagacaagatccgatctactgagagctgcgaggtactgccctggatgtggtggagctgggctgggacctccgggctgctggtctgtgagcctggctttgaaaattggttactgggtctcctctcaagaaatctcaagatattaaagttactgctgttaaaaagttgcacgagcatagctgtgtctcggaaatggttggctttgggcagttcaggaggaggactccatctcattcagaaagaaggctggaagcacaggctttttctttcacacagggaaggtgcaatttctcaagtcgcctgttgtttacatgatgatgattatgttgctgtagctaccagtcaaggtcttgtggttgtttgggaattaaatcaagagcgtcgtgggaaaccggaacaaatgtatgtgtcttcagaacacaaaggccgaagagtcacagctctctgctgggatacagctattcttagagtttttgtaggtgatcatgctgggaaggtttctgctatcaaactcaatacttctaaacaagcaaaggcagctgctgcttttgtgatgtttcctgttcagacaatcacaactgttgactcctgtgttgtacagttagattatttggatggaaggctacttatatcttcacttactcgatccttcttgtgtgacactgagagagaaaagttttggaaaattggaaacaaggaaagagatggagaatatggagcttgtttctttcctggaagatgttctgggggccagcaacctctgatatattgtgctcgcccaggctctaggatgtgggaagtgaactttgatggagaagttataagtacacatcagttcaagaaactcctctcgttgccacctctccctgtgattactctaagatcagaacctcagtatgatcatacagctggatcctcccagtctttgtctttccccaaactcttacatcttagtgagcattgtgtgctgacttggacagaaagaggaatttatattttcattcctcagaatgttcaagttcttctttggagtgaagtcaaagatattcaggatgtggctgtctgtaggaatgaattgttctgtttgcacctaaatgggaaagtctcacatctctccctgatatctgtggagcgctgtgtggaacgcctgctaagaagaggcctatggaacttggctgctcgtacatgctgtcttttccaaaattctgtcattgccagcagagcaagaaaaactttgactgcagataaattggagcatttgaaatctcagctggaccatggcacctacaatgatctaatttctcaaatggaagaattgatcttaaaatttgaacctttggattcagcttgtagcagtagaagaagctccatttcatcacatgaaagtttcagcatcttggactctggtatttatcgtatcattagtagtagaagaggcagtcagtcagatgaagactcttgctcccttcacagccaaaccctctcagaagatgagagatttaaagaattcacctcacagcaggaagaggacctgccagatcagtgttgtggctcacacggaaatgaagacaatgtttctcatgctccagtgatgtttgagacagataagaatgaaacttttctcccgttcggcattccattaccatttcgttctccatctcctcttgtgtctcttcaggctgtcaaagaaagtgtttctagctttgtgcgtaaaactactgagaagattggcacccttcacacgagccctgatctgaaagtgagaccagagctcaggggtgatgagcaatcatgtgaagaggatgtgagttcagatacctgcccaaaggaggaagacactgaggaggaaaaagaggtaactagtccacctccagaagaagacaggttccaggagcttaaagtagcaacagcagaagcaatgaccaagctacaggaccctctggttttatttgaatccgagtctctgagaatggttttacaggagtggctttcacatttagaaaaaacatttgccatgaaggacttttcaggtgtttcagatactgacaactcatccatgaaattgaaccaggatgtgctattagttaatgaatcaaaaaagggaatattagatgaagataatgaaaaagaaaaaagggactctttaggcaatgaagaatctgttgataaaacagcatgtgaatgtgtaaggagtccaagggagtctttggatgacctgtttcaaatatgttctccatgcgccattgcaagtggtcttcggaacgacctggctgaattgacaacattatgtttggagttgaatgtattgaattctaagatcaaaagcaccagtggacatgtggaccacactttgcaacagtactctcctgaaattctggcttgccagttcctgaagaagtacttttttctcctgaacttgaaaagagcgaaggagagtatcaagcttagttacagtaatagcccttctgtttgggatacttttattgaaggattgaaagaaatggcaagttccaatcctgtgtatatggagatggaaaaaggagatctaccaacaaggttaaagttactagatgacgaggttccttttgatagtccgttgttggttgtttatgctacccggttgtatgaaaagtttggggagtctgctcttcgatccttaatcaagttctttccatccattttgccatcggatatcatacaactttgtcatcatcatcctgctgagtttttggcctatttagacagtctggtgaaatcaaggcctgaagatcagcggtcatcttttcttgagtcccttctgcaaccagagtctttaaggttggattggctgcttttggcagtgtcccttgatgctccaccaagcaccagcacaatggatgatgaaggttatcccaggcctcattcacacttgctttcctggggttacagtcagctgatccttcatctaattaaacttcctgcagattttataaccaaagagaaaatgacagacatctgcaggtcttgtggtttctggcctggatatctaattctctgtttggagctggagagaagaagagaggccttcaccaatattgtgtatctgaatgatatgagcctgatggaaggggacaatggttggatcccagagaccgtggaggaatggaagcttctccttcatctcatacagagcaagagcacgaggccagccccccaggagtcactaaatgggagcctcagtgatgggccttcccccatcaatgtggagaatgtggcacttctgttagctaaggccatgggcccagatcgggcttggtcactgctacaggaatgtggtctggcccttgagttgtcagagaagtttaccagaacctgcgatatcctgaggattgctgagaaaaggcagagggccttgatacaaagcatgcttgaaaaatgcgatcggtttctctggtcccagcaggcctagtgggagaagattcagcaggatgtcatgacattttgagaaaaactaaatcatgctcctgaaccttctgaacgcatttgttattgaaggaaagacaccacccccaaatcctgccatcttattggggctacttttgtcagtgtctgtacccttggcatcggcatctgtgactctttatccatgacctcagtgtttcttaaccaaagttgtactcagcatttcttaaccaaagttgaattttgaaaagagtcagtccttgtttgctggaattagaatgttaatgtcctagtattattccgaactacagtattaactgcttgttgctagtggattagacagattcttttcttactgtggcttccatgttgggagcagaagcttttcatcctggtcacatgaagacagatggtattattgactggagttgaattatttttatatcttgtctggcacaatatggaaattactgaaataagacggtgtataatggaattaacacccaaaataagtagaacactgaagatttgaatttgatatttaagtaaaatgggactgggtgcagtggctcaggcctgtaatcccaaccctttggaaggtaaagacgggaggatcacttgaggccaggagttcaagaccagcctgggcaacatagtgagaatgcatctctacaaaaaataaaaaaaattagctaggcatagtacctgaggccaggaggtccaggccgcaatgagatgtgtttgtgccattgcacaccagtctgggtgacagagaaagaccctgtctcaaaaacaaattaaataaaatatcttcatatataaattaagctaattaaaaatatttttccctgtatttatttaatattttctaatctgaacccatatacagctgactaattcattcttagaaatgtgttatctgtaatctttcctaaacagagtagcccacaagaatcatgcactttttaaaattatttctaagaagccataacaaagctgtgtactaataaagactgcagcaagcacttgtgttatttaaattatgtaagtagattgtcatttgtcaggctcctgtacatttacatagcatgttatattaataataaatgtaaaatatgactaaagttttcattggaacacaatgtagacaggaggtttattatgagcattttgcagaaaggtgtggagtaagtaaagtgttggatgcactgaacaattcaactctt

SEQ ID NO: 296625 - DNA, 3230 bp, Homo sapiens
ggatcccccgggctgcatgaattcggcaccagggagactgaagttcacgttccgctcttagtgcgcggtgagttccccggcgctaagccgggagacaagatccgatctactgagagctgcgaggtactgccctggatgtggtggagctgggctgggacctccgggctgctggtctgtgagcctggctttgaaaattggttactgggtctcctctcaagaaatctcaagatattaaagttactgctgttaaaaagttgtttctagctttgtgcgtaaaactactgagaagattggcacccttcacacgagccctgatctgaaagtgagaccagagctcaggggtgatgagcaatcatgtgaagaggatgtgagttcagatacctgcccaaaggaggaagacactgaggaggaaaaagaggtaactagtccacctccagaagaagacaggttccaggagcttaaagtagcaacagcagaagcaatgaccaagctacaggaccctctggttttatttgaatccgagtctctgagaatggttttacaggagtggctttcacatttagaaaaaacatttgccatgaaggacttttcaggtgtttcagatactgacaactcatccatgaaattgaaccaggatgtgctattagttaatgaatcaaaaaagggaatattagatgaagataatgaaaaagaaaaaagggactctttaggcaatgaagaatctgttgataaaacagcatgtgaatgtgtaaggagtccaagggagtctttggatgacctgtttcaaatatgttctccatgcgccattgcaagtggtcttcggaacgacctggctgaattgacaacattatgtttggagttgaatgtattgaattctaagatcaaaagcaccagtggacatgtggaccacactttgcaacagtactctcctgaaattctggcttgccagttcctgaagaagtacttttttctcctgaacttgaaaagagcgaaggagagtatcaagcttagttacagtaatagcccttctgtttgggatacttttattgaaggattgaaagaaatggcaagttccaatcctgtgtatatggagatggaaaaaggagatctaccaacaaggttaaagttactagatgacgaggttccttttgatagtccgttgttggttgtttatgctacccggttgtatgaaaagtttggggagtctgctcttcgatccttaatcaagttctttccatccattttgccatcggatatcatacaactttgtcatcatcatcctgctgagtttttggcctatttagacagtctggtgaaatcaaggcctgaagatcagcggtcatcttttcttgagtcccttctgcaaccagagtctttaaggttggattggctgcttttggcagtgtcccttgatgctccaccaagcaccagcacaatggatgatgaaggttatcccaggcctcattcacacttgctttcctggggttacagtcagctgatccttcatctaattaaacttcctgcagattttataaccaaagagaaaatgacagacatctgcaggtcttgtggtttctggcctggatatctaattctctgtttggagctggagagaagaagagaggccttcaccaatattgtgtatctgaatgatatgagcctgatggaaggggacaatggttggatcccagagaccgtggaggaatggaagcttctccttcatctcatacagagcaagagcacgaggccagccccccaggagtcactaaatgggagcctcagtgatgggccttcccccatcaatgtggagaatgtggcacttctgttagctaaggccatgggcccagatcgggcttggtcactgctacaggaatgtggtctggcccttgagttgtcagagaagtttaccagaacctgcgatatcctgaggattgctgagaaaaggcagagggccttgatacaaagcatgcttgaaaaatgcgatcggtttctctggtcccagcaggcctagtgggagaagattcagcaggatgtcatgacattttgagaaaaactaaatcatgctcctgaaccttctgaacgcatttgttattgaaggaaagacaccacccccaaatcctgccatcttattggggctacttttgtcagtgtctgtacccttggcatcggcatctgtgactctttatccatgacctcagtgtttcttaaccaaagttgtactcagcatttcttaaccaaagttgaattttgaaaagagtcagtccttgtttgctggaattagaatgttaatgtcctagtattattccgaactacagtattaactgcttgttgctagtggattagacagattcttttcttactgtggcttccatgttgggagcagaagcttttcatcctggtcacatgaagacagatggtattattgactggagttgaattatttttatatcttgtctggcacaatatggaaattactgaaataagacggtgtataatggaattaacacccaaaataagtagaacactgaagatttgaatttgatatttaagtaaaatgggactgggtgcagtggctcaggcctgtaatcccaaccctttggaaggtaaagacgggaggatcacttgaggccaggagttcaagaccagcctgggcaacatagtgagaatgcatctctacaaaaaataaaaaaaattagctaggcatagtacctgaggccaggaggtccaggccgcaatgagatgtgtttgtgccattgcacaccagtctgggtgacagagaaagaccctgtctcaaaaacaaattaaataaaatatcttcatatataaattaagctaattaaaaatatttttccctgtatttatttaatattttctaatctgaacccatatacagctgactaattcattcttagaaatgtgttatctgtaatctttcctaaacagagtagcccacaagaatcatgcactttttaaaattatttctaagaagccataacaaagctgtgtactaataaagactgcagcaagcacttgtgttatttaaattatgtaagtagattgtcatttgtcaggctcctgtacatttacatagcatgttatattaataataaatgtaaaatatgactaaagttttcattggaacacaatgtagacaggaggtttattatgagcattttgcagaaaggtgtggagtaagtaaagtgttggatgcactgaacaattcaactctt

SEQ ID NO: 296626 - DNA, 4433 bp, Homo sapiens
cctgagggggagggaccacgcggaaggaggggcgtgactcgtcacgtgatgaggaagtgccgttagtagcgttgtttccagtctgcggctctcctggatgacgtcagcaaggaaggggaggaacgcgaggggagactgaagttcacgttccgctcttagtgcgcggtgagttccccggcgctaagccgggagacaagatccgatctactgagagctgcgaggtactgccctggatgtggtggagctgggctgggacctccgggctgctggtctgtgagcctggctttgaaaattggttactgggtctcctctcaagaaatctcaagatattaaagttactgctgttaaaaagtgtgaggaatactgtatctatcattcaacaagtttcagctttctggctaaatggcttttgtgccagtgataccagagtcctacagccatgttcttgcagagtttgaatctctggatccattactctcagccctgcggctggactccagtcgtctaaagtgcacgagcatagctgtgtctcggaaatggttggctttgggcagttcaggaggaggactccatctcattcagaaagaaggctggaagcacaggctttttctttcacacagggaaggtgcaatttctcaagtcgcctgttgtttacatgatgatgattatgttgctgtagctaccagtcaaggtcttgtggttgtttgggaattaaatcaagagcgtcgtgggaaaccggaacaaatgtatgtgtcttcagaacacaaaggccgaagagtcacagctctctgctgggatacagctattcttagagtttttgtaggtgatcatgctgggaaggtttctgctatcaaactcaatacttctaaacaagcaaaggcagctgctgcttttgtgatgtttcctgttcagacaatcacaactgttgactcctgtgttgtacagttagattatttggatggaaggctacttatatcttcacttactcgatccttcttgtgtgacactgagagagaaaagttttggaaaattggaaacaaggaaagagatggagaatatggagcttgtttctttcctggaagatgttctgggggccagcaacctctgatatattgtgctcgcccaggctctaggatgtgggaagtgaactttgatggagaagttataagtacacatcagttcaagaaactcctctcgttgccacctctccctgtgattactctaagatcagaacctcagtatgatcatacagctggatcctcccagtctttgtctttccccaaactcttacatcttagtgagcattgtgtgctgacttggacagaaagaggaatttatattttcattcctcagaatgttcaagttcttctttggagtgaagtcaaagatattcaggatgtggctgtctgtaggaatgaattgttctgtttgcacctaaatgggaaagtctcacatctctccctgatatctgtggagcgctgtgtggaacgcctgctaagaagaggcctatggaacttggctgctcgtacatgctgtcttttccaaaattctgtcattgccagcagagcaagaaaaactttgactgcagataaattggagcatttgaaatctcagctggaccatggcacctacaatgatctaatttctcaaatggaagaattgatcttaaaatttgaacctttggattcagcttgtagcagtagaagaagctccatttcatcacatgaaagtttcagcatcttggactctggtatttatcgtatcattagtagtagaagaggcagtcagtcagatgaagactcttgctcccttcacagccaaaccctctcagaagatgagagatttaaagaattcacctcacagcaggaagaggacctgccagatcagtgttgtggctcacacggaaatgaagacaatgtttctcatgctccagtgatgtttgagacagataagaatgaaacttttctcccgttcggcattccattaccatttcgttctccatctcctcttgtgtctcttcaggctgtcaaagaaagtgtttctagctttgtgcgtaaaactactgagaagattggcacccttcacacgagccctgatctgaaagtgagaccagagctcaggggtgatgagcaatcatgtgaagaggatgtgagttcagatacctgcccaaaggaggaagacactgaggaggaaaaagaggtaactagtccacctccagaagaagacaggttccaggagcttaaagtagcaacagcagaagcaataaatggcaagttccaatcctgtgtatatggagatggaaaaaggagatctaccaacaaggttaaagttactagatgacgaggttccttttgatagtccgttgttggttgtttatgctacccggttgtatgaaaagtttggggagtctgctcttcgatccttaatcaagttctttccatccattttgccatcggatatcatacaactttgtcatcatcatcctgctgagtttttggcctatttagacagtctggtgaaatcaaggcctgaagatcagcggtcatcttttcttgagtcccttctgcaaccagagtctttaaggttggattggctgcttttggcagtgtcccttgatgctccaccaagcaccagcacaatggatgatgaaggttatcccaggcctcattcacacttgctttcctggggttacagtcagctgatccttcatctaattaaacttcctgcagattttataaccaaagagaaaatgacagacatctgcaggtcttgtggtttctggcctggatatctaattctctgtttggagctggagagaagaagagaggccttcaccaatattgtgtatctgaatgatatgagcctgatggaaggggacaatggttggatcccagagaccgtggaggaatggaagcttctccttcatctcatacagagcaagagcacgaggccagccccccaggagtcactaaatgggagcctcagtgatgggccttcccccatcaatgtggagaatgtggcacttctgttagctaaggccatgggcccagatcgggcttggtcactgctacaggaatgtggtctggcccttgagttgtcagagaagtttaccagaacctgcgatatcctgaggattgctgagaaaaggcagagggccttgatacaaagcatgcttgaaaaatgcgatcggtttctctggtcccagcaggcctagtgggagaagattcagcaggatgtcatgacattttgagaaaaactaaatcatgctcctgaaccttctgaacgcatttgttattgaaggaaagacaccacccccaaatcctgccatcttattggggctacttttgtcagtgtctgtacccttggcatcggcatctgtgactctttatccatgacctcagtgtttcttaaccaaagttgtactcagcatttcttaaccaaagttgaattttgaaaagagtcagtccttgtttgctggaattagaatgttaatgtcctagtattattccgaactacagtattaactgcttgttgctagtggattagacagattcttttcttactgtggcttccatgttgggagcagaagcttttcatcctggtcacatgaagacagatggtattattgactggagttgaattatttttatatcttgtctggcacaatatggaaattactgaaataagacggtgtataatggaattaacacccaaaataagtagaacactgaagatttgaatttgatatttaagtaaaatgggactgggtgcagtggctcaggcctgtaatcccaaccctttggaaggtaaagacgggaggatcacttgaggccaggagttcaagaccagcctgggcaacatagtgagaatgcatctctacaaaaaataaaaaaaattagctaggcatagtacctgaggccaggaggtccaggccgcaatgagatgtgtttgtgccattgcacaccagtctgggtgacagagaaagaccctgtctcaaaaacaaattaaataaaatatcttcatatataaattaagctaattaaaaatatttttccctgtatttatttaatattttctaatctgaacccatatacagctgactaattcattcttagaaatgtgttatctgtaatctttcctaaacagagtagcccacaagaatcatgcactttttaaaattatttctaagaagccataacaaagctgtgtactaataaagactgcagcaagcacttgtgttatttaaattatgtaagtagattgtcatttgtcaggctcctgtacatttacatagcatgttatattaataataaatgtaaaatatgactaaagttttcattggaacacaatgtagacaggaggtttattatgagcattttgcagaaaggtgtggagtaagtaaagtgttggatgcactgaacaattcaactctt

SEQ ID NO: 296627 - DNA, 2096 bp, Homo sapiens
ttttcttttttggccctttgacattttctttgttatcttggagcttggtcaccagcatttctagacattttgtagcagaagagttttcaagttatttcttcttctatattcatctcttaatcaggttttcttcacactccccacattttatgcttcctttcttagcatgaagattggtgacttttttccccaactttctcttaggtcatcttttcttgagtcccttctgcaaccagagtctttaaggttggattggctgcttttggcagtgtcccttgatgctccaccaagcaccagcacaatggatgatgaaggttatcccaggcctcattcacacttgctttcctggggttacagtcagctgatccttcatctaattaaacttcctgcagattttataaccaaagagaaaatgacagacatctgcaggtcttgtggtttctggcctggatatctaattctctgtttggagctggagagaagaagagaggccttcaccaatattgtgtatctgaatgatatgagcctgatggaaggggacaatggttggatcccagagaccgtggaggaatggaagcttctccttcatctcatacagagcaagagcacgaggccagccccccaggagtcactaaatgggagcctcagtgatgggccttcccccatcaatgtggagaatgtggcacttctgttagctaaggccatgggcccagatcgggcttggtcactgctacaggaatgtggtctggcccttgagttgtcagagaagtttaccagaacctgcgatatcctgaggattgctgagaaaaggcagagggccttgatacaaagcatgcttgaaaaatgcgatcggtttctctggtcccagcaggcctagtgggagaagattcagcaggatgtcatgacattttgagaaaaactaaatcatgctcctgaaccttctgaacgcatttgttattgaaggaaagacaccacccccaaatcctgccatcttattggggctacttttgtcagtgtctgtacccttggcatcggcatctgtgactctttatccatgacctcagtgtttcttaaccaaagttgtactcagcatttcttaaccaaagttgaattttgaaaagagtcagtccttgtttgctggaattagaatgttaatgtcctagtattattccgaactacagtattaactgcttgttgctagtggattagacagattcttttcttactgtggcttccatgttgggagcagaagcttttcatcctggtcacatgaagacagatggtattattgactggagttgaattatttttatatcttgtctggcacaatatggaaattactgaaataagacggtgtataatggaattaacacccaaaataagtagaacactgaagatttgaatttgatatttaagtaaaatgggactgggtgcagtggctcaggcctgtaatcccaaccctttggaaggtaaagacgggaggatcacttgaggccaggagttcaagaccagcctgggcaacatagtgagaatgcatctctacaaaaaataaaaaaaattagctaggcatagtacctgaggccaggaggtccaggccgcaatgagatgtgtttgtgccattgcacaccagtctgggtgacagagaaagaccctgtctcaaaaacaaattaaataaaatatcttcatatataaattaagctaattaaaaatatttttccctgtatttatttaatattttctaatctgaacccatatacagctgactaattcattcttagaaatgtgttatctgtaatctttcctaaacagagtagcccacaagaatcatgcactttttaaaattatttctaagaagccataacaaagctgtgtactaataaagactgcagcaagcacttgtgttatttaaattatgtaagtagattgtcatttgtcaggctcctgtacatttacatagcatgttatattaataataaatgtaaaatatgactaaagttttcattggaacacaatgtagacaggaggtttattatgagcattttgcagaaaggtgtggagtaagtaaagtgttggatgcactgaacaattcaactctt

SEQ ID NO: 296628 - DNA, 1374 bp, Homo sapiens
gctgctatgaatatgagtatacaaatatgtcttccagacactgctttcagttctttcgggtatatacctgaaagtggaattctggaatcatatgggccttgatacaaagcatgcttgaaaaatgcgatcggtttctctggtcccagcaggcctagtgggagaagattcagcaggatgtcatgacattttgagaaaaactaaatcatgctcctgaaccttctgaacgcatttgttattgaaggaaagacaccacccccaaatcctgccatcttattggggctacttttgtcagtgtctgtacccttggcatcggcatctgtgactctttatccatgacctcagtgtttcttaaccaaagttgtactcagcatttcttaaccaaagttgaattttgaaaagagtcagtccttgtttgctggaattagaatgttaatgtcctagtattattccgaactacagtattaactgcttgttgctagtggattagacagattcttttcttactgtggcttccatgttgggagcagaagcttttcatcctggtcacatgaagacagatggtattattgactggagttgaattatttttatatcttgtctggcacaatatggaaattactgaaataagacggtgtataatggaattaacacccaaaataagtagaacactgaagatttgaatttgatatttaagtaaaatgggactgggtgcagtggctcaggcctgtaatcccaaccctttggaaggtaaagacgggaggatcacttgaggccaggagttcaagaccagcctgggcaacatagtgagaatgcatctctacaaaaaataaaaaaaattagctaggcatagtacctgaggccaggaggtccaggccgcaatgagatgtgtttgtgccattgcacaccagtctgggtgacagagaaagaccctgtctcaaaaacaaattaaataaaatatcttcatatataaattaagctaattaaaaatatttttccctgtatttatttaatattttctaatctgaacccatatacagctgactaattcattcttagaaatgtgttatctgtaatctttcctaaacagagtagcccacaagaatcatgcactttttaaaattatttctaagaagccataacaaagctgtgtactaataaagactgcagcaagcacttgtgttatttaaattatgtaagtagattgtcatttgtcaggctcctgtacatttacatagcatgttatattaataataaatgtaaaatatgactaaagttttcattggaacacaatgtagacaggaggtttattatgagcattttgcagaaaggtgtggagtaagtaaagtgttggatgcactgaacaattcaactctt

SEQ ID NO: 296629 - DNA, 3895 bp, Homo sapiens
cctgagggggagggaccacgcggaaggaggggcgtgactcgtcacgtgatgaggaagtgccgttagtagcgttgtttccagtctgcggctctcctggatgacgtcagcaaggaaggggaggaacgcgaggggagactgaagttcacgttccgctcttagtgcgcggtgagttccccggcgctaagccgggagacaagatccgatctactgagagctgcgaggtactgccctggatgtggtggagctgggctgggacctccgggctgctggtctgtgagcctggctttgaaaattggttactgggtctcctctcaagaaatctcaagatattaaagttactgctgttaaaaagtgtgaggaatactgtatctatcattcaacaagtttcagctttctggctaaatggcttttgtgccagtgataccagagtcctacagccatgttcttgcagagtttgaatctctggatccattactctcagccctgcggctggactccagtcgtctaaagtgcacgagcatagctgtgtctcggaaatggttggctttgggcagttcaggaggaggactccatctcattcagaaagaaggctggaagcacaggctttttctttcacacagggaaggtgcaatttctcaagtcgcctgttgtttacatgatgatgattatgttgctgtagctaccagtcaaggtcttgtggttgtttgggaattaaatcaagagcgtcgtgggaaaccggaacaaatgtatgtgtcttcagaacacaaaggccgaagagtcacagctctctgctgggatacagctattcttagagtttttgtaggtgatcatgctgggaaggtttctgctatcaaactcaatacttctaaacaagcaaaggcagctgctgcttttgtgatgtttcctgttcagacaatcacaactgttgactcctgtgttgtacagttagattatttggatggaaggctacttatatcttcacttactcgatccttcttgtgtgacactgagagagaaaagttttggaaaattggaaacaaggaaagagatggagaatatggagcttgtttctttcctggaagatgttctgggggccagcaacctctgatatattgtgctcgcccaggctctaggatgtgggaagtgaactttgatggagaagttataagtacacatcagttcaagaaactcctctcgttgccacctctccctgtgattactctaagatcagaacctcagtatgatcatacagctggatcctcccagtctttgtctttccccaaactcttacatcttagtgagcattgtgtgctgacttggacagaaagaggaatttatattttcattcctcagaatgttcaagttcttctttggagtgaagtcaaagatattcaggatgtggctgtctgtaggaatgaattgttctgtttgcacctaaatgggaaagtctcacatctctccctgatatctgtggagcgctgtgtggaacgcctgctaagaagaggcctatggaacttggctgctcgtacatgctgtcttttccaaaattctgtcattgccagcagagcaagaaaaactttgactgcagataaattggagcatttgaaatctcagctggaccatggcacctacaatgatctaatttctcaaatggaagaattgatcttaaaatttgaacctttggattcagcttgtagcagtagaagaagctccatttcatcacatgaaagtttcagcatcttggactctggtatttatcgtatcattagtagtagaagaggcagtcagtcagatgaagactcttgctcccttcacagccaaaccctctcagaagatgagagatttaaagaattcacctcacagcaggaagaggacctgccagatcagtgttgtggctcacacggaaatgaagacaatgtttctcatgctccagtgatgtttgagacagataagaatgaaacttttctcccgttcggcattccattaccatttcgttctccatctcctcttgtgtctcttcaggctgtcaaagaaagtgtttctagctttgtgcgtaaaactactgagaagattggcacccttcacacgagccctgatctgaaagtgagaccagagctcaggggtgatgagcaatcatgtgaagaggatgtgagttcagatacctgcccaaaggaggaagacactgaggaggaaaaagaggtaactagtccacctccagaagaagacaggttccaggagcttaaagtagcaacagcagaagcaatgaccaagctacaggaccctctggttttatttgaatccgagtctctgagaatggttttacaggagtggctttcacatttagaaaaaacatttgccatgaaggacttttcaggtgtttcagatactgacaactcatccatgaaattgaaccaggatgtgctattagttaatgaatcaaaaaagggaatattagatgaagataatgaaaaagaaaaaagggactctttaggcaatgaagaatctgttgataaaacagcatgtgaatgtgtaaggagtccaagggagtctttggatgacctgtttcaaatatgttctccatgcgccattgcaagtggtcttcggaacgacctggctgaattgacaacattatgtttggagttgaatgtattgaattctaagatcaaaagcaccagtggacatgtggaccacactttgcaacagtactctcctgaaattctggcttgccagttcctgaagaagtacttttttctcctgaacttgaaaagagcgaaggagagtatcaagcttagttacagtaatagcccttctgtttgggatacttttattgaaggattgaaagaaatggcaagttccaatcctgtgtatatggagatggaaaaaggagatctaccaacaaggttaaagttactagatgacgaggttccttttgatagtccgttgttggttgtttatgctacccggttgtatgaaaagtttggggagtctgctcttcgatccttaatcaagttctttccatccattttgccatcggatatcatacaactttgtcatcatcatcctgctgagtttttggcctatttagacagtctggtgaaatcaaggcctgaagatcagcggtcatcttttcttgagtcccttctgcaaccagagtctttaaggttggattggctgcttttggcagtgtcccttgatgctccaccaagcaccagcacaatggatgatgaaggttatcccaggcctcattcacacttgctttcctggggttacagtcagctgatccttcatctaattaaacttcctgcagattttataaccaaagagaaaatgacagacatctgcaggtcttgtggtttctggcctggatatctaattctctgtttggagctggagagaagaagagaggccttcaccaatattgtgtatctgaatgatatgagcctgatggaaggggacaatggttggatcccagagaccgtggaggaatggaagcttctccttcatctcatacagagcaagagcacgaggccagccccccaggagtcactaaatgggagcctcagtgatgggccttcccccatcaatgtggagaatgtggcacttctgttagctaaggccatgggcccagatcgggcttggtcactgctacaggaatgtggtctggcccttgagttgtcagagaagtttaccagaacctgcgatatcctgaggattgctgagaaaaggcagagggccttgatacaaagcatgcttgaaaaatgcgatcggtttctctggtcccagcaggcctagtgggagaagattcagcaggatgtcatgacattttgagaaaaactaaatcatgctcctgaaccttctgaacgcatttgttattggtggtgctggttgtacaata

SEQ ID NO: 296630 - DNA, 3688 bp, Homo sapiens
cctgagggggagggaccacgcggaaggaggggcgtgactcgtcacgtgatgaggaagtgccgttagtagcgttgtttccagtctgcggctctcctggatgacgtcagcaaggaaggggaggaacgcgaggggagactgaagttcacgttccgctcttagtgcgcggtgagttccccggcgctaagccgggagacaagatccgatctactgagagctgcgaggtactgccctggatgtggtggagctgggctgggacctccgggctgctggtctgtgagcctggctttgaaaattggttactgggtctcctctcaagaaatctcaagatattaaagttactgctgttaaaaagtgtgaggaatactgtatctatcattcaacaagtttcagctttctggctaaatggcttttgtgccagtgataccagagtcctacagccatgttcttgcagagtttgaatctctggatccattactctcagccctgcggctggactccagtcgtctaaagtgcacgagcatagctgtgtctcggaaatggttggctttgggcagttcaggaggaggactccatctcattcagaaagaaggctggaagcacaggctttttctttcacacagggaaggtgcaatttctcaagtcgcctgttgtttacatgatgatgattatgttgctgtagctaccagtcaaggtcttgtggttgtttgggaattaaatcaagagcgtcgtgggaaaccggaacaaatgtatgtgtcttcagaacacaaaggccgaagagtcacagctctctgctgggatacagctattcttagagtttttgtaggtgatcatgctgggaaggtttctgctatcaaactcaatacttctaaacaagcaaaggcagctgctgcttttgtgatgtttcctgttcagacaatcacaactgttgactcctgtgttgtacagttagattatttggatggaaggctacttatatcttcacttactcgatccttcttgtgtgacactgagagagaaaagttttggaaaattggaaacaaggaaagagatggagaatatggagcttgtttctttcctggaagatgttctgggggccagcaacctctgatatattgtgctcgcccaggctctaggatgtgggaagtgaactttgatggagaagttataagtacacatcagttcaagaaactcctctcgttgccacctctccctgtgattactctaagatcagaacctcagtatgatcatacagctggatcctcccagtctttgtctttccccaaactcttacatcttagtgagcattgtgtgctgacttggacagaaagaggaatttatattttcattcctcagaatgttcaagttcttctttggagtgaagtcaaagatattcaggatgtggctgtctgtaggaatgaattgttctgtttgcacctaaatgggaaagtctcacatctctccctgatatctgtggagcgctgtgtggaacgcctgctaagaagaggcctatggaacttggctgctcgtacatgctgtcttttccaaaattctgtcattgccagcagagcaagaaaaactttgactgcagataaattggagcatttgaaatctcagctggaccatggcacctacaatgatctaatttctcaaatggaagaattgatcttaaaatttgaacctttggattcagcttgtagcagtagaagaagctccatttcatcacatgaaagtttcagcatcttggactctggtatttatcgtatcattagtagtagaagaggcagtcagtcagatgaagactcttgctcccttcacagccaaaccctctcagaagatgagagatttaaagaattcacctcacagcaggaagaggacctgccagatcagtgttgtggctcacacggaaatgaagacaatgtttctcatgctccagtgatgtttgagacagataagaatgaaacttttctcccgttcggcattccattaccatttcgttctccatctcctcttgtgtctcttcaggctgtcaaagaaagtgtttctagctttgtgcgtaaaactactgagaagattggcacccttcacacgagccctgatctgaaagtgagaccagagctcaggggtgatgagcaatcatgtgaagaggatgtgagttcagatacctgcccaaaggaggaagacactgaggaggaaaaagaggtaactagtccacctccagaagaagacaggttccaggagcttaaagtagcaacagcagaagcaatgaccaagctacaggaccctctggttttatttgaatccgagtctctgagaatggttttacaggagtggctttcacatttagaaaaaacatttgccatgaaggacttttcaggtgtttcagatactgacaactcatccatgaaattgaaccaggatgtgctattagttaatgaatcaaaaaagggaatattagatgaagataatgaaaaagaaaaaagggactctttaggcaatgaagaatctgttgataaaacagcatgtgaatgtgtaaggagtccaagggagtctttggatgacctgtttcaaatatgttctccatgcgccattgcaagtggtcttcggaacgacctggctgaattgacaacattatgtttggagttgaatgtattgaattctaagatcaaaagcaccagtggacatgtggaccacactttgcaacagtactctcctgaaattctggcttgccagttcctgaagaagtacttttttctcctgaacttgaaaagagcgaaggagagtatcaagcttagttacagtaatagcccttctgtttgggatacttttattgaaggattgaaagaaatggcaagttccaatcctgtgtatatggagatggaaaaaggagatctaccaacaaggttaaagttactagatgacgaggttccttttgatagtccgttgttggttgtttatgctacccggttgtatgaaaagtttggggagtctgctcttcgatccttaatcaagttctttccatccattttgccatcggatatcatacaactttgtcatcatcatcctgctgagtttttggcctatttagacagtctggtgaaatcaaggcctgaagatcagcggtcatcttttcttgagtcccttctgcaaccagagtctttaaggttggattggctgcttttggcagtgtcccttgatgctccaccaagcaccagcacaatggatgatgaaggttatcccaggcctcattcacacttgctttcctggggttacagtcagctgatccttcatctaattaaacttcctgcagattttataaccaaagagaaaatgacagacatctgcaggtcttgtggtttctggcctggatatctaattctctgtttggagctggagagaagaagagaggccttcaccaatattgtgtatctgaatgatatgagcctgatggaaggggacaatggtatgtcaatcctaactggttactcttggttgtcaatttttagaagttactccagacctctcaacaaaaaaatttggtgaacctttcaatgatcatatatttaatatgtgattccacttagttgtcacatttgtggagtttttgtttttgtttttgttttttacctatagcccttgatatgttatgaaatcacaattaagaataaactataggcaacttttctatttc

SEQ ID NO: 296631 - DNA, 664 bp, Homo sapiens
ggatcccccgggctgcatgaattcggcaccagggagactgaagttcacgttccgctcttagtgcgcggtgagttccccggcgctaagccgggagacaagatccgatctactgagagctgcgaggtactgccctggatgtggtggagctgggctgggacctccgggctgctggtctgtgagcctggctttgaaaattggttactgggtctcctctcaagaaatctcaagatattaaagttactgctgttaaaaagttgcacgagcatagctgtgtctcggaaatggttggctttgggcagttcaggaggaggactccatctcattcagaaagaaggctggaagcacaggctttttctttcacacagggaaggtgcaatttctcaagtcgcctgttgtttacatgatgatgattatgttgctgtagctaccagtcaaggtcttgtggttgtttgggaattaaatcaagagcgtcgtgggaaaccggaacaaatgtatgtgtcttcagaacacaaaggccgaagagtcacagctctctgctgggatacagctattcttagagtttttgtaggtgatcatgctgggaaggtttctgctatcaaactcaatacttctaaacaagcaaaggtgagaagcagtcccattctttgtgtatgtagtgagatac

SEQ ID NO: 296632 - DNA, 443 bp, Homo sapiens
cagtagctatcccagtgggtgtcaggtactatatatctcattgtggttttgatttgcatttttctaatgattagagatgttgagcattttttcatatgcttattgaccatttatataattgtctttggagaaatagctattcaagtcctttgcccatgttgaatcaggttgggtgttttcgttgttgttgctgtaagagttctctgatattctggatattaacctcttatcagatacatgatttgcaaatattttcttccattctgtaggttgccttttcactctgtgcattgtgtcttttaatgcacagaatcagtcaactttttgaatcctctgaaactctgtagtttttaagttttctgtgaagaatgaacaatgacaactaaatttgcttgtttcttttctttgggatttcagggccttgatacaaagcatgcttgaaa

SEQ ID NO: 296633 - DNA, 377 bp, Homo sapiens
acttctcttcacatgtttttagtgcacgagcatagctgtgtctcggaaatggttggctttgggcagttcaggaggaggactccatctcattcagaaagaaggctggaagcacaggctttttctttcacacagggtaagattaagggcagctctgtcatacaccatttggagtctctttcataaatgcaaatttctccaatataaataatcatttggaataaaagaatgtagaacttggcttggtgcggtgtctcacgcctgtaatcccagcattttgggaggccaaggcggatggattacctgaggtcaggagttggagaccagcctggccaacatggtgaaaccccgtctccactaaaaacacaaaaattagctgg

SEQ ID NO: 296634 - DNA, 535 bp, Homo sapiens
tgttgtgccctgttggctggcttcctcgccatcgtgccacggccttggagacgctgcaccagaatagcatcactcaagtctctatttatgaggtggacaagcaagattgtcgcaaattttgcactactggcatcgatggagccatgacaatttgggatttcaagaccctcgagtcttccatccagggcctccggataatgtgaagctgagtgagcctccgccatccagcatgacaaactgtggccgaccgcagctgtgccgtggcacgatggcgaggaagccagccccaaggaaacactgaaaacacatatcacgccaatgccgtgtggttttgtttgaatataaaattggtgaaagtgttggtttttttaaggcagtaatttttttgtttgtttttttgcgatttcattccattcttgaccaaagcttctctttaagtagtttattatggaaaattgtcacactaacttaaaagacagggtgagggagatatgtaaattgtccactagaaaattaaataaaagaactgaatgtg

SEQ ID NO: 296635 - DNA, 649 bp, Homo sapiens
tttaaaaaaaaaaaaaaagaggagtgaggagtgtgcccagagcctgtgtgtgtggcagtggggaaaaggcacacctggcctggaggagccagcagggggagccccggcctggagtgtctctgcggggtgagtcctgggagatcctgtttcaggtggggcagggccaggttcagggtggggacaggcagaaccttccctgaggaagagggagtggtgtcatacctacctcggggtagacactcctcagtgacatcagtgctcttcccaccttttccaagaccctcgagtcttccatccagggcctccggataatgtgaagctgagtgagcctccgccatccagcatgacaaactgtggccgaccgcagctgtgccgtggcacgatggcgaggaagccagccccaaggaaacactgaaaacacatatcacgccaatgccgtgtggttttgtttgaatataaaattggtgaaagtgttggtttttttaaggcagtaatttttttgtttgtttttttgcgatttcattccattcttgaccaaagcttctctttaagtagtttattatggaaaattgtcacactaacttaaaagacagggtgagggagatatgtaaattgtccactagaaaattaaataaaagaactgaatgtg

SEQ ID NO: 296636 - DNA, 647 bp, Homo sapiens
ttccgggatctgtcagccgctccctctgggcttccgtcctccgcccgcgcccgacggagcctgttcgcgtcgactgcccagagtccgcgaatcctccgctccgagcccgtccggactcccccgatcccagctttctctcctttgaaaacactaagaataatgtcactgcatcagtttttactagagccaatcacctgtcatgcctggaacagggatcgtactcagattgccctcagtcccaataatcacgaagtgcacatctataagaagaacgggagccagtgggtgaaagctcatgaactcaaggagcacaacggacacatcacagcaacaattccacaagcggtaatcttttttctccgggggggggagaaaaaaaaagggcccccccgtttttttttgggggggggggggtggggcccttccccccccaagggaagggcccgtggaaaaccccccggggcctatgtggtccaactttggttgggggggggcagaccgcaatgtggcccctatgtctggagtcagaaagatggtgttcggaagccaaccctggtgatcctgagaattaatccggcccccggggggcccaagggccttttaaccctttttttttttggtttggaaaagctggggtccccacgcta

SEQ ID NO: 296637 - DNA, 753 bp, Homo sapiens
aatgtgctgggattacaggagtgagctaccgcacctggcccgtaatatttaaagtcatgcagcacttactgaatttccttaaaattttaaagaaaatactataatgatcttagttgttaagtgcttcttgtggccccagctggtacccagcactctaccgttgctatggaaagcactgaacctaccctgaggactaaagagctaaaattaggagatgagacgtgaaattgaaagctagataacatgaaaatgtagacaacacgaaaacgtgcgccaaactatttccaagtgtcttccaaaagtttcctttgtgtttttagggtaaggaagactttccagaatattgagaagaacaaagtaatataataaacacccatatcagataatcgccaccagaattaccaactttttccctgtgccaggaagtaatttcttttcctgtatcaggaaacttaaggaaaaaggatgtaataataaggaatattattcttgatgatggtaaagtcacctctcaccagcagtcctattcctctcccctggaaggcagactataatttgctatgacaccattccagtccatttttaatacatttacatacatacatattcataaacaagcttaggccaagcacagtggcttacacctgtaatcccagcactttgggaggctgaggcgggaggatcgcttgaacccaggaatccaagactagcctgggcaacataatgagaccccccgttagcacggtgtggtgg

SEQ ID NO: 296638 - DNA, 1604 bp, Homo sapiens
ttccgggatctgtcagccgctccctctgggcttccgtcctccgcccgcgcccgacggagcctgttcgcgtcgactgcccagagtccgcgaatcctccgctccgagcccgtccggactcccccgatcccagctttctctcctttgaaaacactaagaataatgtcactgcatcagtttttactagagccaatcacctgtcatgcctggaacagggatcgtactcagattgccctcagtcccaataatcacgaagtgcacatctataagaagaacgggagccagtgggtgaaagctcatgaactcaaggagcacaacggacacatcacaggtattgactgggctcccaagagcgaccgcattgtcacttgtggggcagaccgcaatgcctatgtctggagtcagaaagatggtgtttggaagccaaccctggtgatcctgagaattaatcgcgcagctacttttgtgaagtggtcccccctagagaacaaatttgctgtgggaagtggagcacgactcatttctgtttgttactttgagtctgaaaatgactggtgggtgagcaagcacattaaaaagccgattcgctccacagtcctcagcttggattggcatcccaacaacgttttgctggcagcaggatcatgtgacttcaaatgcagagtgttttctgcctacattaaagaagtggatgaaaagccagccagcacgccctggggcagcaagatgccttttgggcagctgatgtcagagtttggtggcagtggcactggtggctgggtccacggggtaagcttctctgccagtgggagccgcctggcctgggtcagccacgacagcaccgtgtctgttgctgatgcctcaaaaagtgtgcaggtctcgactctgaagacagagttcctgccgctcctaagtgtgtcatttgtctcagagaacagcgtcgtggctgctggccatgactgctgcccaatgctctttaactacgatgaccgcggctgcctgaccttcgtctccaagttagatattccaaaacagagcatccaacgcaacatgtctgccatggaacgcttccgcaacatggacaagagagccacaactgaggaccgcaacacggccttggagacgctgcaccagaatagcatcactcaagtctctatttatgaggtggacaagcaagattgtcgcaaattttgcactactggcatcgatggagccatgacaatttgggatttcaagaccctcgagtcttccatccagggcctccggataatgtgaagctgagtgagcctccgccatccagcatgacaaactgtggccgaccgcagctgtgccgtggcacgatggcgaggaagccagccccaaggaaacactgaaaacacatatcacgccaatgccgtgtggttttgtttgaatataaaattggtgaaagtgttggtttttttaaggcagtaatttttttgtttgtttttttgcgatttcattccattcttgaccaaagcttctctttaagtagtttattatggaaaattgtcacactaacttaaaagacagggtgagggagatatgtaaattgtccactagaaaattaaataaaagaactgaatgtg

SEQ ID NO: 296639 - DNA, 1940 bp, Homo sapiens
ttccgggatctgtcagccgctccctctgggcttccgtcctccgcccgcgcccgacggagcctgttcgcgtcgactgcccagagtccgcgaatcctccgctccgagcccgtccggactcccccgatcccagctttctctcctttgaaaacactaagaataatgtcactgcatcagtttttactagagccaatcacctgtcatgcctggaacagggatcgtactcagattgccctcagtcccaataatcacgaagtgcacatctataagaagaacgggagccagtgggtgaaagctcatgaactcaaggagcacaacggacacatcacaggtattgactgggctcccaagagcgaccgcattgtcacttgtggggcagaccgcaatgcctatgtctggagtcagaaagatggtgtttggaagccaaccctggtgatcctgagaattaatcgcgcagctacttttgtgaagtggtcccccctagagaacaaatttgctgtgggaagtggagcacgactcatttctgtttgttactttgagtctgaaaatgactggtgggtgagcaagcacattaaaaagccgattcgctccacagtcctcagcttggattggcatcccaacaacgttttgctggcagcaggatcatgtgacttcaaatgcagagtgttttctgcctacattaaagaagtggatgaaaagccagccagcacgccctggggcagcaagatgccttttgggcagctgatgtcagagtttggtggcagtggcactggtggctgggtccacggggtaagcttctctgccagtgggagccgcctggcctgggtcagccacgacagcaccgtgtctgttgctgatgcctcaaaaagtgtgcaggtctcgactctgaagacagagttcctgccgctcctaagtgtgtcatttgtctcagagaacagcgtcgtggctgctggccatgactgctgcccaatgctctttaactacgatgaccgcggctgcctgaccttcgtctccaagttagatattccaaaacagagcatccaacgcaacatgtctgccatggaacgcttccgcaacatggacaagagagccacaactgaggaccgcaacacggccttggagacgctgcaccagaatagcatcactcaagtctctatttatgaggtggacaagcaagattgtcgcaaattttgcactactggcatcgatggagccatgacaatttgggatttcaagaccctcgagtcttccatccagggcctccggataatgtgaagctgagtgagcctccgccatccagcatgacaaactgtggccgaccgcagctgtgccgtggcacgatggcgaggaagccagccccaaggaaacactgaaaacacatatcacgccaatgccgtgtggttttgtttgaatataaaattggtgaaagtgttggtttttttaaggcagtaatttttttgtttgtttttttgcgatttcattccattcttgaccaaagcttctctttaagtagtttattatggaaaattgtcacactaacttaaaagacagggtgagggagatatgtaaattgtccactagaaaattaaataaaagaactgaatgtgaaaaaaaaaaagggggggggcgaaaaaaattcccccggggggccccaagtagttacacagtaataccggttgttttgtcgacaaagggggcgccccatataggggggatgataaattagagagaggcgcggggccggagttaaaaaaaacggcggcaacggagagaacctcttcgctcctggggcaatctttggagaaaaaccaccaatattctcgggcggggggcgacattttcgcgacactcccaagaagaattaacggcccggggaatatatactttagggtggtagtggggaccaaacacaaatattcgccggaaaaaattcgtctaagttt

SEQ ID NO: 296640 - DNA, 2163 bp, Homo sapiens
  misc_feature (1616)..(1616): n is a, c, g, or t
ttccgggatctgtcagccgctccctctgggcttccgtcctccgcccgcgcccgacggagcctgttcgcgtcgactgcccagagtccgcgaatcctccgctccgagcccgtccggactcccccgatcccagctttctctcctttgaaaacactaagaataatgtcactgcatcagtttttactagagccaatcacctgtcatgcctggaacagggatcgtactcagattgccctcagtcccaataatcacgaagtgcacatctataagaagaacgggagccagtgggtgaaagctcatgaactcaaggagcacaacggacacatcacaggtattgactgggctcccaagagcgaccgcattgtcacttgtggggcagaccgcaatgcctatgtctggagtcagaaagatggtgtttggaagccaaccctggtgatcctgagaattaatcgcgcagctacttttgtgaagtggtcccccctagagaacaaatttgctgtgggaagtggagcacgactcatttctgtttgttactttgagtctgaaaatgactggtgggtgagcaagcacattaaaaagccgattcgctccacagtcctcagcttggattggcatcccaacaacgttttgctggcagcaggatcatgtgacttcaaatgcagagtgttttctgcctacattaaagaagtggatgaaaagccagccagcacgccctggggcagcaagatgccttttgggcagctgatgtcagagtttggtggcagtggcactggtggctgggtccacggggtaagcttctctgccagtgggagccgcctggcctgggtcagccacgacagcaccgtgtctgttgctgatgcctcaaaaagtgtgcaggtctcgactctgaagacagagttcctgccgctcctaagtgtgtcatttgtctcagagaacagcgtcgtggctgctggccatgactgctgcccaatgctctttaactacgatgaccgcggctgcctgaccttcgtctccaagttagatattccaaaacagagcatccaacgcaacatgtctgccatggaacgcttccgcaacatggacaagagagccacaactgaggaccgcaacacggccttggagacgctgcaccagaatagcatcactcaagtctctatttatgaggtggacaagcaagattgtcgcaaattttgcactactggcatcgatggagccatgacaatttgggatttcaagaccctcgagtcttccatccagggcctccggataatgtgaagctgagtgagcctccgccatccagcatgacaaactgtggccgaccgcagctgtgccgtggcacgatggcgaggaagccagccccaaggaaacactgaaaacacatatcacgccaatgccgtgtggttttgtttgaatataaaattggtgaaagtgttggtttttttaaggcagtaatttttttgtttgtttttttgcgatttcattccattcttgaccaaagcttctctttaagtagtttattatggaaaattgtcacactaacttaaaagacagggtgagggagatatgtaaattgtccactagaaaattaaataaaagaactgaatgtgaaaaaaaaaaanaaaaaaaaaaaaaaaaaaaaaaaaaaaaaaaaaacaaaaaaacaaaacaaaaaacagcaaccaaaaagaaaaacaagaaaacaaaaaaaaacaggagggggggggcgccagctgcaaaatccgccccgagcagggagcgcccaatatataagaccacccaccaggtgtaaaaaaaaagggaggcccaccataagagaggacaaatataaaataggacgggcacgcggagtcataacaaacggatatggagaagaaacaacacatgtgataggggagagaacaatagaaggagaaaacacaacatagtggggggaggaagagcacattacgttagagtagaaacaaacacctccatagtggatgaaagttatgatgttacctgctccgggggtgtgagaaattatacaaacaagtttgtgcgattagttatgatatgtagttggtgaaaaaaaaaacagttatatatctaatctggtgctcggacgaagaaaaagatttagtttatcgtcaaagacgagaattatgtagtatggagaaaatattttag

SEQ ID NO: 296641 - DNA, 1643 bp, Homo sapiens
  misc_feature (1613)..(1613): n is a, c, g, or t
ttccgggatctgtcagccgctccctctgggcttccgtcctccgcccgcgcccgacggagcctgttcgcgtcgactgcccagagtccgcgaatcctccgctccgagcccgtccggactcccccgatcccagctttctctcctttgaaaacactaagaataatgtcactgcatcagtttttactagagccaatcacctgtcatgcctggaacagggatcgtactcagattgccctcagtcccaataatcacgaagtgcacatctataagaagaacgggagccagtgggtgaaagctcatgaactcaaggagcacaacggacacatcacaggtattgactgggctcccaagagcgaccgcattgtcacttgtggggcagaccgcaatgcctatgtctggagtcagaaagatggtgtttggaagccaaccctggtgatcctgagaattaatcgcgcagctacttttgtgaagtggtcccccctagagaacaaatttgctgtgggaagtggagcacgactcatttctgtttgttactttgagtctgaaaatgactggtgggtgagcaagcacattaaaaagccgattcgctccacagtcctcagcttggattggcatcccaacaacgttttgctggcagcaggatcatgtgacttcaaatgcagagtgttttctgcctacattaaagaagtggatgaaaagccagccagcacgccctggggcagcaagatgccttttgggcagctgatgtcagagtttggtggcagtggcactggtggctgggtccacggggtaagcttctctgccagtgggagccgcctggcctgggtcagccacgacagcaccgtgtctgttgctgatgcctcaaaaagtgtgcaggtctcgactctgaagacagagttcctgccgctcctaagtgtgtcatttgtctcagagaacagcgtcgtggctgctggccatgactgctgcccaatgctctttaactacgatgaccgcggctgcctgaccttcgtctccaagttagatattccaaaacagagcatccaacgcaacatgtctgccatggaacgcttccgcaacatggacaagagagccacaactgaggaccgcaacacggccttggagacgctgcaccagaatagcatcactcaagtctctatttatgaggtggacaagcaagattgtcgcaaattttgcactactggcatcgatggagccatgacaatttgggatttcaagaccctcgagtcttccatccagggcctccggataatgtgaagctgagtgagcctccgccatccagcatgacaaactgtggccgaccgcagctgtgccgtggcacgatggcgaggaagccagccccaaggaaacactgaaaacacatatcacgccaatgccgtgtggttttgtttgaatataaaattggtgaaagtgttggtttttttaaggcagtaatttttttgtttgtttttttgcgatttcattccattcttgaccaaagcttctctttaagtagtttattatggaaaattgtcacactaacttaaaagacagggtgagggagatatgtaaattgtccactagaaaattaaataaaagaactgaatgtgacacacaanacaacaggggggccgccaaaaaaaatcccg

SEQ ID NO: 296642 - DNA, 1973 bp, Homo sapiens
ttccgggatctgtcagccgctccctctgggcttccgtcctccgcccgcgcccgacggagcctgttcgcgtcgactgcccagagtccgcgaatcctccgctccgagcccgtccggactcccccgatcccagctttctctcctttgaaaacactaagaataatgtcactgcatcagtttttactagagccaatcacctgtcatgcctggaacagggatcgtactcagattgccctcagtcccaataatcacgaagtgcacatctataagaagaacgggagccagtgggtgaaagctcatgaactcaaggagcacaacggacacatcacaggtattgactgggctcccaagagcgaccgcattgtcacttgtggggcagaccgcaatgcctatgtctggagtcagaaagatggtgtttggaagccaaccctggtgatcctgagaattaatcgcgcagctacttttgtgaagtggtcccccctagagaacaaatttgctgtgggaagtggagcacgactcatttctgtttgttactttgagtctgaaaatgactggtgggtgagcaagcacattaaaaagccgattcgctccacagtcctcagcttggattggcatcccaacaacgttttgctggcagcaggatcatgtgacttcaaatgcagagtgttttctgcctacattaaagaagtggatgaaaagccagccagcacgccctggggcagcaagatgccttttgggcagctgatgtcagagtttggtggcagtggcactggtggctgggtccacggggtaagcttctctgccagtgggagccgcctggcctgggtcagccacgacagcaccgtgtctgttgctgatgcctcaaaaagtgtgcaggtctcgactctgaagacagagttcctgccgctcctaagtgtgtcatttgtctcagagaacagcgtcgtggctgctggccatgactgctgcccaatgctctttaactacgatgaccgcggctgcctgaccttcgtctccaagttagatattccaaaacagagcatccaacgcaacatgtctgccatggaacgcttccgcaacatggacaagagagccacaactgaggaccgcaacacggccttggagacgctgcaccagaatagcatcactcaagtctctatttatgaggtggacaagcaagattgtcgcaaattttgcactactggcatcgatggagccatgacaatttgggatttcaagaccctcgagtcttccatccagggcctccggataatgtgaagctgagtgagcctccgccatccagcatgacaaactgtggccgaccgcagctgtgccgtggcacgatggcgaggaagccagccccaaggaaacactgaaaacacatatcacgccaatgccgtgtggttttgtttgaatataaaattggtgaaagtgttggtttttttaaggcagtaatttttttgtttgtttttttgcgatttcattccattcttgaccaaagcttctctttaagtagtttattatggaaaattgtcacactaacttaaaagacagggtgagggagatatgtaaattgtccactagaaaattaaataaaagaactgaatgtgaaaacacaaacacacaacaccgccagaccacaagcagacagaccacaaagcacaaccatgttgggcgcggcgccccctggcgcccctggaaaaagaagccttttacagaaacccatcgtcgtggggggggcgcggggggcccccacgtgatgctacgcgtcaaaccagggcgcggcacaggtggttgccgaagagaaaaacctgcgggcgcagaagcaacaagggcgcgggcgactccccacacagattataaaaaagcccccggggggaccacgccagcgcgttgcggacaacaacaccagaggggatgcccaaggacacacgagggctaacccacgggagcccaggggcgcccatatcaaattagcg

SEQ ID NO: 296643 - DNA, 2332 bp, Homo sapiens
ttccgggatctgtcagccgctccctctgggcttccgtcctccgcccgcgcccgacggagcctgttcgcgtcgactgcccagagtccgcgaatcctccgctccgagcccgtccggactcccccgatcccagctttctctcctttgaaaacactaagaataatgtcactgcatcagtttttactagagccaatcacctgtcatgcctggaacagggatcgtactcagattgccctcagtcccaataatcacgaagtgcacatctataagaagaacgggagccagtgggtgaaagctcatgaactcaaggagcacaacggacacatcacaggtattgactgggctcccaagagcgaccgcattgtcacttgtggggcagaccgcaatgcctatgtctggagtcagaaagatggtgtttggaagccaaccctggtgatcctgagaattaatcgcgcagctacttttgtgaagtggtcccccctagagaacaaatttgctgtgggaagtggagcacgactcatttctgtttgttactttgagtctgaaaatgactggtgggtgagcaagcacattaaaaagccgattcgctccacagtcctcagcttggattggcatcccaacaacgttttgctggcagcaggatcatgtgacttcaaatgcagagtgttttctgcctacattaaagaagtggatgaaaagccagccagcacgccctggggcagcaagatgccttttgggcagctgatgtcagagtttggtggcagtggcactggtggctgggtccacggggtaagcttctctgccagtgggagccgcctggcctgggtcagccacgacagcaccgtgtctgttgctgatgcctcaaaaagtgtgcaggtctcgactctgaagacagagttcctgccgctcctaagtgtgtcatttgtctcagagaacagcgtcgtggctgctggccatgactgctgcccaatgctctttaactacgatgaccgcggctgcctgaccttcgtctccaagttagatattccaaaacagagcatccaacgcaacatgtctgccatggaacgcttccgcaacatggacaagagagccacaactgaggaccgcaacacggccttggagacgctgcaccagaatagcatcactcaagtctctatttatgaggtggacaagcaagattgtcgcaaattttgcactactggcatcgatggagccatgacaatttgggatttcaagaccctcgagtcttccatccagggcctccggataatgtgaagctgagtgagcctccgccatccagcatgacaaactgtggccgaccgcagctgtgccgtggcacgatggcgaggaagccagccccaaggaaacactgaaaacacatatcacgccaatgccgtgtggttttgtttgaatataaaattggtgaaagtgttggtttttttaaggcagtaatttttttgtttgtttttttgcgatttcattccattcttgaccaaagcttctctttaagtagtttattatggaaaattgtcacactaacttaaaagacagggtgagggagatatgtaaattgtccactagaaaattaaataaaagaactgaatgtggttttggttttgtttccttgtagtatttcaatttttagtagaaaaatatgagcgaattcttcattcgattcagttttttttaggcaaaatcttagatccttggtttcttaaattgtaccattctatacaaccttgaaccaaaaagcaccatttagtgaggggtgagagagaaccgtttctgaacattgcaatacttctgcaaagtaggttgtgtcggtctgttttgtgttgcaataaaggaatacctgaggctgggtaatttgtttaagaaaaaagatttatttggcacacggttctgccggttggacaagaagcatggtgcctgcgtctgcttttggggaagcctcaggaaggttttactcatggcagaaggcgaaggggaagcaggcgtgtcccatggcgggagaggatgcaagagagagtggggaggaccaggctccttgaaacaaccaggtcatagagtgagaacacactcattcctgccagggggcaccaagccattcatgagggatccgccccatgacccaaacaccgcccaccaggccccaccccaacactgaggatcgcatttcagcgtgagatttggaagggacacacagccaagccctgtcagaggtacaccgttcccgtcttgcatgtgagcaacagagaagcccacctccactgagcagccaagcccgaatgggagcctgccctgggaggccctggggcccggtgcccacagcatg

SEQ ID NO: 296644 - DNA, 1807 bp, Homo sapiens
  misc_feature (1440)..(1440): n is a, c, g, or t
ttccgggatctgtcagccgctccctctgggcttccgtcctccgcccgcgcccgacggagcctgttcgcgtcgactgcccagagtccgcgaatcctccgctccgagcccgtccggactcccccgatcccagctttctctcctttgaaaacactaagaataatgtcactgcatcagtttttactagagccaatcacctgtcatgcctggaacagggatcgtactcagattgccctcagtcccaataatcacgaagtgcacatctataagaagaacgggagccagtgggtgaaagctcatgaactcaaggagcacaacggacacatcacaggtattgactgggctcccaagagcgaccgcattgtcacttgtggggcagaccgcaatgcctatgtctggagtcagaaagatggtgtttggaagccaaccctggtgatcctgagaattaatcgcgcagctacttttgtgaagtggtcccccctagagaacaaatttgctgtgggaagtggagcacgactcatttctgtttgttactttgagtctgaaaatgactggtgggtgagcaagcacattaaaaagccgattcgctccacagtcctcagcttggattggcatcccaacaacgttttgctggcagcaggatcatgtgacttcaaatgcagagtgttttctgcctacattaaagaagtggatgaaaagccagccagcacgccctggggcagcaagatgccttttgggcagctgatgtcagagtttggtggcagtggcactggtggctgggtccacggggtaagcttctctgccagtgggagccgcctggcctgggtcagccacgacagcaccgtgtctgttgctgatgcctcaaaaagtgtgcaggtctcgactctgaagacagagttcctgccgctcctaagtgtgtcatttgtctcagagaacagcgtcgtggctgctggccatgactgctgcccaatgctctttaactacgatgaccgcggctgcctgaccttcgtctccaagttagatattccaaaacagagcatccaacgcaacatgtctgccatggaacgcttccgcaacatggacaagagagccacaactgaggaccgcaacacggccttggagacgctgcaccagaatagcatcactcaagtctctatttatgaggtggacaagcaagattgtcgcaaattttgcactactggcatcgatggagccatgacaatttgggatttcaagaccctcgagtcttccatccagggcctccggataatgtgaagctgagtgagcctccgccatccagcatgacaaactgtggccgaccgcagctgtgccgtggcacgatggcgaggaagccagccccaaggaaacactgaaaacacatatcacgccaatgccgtgtggttttgtttgaatataaaattggtgaaagtgaaaaaaaaaaanaaaaaaaaaaaaaaaaaaaaaaaaaaaaaaaaaaaaaaaaaagggggggggcgaaaaaaattcccccggggggccccaagtagttacacagtaataccggttgttttgtcgacaaagggggcgccccatataggggggatgataaattagagagaggcgcggggccggagttaaaaaaaacggcggcaacggagagaacctcttcgctcctggggcaatctttggagaaaaaccaccaatattctcgggcggggggcgacattttcgcgacactcccaagaagaattaacggcccggggaatatatactttagggtggtagtggggaccaaacacaaatattcgccggaaaaaattcgtctaagttt

SEQ ID NO: 296645 - DNA, 1288 bp, Homo sapiens
ttccgggatctgtcagccgctccctctgggcttccgtcctccgcccgcgcccgacggagcctgttcgcgtcgactgcccagagtccgcgaatcctccgctccgagcccgtccggactcccccgatcccagctttctctcctttgaaaacactaagaataatgtcactgcatcagtttttactagagccaatcacctgtcatgcctggaacagggatcgtactcagattgccctcagtcccaataatcacgaagtgcacatctataagaagaacgggagccagtgggtgaaagctcatgaactcaaggagcacaacggacacatcacaggtattgactgggctcccaagagcgaccgcattgtcacttgtggggcagaccgcaatgcctatgtctggagtcagaaagatggtgtttggaagccaaccctggtgatcctgagaattaatcgcgcagctacttttgtgaagtggtcccccctagagaacaaatttgctgtgggaagtggagcacgactcatttctgtttgttactttgagtctgaaaatgactggtgggtgagcaagcacattaaaaagccgattcgctccacagtcctcagcttggattggcatcccaacaacgttttgctggcagcaggatcatgtgacttcaaatgcagagtgttttctgcctacattaaagaagtggatgaaaagccagccagcacgccctggggcagcaagatgccttttgggcagctgatgtcagagtttggtggcagtggcactggtggctgggtccacggggtaagcttctctgccagtgggagccgcctggcctgggtcagccacgacagcaccgtgtctgttgctgatgcctcaaaaagtgtgcaggtctcgactctgaagacagagttcctgccgctcctaagtgtgtcatttgtctcagagaacagcgtcgtggctgctggccatgactgctgcccaatgctctttaactacgatgaccgcggctgcctgaccttcgtctccaagttagatattccaaaacagagcatccaacgcaacatgtctgccatggaacgcttccgcaacatggacaagagagccacaactgaggaccgcaacacggccttggagacgctgcaccagaatagcatcactcaagtctctatttatgaggtggacaagcaagattgtcgcaaattttgcactactggcatcgatggagccatgacaatttgggatttcaagacctcgagtcttcccatccagggcctcccgataacacgttcgcgaggtaccgcta

SEQ ID NO: 296646 - DNA, 1211 bp, Homo sapiens
ttccgggatctgtcagccgctccctctgggcttccgtcctccgcccgcgcccgacggagcctgttcgcgtcgactgcccagagtccgcgaatcctccgctccgagcccgtccggactcccccgatcccagctttctctcctttgaaaacactaagaataatgtcactgcatcagtttttactagagccaatcacctgtcatgcctggaacagggatcgtactcagattgccctcagtcccaataatcacgaagtgcacatctataagaagaacgggagccagtgggtgaaagctcatgaactcaaggagcacaacggacacatcacaggtattgactgggctcccaagagcgaccgcattgtcacttgtggggcagaccgcaatgcctatgtctggagtcagaaagatggtgtttggaagccaaccctggtgatcctgagaattaatcgcgcagctacttttgtgaagtggtcccccctagagaacaaatttgctgtgggaagtggagcacgactcatttctgtttgttactttgagtctgaaaatgactggtgggtgagcaagcacattaaaaagccgattcgctccacagtcctcagcttggattggcatcccaacaacgttttgctggcagcaggatcatgtgacttcaaatgcagagtgttttctgcctacattaaagaagtggatgaaaagccagccagcacgccctggggcagcaagatgccttttgggcagctgatgtcagagtttggtggcagtggcactggtggctgggtccacggggtaagcttctctgccagtgggagccgcctggcctgggtcagccacgacagcaccgtgtctgttgctgatgcctcaaaaagtgtgcaggtctcgactctgaagacagagttcctgccgctcctaagtgtgtcatttgtctcagagaacagcgtcgtggctgctggccatgactgctgcccaatgctctttaactacgatgaccgcggctgcctgaccttcgtctccaagttagatattccaaaacagagcatccaacgcaacatgtctgccatggaacgcttccgcaacatggacaagagagccacaactgaggaccgcaacacggccttggagacgctgcaccagaatagcatcactctatgtctctattagtgagctagacaagcaatatctctctaatttccactacagacagtgacgactag

SEQ ID NO: 296647 - DNA, 1434 bp, Homo sapiens
ttccgggatctgtcagccgctccctctgggcttccgtcctccgcccgcgcccgacggagcctgttcgcgtcgactgcccagagtccgcgaatcctccgctccgagcccgtccggactcccccgatcccagctttctctcctttgaaaacactaagaataatgtcactgcatcagtttttactagagccaatcacctgtcatgcctggaacagggatcgtactcagattgccctcagtcccaataatcacgaagtgcacatctataagaagaacgggagccagtgggtgaaagctcatgaactcaaggagcacaacggacacatcacaggtattgactgggctcccaagagcgaccgcattgtcacttgtggggcagaccgcaatgcctatgtctggagtcagaaagatggtgtttggaagccaaccctggtgatcctgagaattaatcgcgcagctacttttgtgaagtggtcccccctagagaacaaatttgctgtgggaagtggagcacgactcatttctgtttgttactttgagtctgaaaatgactggtgggtgagcaagcacattaaaaagccgattcgctccacagtcctcagcttggattggcatcccaacaacgttttgctggcagcaggatcatgtgacttcaaatgcagagtgttttctgcctacattaaagaagtggatgaaaagccagccagcacgccctggggcagcaagatgccttttgggcagctgatgtcagagtttggtggcagtggcactggtggctgggtccacggggtaagcttctctgccagtgggagccgcctggcctgggtcagccacgacagcaccgtgtctgttgctgatgcctcaaaaagtgtgcaggtctcgactctgaagacagagttcctgccgctcctaagtgtgtcatttgtctcagagaacagcgtcgtggctgctggccatgactgctgcccaatgctctttaactacgatgaccgcggctgcctgaccttcgtctccaagttagatattccaaaacagagcatccaacgcaacatgtctgccatggaacgcttccgcaacatggacaagagagccacaactgaggaccgcaacacggccttggagacgctgcaccagaatagcatcacgtgcagattacaaggcagcagccagcaggagcagtgcagaccttgttgcaatctgaggtggtggggcctcagggcagctgcttcctagggtaccctttctcagctactcgagaacaaaaggagacattcctgaatgctgcgttcccacagtagtgcacacataacagaaagcgaagttacagcctgttggaaaaggtaactgtagctgtcgtttcaagtaatggatacaaataagaagattatttaattaaaggaacagaatttcttatcatcatgatgacaaagctgagga

SEQ ID NO: 296648 - DNA, 1573 bp, Homo sapiens
ttccgggatctgtcagccgctccctctgggcttccgtcctccgcccgcgcccgacggagcctgttcgcgtcgactgcccagagtccgcgaatcctccgctccgagcccgtccggactcccccgatcccagctttctctcctttgaaaacactaagaataatgtcactgcatcagtttttactagagccaatcacctgtcatgcctggaacagggatcgtactcagattgccctcagtcccaataatcacgaagtgcacatctataagaagaacgggagccagtgggtgaaagctcatgaactcaaggagcacaacggacacatcacaggtattgactgggctcccaagagcgaccgcattgtcacttgtggggcagaccgcaatgcctatgtctggagtcagaaagatggtgtttggaagccaaccctggtgatcctgagaattaatcgcgcagctacttttgtgaagtggtcccccctagagaacaaatttgctgtgggaagtggagcacgactcatttgtgggtgagcaagcacattaaaaagccgattcgctccacagtcctcagcttggattggcatcccaacaacgttttgctggcagcaggatcatgtgacttcaaatgcagagtgttttctgcctacattaaagaagtggatgaaaagccagccagcacgccctggggcagcaagatgccttttgggcagctgatgtcagagtttggtggcagtggcactggtggctgggtccacggggtaagcttctctgccagtgggagccgcctggcctgggtcagccacgacagcaccgtgtctgttgctgatgcctcaaaaagtgtgcaggtctcgactctgaagacagagttcctgccgctcctaagtgtgtcatttgtctcagagaacagcgtcgtggctgctggccatgactgctgcccaatgctctttaactacgatgaccgcggctgcctgaccttcgtctccaagttagatattccaaaacagagcatccaacgcaacatgtctgccatggaacgcttccgcaacatggacaagagagccacaactgaggaccgcaacacggccttggagacgctgcaccagaatagcatcactcaagtctctatttatgaggtggacaagcaagattgtcgcaaattttgcactactggcatcgatggagccatgacaatttgggatttcaagaccctcgagtcttccatccagggcctccggataatgtgaagctgagtgagcctccgccatccagcatgacaaactgtggccgaccgcagctgtgccgtggcacgatggcgaggaagccagccccaaggaaacactgaaaacacatatcacgccaatgccgtgtggttttgtttgaatataaaattggtgaaagtgttggtttttttaaggcagtaatttttttgtttgtttttttgcgatttcattccattcttgaccaaagcttctctttaagtagtttattatggaaaattgtcacactaacttaaaagacagggtgagggagatatgtaaattgtccactagaaaattaaataaaagaactgaatgtg

SEQ ID NO: 296649 - DNA, 1496 bp, Homo sapiens
ttccgggatctgtcagccgctccctctgggcttccgtcctccgcccgcgcccgacggagcctgttcgcgtcgactgcccagagtccgcgaatcctccgctccgagcccgtccggactcccccgatcccagctttctctcctttgaaaacactaagaataatgtcactgcatcagtttttactagagccaatcacctgtcatgcctggaacagggatcgtactcagattgccctcagtcccaataatcacgaagtgcacatctataagaagaacgggagccagtgggtgaaagctcatgaactcaaggagcacaacggacacatcacaggtattgactgggctcccaagagcgaccgcattgtcacttgtggggcagaccgcaatgcctatgtctggagtcagaaagatggtgtttggaagccaaccctggtgatcctgagaattaatcgcgcagctacttttgtgaagtggtcccccctagagaacaaatttgctgtgggaagtggagcacgactcatttctgtttgttactttgagtctgaaaatgactgagtgttttctgcctacattaaagaagtggatgaaaagccagccagcacgccctggggcagcaagatgccttttgggcagctgatgtcagagtttggtggcagtggcactggtggctgggtccacggggtaagcttctctgccagtgggagccgcctggcctgggtcagccacgacagcaccgtgtctgttgctgatgcctcaaaaagtgtgcaggtctcgactctgaagacagagttcctgccgctcctaagtgtgtcatttgtctcagagaacagcgtcgtggctgctggccatgactgctgcccaatgctctttaactacgatgaccgcggctgcctgaccttcgtctccaagttagatattccaaaacagagcatccaacgcaacatgtctgccatggaacgcttccgcaacatggacaagagagccacaactgaggaccgcaacacggccttggagacgctgcaccagaatagcatcactcaagtctctatttatgaggtggacaagcaagattgtcgcaaattttgcactactggcatcgatggagccatgacaatttgggatttcaagaccctcgagtcttccatccagggcctccggataatgtgaagctgagtgagcctccgccatccagcatgacaaactgtggccgaccgcagctgtgccgtggcacgatggcgaggaagccagccccaaggaaacactgaaaacacatatcacgccaatgccgtgtggttttgtttgaatataaaattggtgaaagtgttggtttttttaaggcagtaatttttttgtttgtttttttgcgatttcattccattcttgaccaaagcttctctttaagtagtttattatggaaaattgtcacactaacttaaaagacagggtgagggagatatgtaaattgtccactagaaaattaaataaaagaactgaatgtg

SEQ ID NO: 296650 - DNA, 982 bp, Homo sapiens
  misc_feature (24)..(24): n is a, c, g, or t
  misc_feature (27)..(27): n is a, c, g, or t
  misc_feature (29)..(29): n is a, c, g, or t
  misc_feature (31)..(31): n is a, c, g, or t
  misc_feature (34)..(34): n is a, c, g, or t
  misc_feature (36)..(36): n is a, c, g, or t
ccgttgcgtgactgactctcttanttncnancgntncagtgttttctgcctacattaaagaagtggatgaaaagccagccagcacgccctggggcagcaagatgccttttgggcagctgatgtcagagtttggtggcagtggcactggtggctgggtccacggggtaagcttctctgccagtgggagccgcctggcctgggtcagccacgacagcaccgtgtctgttgctgatgcctcaaaaagtgtgcaggtctcgactctgaagacagagttcctgccgctcctaagtgtgtcatttgtctcagagaacagcgtcgtggctgctggccatgactgctgcccaatgctctttaactacgatgaccgcggctgcctgaccttcgtctccaagttagatattccaaaacagagcatccaacgcaacatgtctgccatggaacgcttccgcaacatggacaagagagccacaactgaggaccgcaacacggccttggagacgctgcaccagaatagcatcactcaagtctctatttatgaggtggacaagcaagattgtcgcaaattttgcactactggcatcgatggagccatgacaatttgggatttcaagaccctcgagtcttccatccagggcctccggataatgtgaagctgagtgagcctccgccatccagcatgacaaactgtggccgaccgcagctgtgccgtggcacgatggcgaggaagccagccccaaggaaacactgaaaacacatatcacgccaatgccgtgtggttttgtttgaatataaaattggtgaaagtgttggtttttttaaggcagtaatttttttgtttgtttttttgcgatttcattccattcttgaccaaagcttctctttaagtagtttattatggaaaattgtcacactaacttaaaagacagggtgagggagatatgtaaattgtccactagaaaattaaataaaagaactgaatgtg

SEQ ID NO: 296651 - DNA, 1391 bp, Homo sapiens
ttccgggatctgtcagccgctccctctgggcttccgtcctccgcccgcgcccgacggagcctgttcgcgtcgactgcccagagtccgcgaatcctccgctccgagcccgtccggactcccccgatcccagctttctctcctttgaaaacactaagaataatgtcactgcatcagtttttactagagccaatcacctgtcatgcctggaacagggatcgtactcagattgccctcagtcccaataatcacgaagtgcacatctataagaagaacgggagccagtgggtgaaagctcatgaactcaaggagcacaacggacacatcacaggtattgactgggctcccaagagcgaccgcattgtcacttgtggggcagaccgcaatgcctatgtctggagtcagaaagatggtgtttggaagccaaccctggtgatcctgagaattaatcgcgcagctacttttgtgaagtggtcccccctagagaacaaatttgctgtgggaagtggagcacgactcatttctgtttgttactttgagtctgaaaatgactggtgggtgagcaagcacattaaaaagccgattcgctccacagtcctcagcttggattggcatcccaacaacgttttgctggcagcaggatcatgtgacttcaaatgcagggtctcgactctgaagacagagttcctgccgctcctaagtgtgtcatttgtctcagagaacagcgtcgtggctgctggccatgactgctgcccaatgctctttaactacgatgaccgcggctgcctgaccttcgtctccaagttagatattccaaaacagagcatccaacgcaacatgtctgccatggaacgcttccgcaacatggacaagagagccacaactgaggaccgcaacacggccttggagacgctgcaccagaatagcatcactcaagtctctatttatgaggtggacaagcaagattgtcgcaaattttgcactactggcatcgatggagccatgacaatttgggatttcaagaccctcgagtcttccatccagggcctccggataatgtgaagctgagtgagcctccgccatccagcatgacaaactgtggccgaccgcagctgtgccgtggcacgatggcgaggaagccagccccaaggaaacactgaaaacacatatcacgccaatgccgtgtggttttgtttgaatataaaattggtgaaagtgttggtttttttaaggcagtaatttttttgtttgtttttttgcgatttcattccattcttgaccaaagcttctctttaagtagtttattatggaaaattgtcacactaacttaaaagacagggtgagggagatatgtaaattgtccactagaaaattaaataaaagaactgaatgtg

SEQ ID NO: 296652 - DNA, 1548 bp, Homo sapiens
  misc_feature (1181)..(1181): n is a, c, g, or t
ttccgggatctgtcagccgctccctctgggcttccgtcctccgcccgcgcccgacggagcctgttcgcgtcgactgcccagagtccgcgaatcctccgctccgagcccgtccggactcccccgatcccagctttctctcctttgaaaacactaagaataatgtcactgcatcagtttttactagagccaatcacctgtcatgcctggaacagggatcgtactcagattgccctcagtcccaataatcacgaagtgcacatctataagaagaacgggagccagtgggtgaaagctcatgaactcaaggagcacaacggacacatcacaggtattgactgggctcccaagagcgaccgcattgtcacttgtggggcagaccgcaatgcctatgtctggagtcagaaagatggtgtttggaagccaaccctggtgatcctgagaattaatcgcgcagctacttttgtgaagtggtcccccctagagaacaaatttgctgtgggaagtggagcacgactcatttctgtttgttactttgagtctgaaaatgactggtgggtgagcaagcacattaaaaagccgattcgctccacagtcctcagcttggattggcatcccaacaacgttttgctggcagcaggatcatgtgacttcaaatgcagagtgttttctgcctacattaaagaagtggatgaaaagccagccagcacgccctggggcagcaagatgccttttgggcagctgatgtcagagtttggtggcagtggcactggtggctgggtccacggggtaagcttctctgccagtgggagccgcctggcctgggtcagccacgacagcaccgtgtctgttgctgatgcctcaaaaagtgtgcagtgagtatttgcctttcatttggaaggtggggaacaaggggtgggatctctcaccagctgaaccaggactgcccttcctggggtgttagcacagggcacaaacataaaaaccttaatcaggccaggcgtggtggctcacgcctgtaatcccagcactttgggaggccgaggtgggtggatcacaaggtcagcagttcaagaccagcctggccaagatggtgaaaccctgtctctactaaaaataaaaaaaattatccaggtgtggtggtaggcgcctgtactcccagctactcggaaaaaaaaaaaaanaaaaaaaaaaaaaaaaaaaaaaaaaaaaaaaaaaaaaaaaaagggggggggcgaaaaaaattcccccggggggccccaagtagttacacagtaataccggttgttttgtcgacaaagggggcgccccatataggggggatgataaattagagagaggcgcggggccggagttaaaaaaaacggcggcaacggagagaacctcttcgctcctggggcaatctttggagaaaaaccaccaatattctcgggcggggggcgacattttcgcgacactcccaagaagaattaacggcccggggaatatatactttagggtggtagtggggaccaaacacaaatattcgccggaaaaaattcgtctaagttt

SEQ ID NO: 296653 - DNA, 872 bp, Homo sapiens
ccagtgggagccgcctggcagagaagcttaccccggtggagccagccaccagtgccactggtctctgccagtgggagccgcctggcctgggtcagccacgacagcaccgtgtctgttgctgatgcctcaaaaagtgtgcaggtctcgactctgaagacagagttcctgccgctcctaagtgtgtcatttgtctcagagaacagcgtcgtggctgctggccatgactgctgcccaatgctctttaactacgatgaccgcggctgcctgaccttcgtctccaagttagatattccaaaacagagcatccaacgcaacatgtctgccatggaacgcttccgcaacatggacaagagagccacaactgaggaccgcaacacggccttggagacgctgcaccagaatagcatcactcaagtctctatttatgaggtggacaagcaagattgtcgcaaattttgcactactggcatcgatggagccatgacaatttgggatttcaagaccctcgagtcttccatccagggcctccggataatgtgaagctgagtgagcctccgccatccagcatgacaaactgtggccgaccgcagctgtgccgtggcacgatggcgaggaagccagccccaaggaaacactgaaaacacatatcacgccaatgccgtgtggttttgtttgaatataaaattggtgaaagtgttggtttttttaaggcagtaatttttttgtttgtttttttgcgatttcattccattcttgaccaaagcttctctttaagtagtttattatggaaaattgtcacactaacttaaaagacagggtgagggagatatgtaaattgtccactagaaaattaaataaaagaactgaatgtg

SEQ ID NO: 296654 - DNA, 884 bp, Homo sapiens
gcttagaattcgacggtttctcaaagtgtggtccttggtactggtccatgaattggttgctaccagtcaatgaagagataaattacttgcatcagagtgtaaatcaatacattgctttagctattaataaaattttgctaaaaaatcaaatcctgtcattgacctaaaaagtatctctagatttaaattcttgtgcatgcttatcttgcctgtggataagtaacagttggccatgactgctgcccaatgctctttaactacgatgaccgcggctgcctgaccttcgtctccaagttagatattccaaaacagagcatccaacgcaacatgtctgccatggaacgcttccgcaacatggacaagagagccacaactgaggaccgcaacacggccttggagacgctgcaccagaatagcatcactcaagtctctatttatgaggtggacaagcaagattgtcgcaaattttgcactactggcatcgatggagccatgacaatttgggatttcaagaccctcgagtcttccatccagggcctccggataatgtgaagctgagtgagcctccgccatccagcatgacaaactgtggccgaccgcagctgtgccgtggcacgatggcgaggaagccagccccaaggaaacactgaaaacacatatcacgccaatgccgtgtggttttgtttgaatataaaattggtgaaagtgttggtttttttaaggcagtaatttttttgtttgtttttttgcgatttcattccattcttgaccaaagcttctctttaagtagtttattatggaaaattgtcacactaacttaaaagacagggtgagggagatatgtaaattgtccactagaaaattaaataaaagaactgaatgtg

SEQ ID NO: 296655 - DNA, 845 bp, Homo sapiens
  misc_feature (794)..(794): n is a, c, g, or t
  misc_feature (796)..(796): n is a, c, g, or t
  misc_feature (804)..(804): n is a, c, g, or t
  misc_feature (808)..(808): n is a, c, g, or t
  misc_feature (810)..(810): n is a, c, g, or t
ttccgggatctgtcagccgctccctctgggcttccgtcctccgcccgcgcccgacggagcctgttcgcgtcgactgcccagagtccgcgaatcctccgctccgagcccgtccggactcccccgatcccagctttctctcctttgaaaacactaagaataatgtcactgcatcagtttttactagagccaatcacctgtcatgcctggaacagggatcgtactcagattgccctcagtcccaataatcacgaagtgcacatctataagaagaacgggagccagtgggtgaaagctcatgaactcaaggagcacaacggacacatcacaggtattgactgggctcccaagagcgaccgcattgtcacttgtggggcagaccgcaatgcctatgtctggagtcagaaagatggtgtttggaagccaaccctggtgatcctgagaattaatcgcgcagctacttttgtgaagtggtcccccctagagaacaaatttgctgtgggaagtggagcacgactcatttctgtttgttactttgagtctgaaaatgactggtgggtgagcaagcacattaaaaagccgattcgctccacagtcctcagcttggattggcatcccaacaacgttttgctggcagcaggatcatgtgacttcaaatgcagagtgttttctgcctacattaaagaagtggatgaaaagccagccagcacgccctggggcagcaagatgccttttgggcagctgatgtcagagtttggtggcagtggcactggtggctgggtccacggggtaagctnanctctcgcngggnancgctgctggtcaccgaacccgttggggacccaagg

SEQ ID NO: 296656 - DNA, 797 bp, Homo sapiens
ttccgggatctgtcagccgctccctctgggcttccgtcctccgcccgcgcccgacggagcctgttcgcgtcgactgcccagagtccgcgaatcctccgctccgagcccgtccggactcccccgatcccagctttctctcctttgaaaacactaagaataatgtcactgcatcagtttttactagagccaatcacctgtcatgcctggaacagggatcgtactcagattgccctcagtcccaataatcacgaagtgcacatctataagaagaacgggagccagtgggtgaaagctcatgaactcaaggagcacaacggacacatcacaggtattgactgggctcccaagagcgaccgcattgtcacttgtggggcagaccgcaatgcctatgtctggagtcagaaagatggtgtttggaagccaaccctggtgatcctgagaattaatcgcgcagctacttttgtgaactgagtgagcctccgccatccagcatgacaaactgtggccgaccgcagctgtgccgtggcacgatggcgaggaagccagccccaaggaaacactgaaaacacatatcacgccaatgccgtgtggttttgtttgaatataaaattggtgaaagtgttggtttttttaaggcagtaatttttttgtttgtttttttgcgatttcattccattcttgaccaaagcttctctttaagtagtttattatggaaaattgtcacactaacttaaaagacagggtgagggagatatgtaaattgtccactagaaaattaaataaaagaactgaatgtg

SEQ ID NO: 296657 - DNA, 444 bp, Homo sapiens
cggcacctcgctattcatcggcacctcgctattcatcggcaccgatggagccatgacaatttgggatttcaagaccctcgagtcttccatccagggcctccggataatgtgaagctgagtgagcctccgccatccagcatgacaaactgtggccgaccgcagctgtgccgtggcacgatggcgaggaagccagccccaaggaaacactgaaaacacatatcacgccaatgccgtgtggttttgtttgaatataaaattggtgaaagtgttggtttttttaaggcagtaatttttttgtttgtttttttgcgatttcattccattcttgaccaaagcttctctttaagtagtttattatggaaaattgtcacactaacttaaaagacagggtgagggagatatgtaaattgtccactagaaaattaaataaaagaactgaatgtg

SEQ ID NO: 296658 - DNA, 489 bp, Homo sapiens
ttccgggatctgtcagccgctccctctgggcttccgtcctccgcccgcgcccgacggagcctgttcgcgtcgactgcccagagtccgcgaatcctccgctccgagcccgtccggactcccccgatcccagctttctctcctttgaaaacactaagaataatgtcactgcatcagtttttactagagccaaactgtggccgaccgcagctgtgccgtggcacgatggcgaggaagccagccccaaggaaacactgaaaacacatatcacgccaatgccgtgtggttttgtttgaatataaaattggtgaaagtgttggtttttttaaggcagtaatttttttgtttgtttttttgcgatttcattccattcttgaccaaagcttctctttaagtagtttattatggaaaattgtcacactaacttaaaagacagggtgagggagatatgtaaattgtccactagaaaattaaataaaagaactgaatgtg

SEQ ID NO: 296659 - DNA, 761 bp, Homo sapiens
ttccgggatctgtcagccgctccctctgggcttccgtcctccgcccgcgcccgacggagcctgttcgcgtcgactgcccagagtccgcgaatcctccgctccgagcccgtccggactcccccgatcccagctttctctcctttgaaaacactaagaataatgtcactgcatcagtttttactagagccaatcacctgtcatgcctggaacagggatcgtactcagattgccctcagtcccaataatcacgaagtgcacatctataagaagaacgggagccagtgggtgaaagctcatgaactcaaggagcacaacggacacatcacagggtaaggaagactttccagaatattgagaagaacaaagtaatataataaacacccatatcagataatcgccaccagaattaccaactttttccctgtgccaggaagtaatttcttttcctgtatcaggaaacttaaggaaaaaggatgtaataataaggaatattattcttgatgatggtaaagtcacctctcaccagcagtcctattcctctcccctggaaggcagactataatttgctatgacaccattccagtccatttttaatacatttacatacatacatattcataaacaagcttaggccaagcacagtggcttacacctgtaatcccagcactttgggaggctgaggcgggaggatcgcttgaacccaggaatccaagactagcctgggcaacataatgagaccccccgttagcacggtgtggtgg

SEQ ID NO: 296660 - DNA, 549 bp, Homo sapiens
tattgcacaggtgaatgaaactgtcaaacatttttaccctgatctaaagttattttagctaagtacactaacattgtttatttttcgctggttagaatcattaattgacagttgtacgtgtctctgggaaaatgaattttaatcttagttttcctgtaaagcattataaaatacagggtccaagtaaaggttaaaaaaaaaatggaattattcagaggtgaatttgggaactactttttcaaaagtttttcttttccttactatagtctgcttttaaaacaactgtgacatgtcccctttttggtgacaattgcaagttcaggtgttaactgttgtttgacttgtgtctccagagattgccctcagtcccaataatcacgaagtgcacatctataagaagaacgggagccagtgggtgaaagctcatgaactcaaggagcacaacggacacatcacagggtaaaggaagatagccgtgagcttagtgtgatatttccaaatcaggcactcttccttttagataaagagcctaataaacccaggtggcca

SEQ ID NO: 296661 - DNA, 345 bp, Homo sapiens
gggtttctccatgttggtcaggctggtctcgaactcccgacctcaggtgatccacccacctaggcctcccaaagtgctaggattacaggcttgagccaccgtgcccagctcatgttttatttttttttaatgagtcaacctctttgcattctgagattccttgtggcagctgcctatggcctgtttctatatacatatattttcatttgctttttccttttctctctgccctttaaacaagtgttttctgcctacattaaagaagtggatgaaaagccagccagcacgccctggggcagcaagatgccttttgggcagctgatgtcagagtttggtggcagtggc

SEQ ID NO: 296662 - DNA, 761 bp, Homo sapiens
aggatacaggaaatacggtaagagcgaaacaggaggaagccagctctgtgcctggaggggactcgccgccatctcaggtctcttggctttgccagggcccaccggagaaaactgacgacccgtttctgtaatccttatgggagaccaaccttgtgcctccgggagatccactctcccacctggaaacgcacgggaagccaagcctccaaaaaagcgctgcctcctcgctccgcgttgggattatccggaaggaactcccaacggaggtagtaccactctaccctccgcacctcctcctgcatcagccggcctgaagtcgcaccctcctcctccggagaagtagagaaataaatttctcccaccctaaaccagtctttgagtgattgcagtatgactccatttccctggtgcattcatataatagttcacctggtgaaaacaatgaagattatttacaatgctaccctgctttttctggtgtcctgaacctggaagttgtgctttttaagtcttatgatgtaatcagcacgatttcacttcctgaatttcgatgaattctaagacatgggcaagatcgggttgtaagacctctgagatttaaggccatgccctggatcatggtgaacttaccaaagcaaacaatgcctgtgagatggtcctgcagcagccaaccagtgaactcttttggtgacatcctgttcttgttgtataactttatattcctataaatccattaaggccccaataaagtttgtctctaa

SEQ ID NO: 296663 - DNA, 748 bp, Homo sapiens
cggacgcgtgggtcgacccacgcgtcccagctctgtgcctggaggggactcgccgccatctcaggtctcttggctttgccagggcccaccggagaaaactgacgacccgtttctgtaatccttatgggagaccaaccttgtgcctccgggagatccactctcccacctggaaacgcacgggaagccaagcctccaaaaaagcgctgcctcctcgctccgcgttgggattatccggaaggaactcccaacggaggtagtaccactctaccctccgcacctcctcctgcatcagccggcctgaagtcgcaccctcctcctccggagaagtagagaaataaatttctcccaccctaaaccagtctttgagtgattgcagtatgactccatttccctggtgcattcatataatagttcacctggtgaaaacaatgaagattatttacaatgctaccctgctttttctggtgtcctgaacctggaagttgtgctttttaagtcttatgatgtaatcagcacgatttcacttcctgaatttcgatgaattctaagacatgggcaagatcgggttgtaagacctctgagatttaaggccatgccctggatcatggtgaacttaccaaagcaaacaatgcctgtgagatggtcctgcagcagccaaccagtgaactcttttggtgacatcctgttcttgttgtataactttatattcctataaatccattaaggccccaataaagtttgtctctaa

SEQ ID NO: 296664 - DNA, 1625 bp, Homo sapiens
aggatacaggaaatacggtaagagcgaaacaggaggaagccagctctgtgcctggaggggactcgccgccatctcaggtctcttggctttgccagggcccaccggagaaaactgacgacccgtttctgtaatccttatgggagaccaaccttgtgcctccgggagatccactctcccacctggaaacgcacgggaagccaagcctccaaaaaagcgctgcctcctcgctccgcgttgggattatccggaaggaactcccaacggaggtagtaccactctaccctccgcacctcctcctgcatcagccggcctgaagtcgcaccctcctcctccggagaagtagagaaataaatttctcccaccctaaaccagtctttgagtgattgcagtatgactccatttccctggtgcattcatataatagttcacctggtgaaaacaatgaagattatttacaatgctaccctgctttttctggtgtcctgaacctggaagttgtgctttttaagtcttatgatgtaatcagcacgatttcacttcctgaatttcgatgaattctaagacatgggcaagatcgggttgtaagacctctgagatttaaggccatgccctggatcatggtgaacttaccaaagcaaacaatgcctgtgagatggtcctgcagcagccaaccagtgaactcttttggtgacatcctgttcttgttgtataactttatattcctataaatccattaaggccccaataaagtttgtctctaagcgctgtgttagatctatatgactacatctagtaaattgtgaattttaagtaaatattttataagaactcctatgtaaagcattactaaaattagtgttgaaatatgaccttcttcctacatttattcatttatttatgtctatttattcatttattttagtgaaaaatataaggaaagtagaggaaggttaaatccaaaaaagaattgtttccagtacactttctttaatttgctgtcagtttttgcatggaatctacatctttttatgctaatcctcatcctagtattttacatcttaactatttttttctgactgaaatggttgatgtgcttgttttttgtaattttctactttccttctaaaatgcttagtattgaacaaatagaatatcctaattaaaaacagtaataaatattatggtgaaaaaatacaagtaaaatgggaaaacattagatagcagctttcaatatttcatatagttcataaatgtttcaggaattacaaggttatagaaaaaaatttatagactataataatttccagggatataaaaaaataaagcttctacctttgaattgtaataataaaagataaacagacttgaaagcatatattatatctgaaaatgtcaggtaaacttggcttataaattaaaatataaaataataatacaatttgttcaaataagtaattaaagcttacattgtaaaatgaatatttagagagattgtgaaacctgagtattttacccaatcctctgaaattagtccctagcatcagaattaaagaatctgaaaatcacaaatggaggtatggtgacatttatgtatattctagagttatgttatgcacacttaataa

SEQ ID NO: 296665 - DNA, 1549 bp, Homo sapiens
cggacgcgtgggtcgacccacgcgtccggagaaaactgacgacccgtttctgtaatccttatgggagaccaaccttgtgcctccgggagatccactctcccacctggaaacgcacgggaagccaagcctccaaaaaagcgctgcctcctcgctccgcgttgggattatccggaaggaactcccaacggaggtagtaccactctaccctccgcacctcctcctgcatcagccggcctgaagtcgcaccctcctcctccggagaagtagagaaataaatttctcccaccctaaaccagtctttgagtgattgcagtatgactccatttccctggtgcattcatataatagttcacctggtgaaaacaatgaagattatttacaatgctaccctgctttttctggtgtcctgaacctggaagttgtgctttttaagtcttatgatgtaatcagcacgatttcacttcctgaatttcgatgaattctaagacatgggcaagatcgggttgtaagacctctgagatttaaggccatgccctggatcatggtgaacttaccaaagcaaacaatgcctgtgagatggtcctgcagcagccaaccagtgaactcttttggtgacatcctgttcttgttgtataactttatattcctataaatccattaaggccccaataaagtttgtctctaagcgctgtgttagatctatatgactacatctagtaaattgtgaattttaagtaaatattttataagaactcctatgtaaagcattactaaaattagtgttgaaatatgaccttcttcctacatttattcatttatttatgtctatttattcatttattttagtgaaaaatataaggaaagtagaggaaggttaaatccaaaaaagaattgtttccagtacactttctttaatttgctgtcagtttttgcatggaatctacatctttttatgctaatcctcatcctagtattttacatcttaactatttttttctgactgaaatggttgatgtgcttgttttttgtaattttctactttccttctaaaatgcttagtattgaacaaatagaatatcctaattaaaaacagtaataaatattatggtgaaaaaatacaagtaaaatgggaaaacattagatagcagctttcaatatttcatatagttcataaatgtttcaggaattacaaggttatagaaaaaaatttatagactataataatttccagggatataaaaaaataaagcttctacctttgaattgtaataataaaagataaacagacttgaaagcatatattatatctgaaaatgtcaggtaaacttggcttataaattaaaatataaaataataatacaatttgttcaaataagtaattaaagcttacattgtaaaatgaatatttagagagattgtgaaacctgagtattttacccaatcctctgaaattagtccctagcatcagaattaaagaatctgaaaatcacaaatggaggtatggtgacatttatgtatattctagagttatgttatgcacacttaataa

SEQ ID NO: 296666 - DNA, 412 bp, Homo sapiens
cctggaccggaactcccggggagtctttgagtgattgcagtatgactccatttccctggtgcattcatataatagttcacctggtgaaaacaatgaagattatttacaatgctaccctgctttttctggtgtcctgaacctggaagttgtgctttttaagtcttatgatgtaatcagcacgatttcacttcctgaatttcgatgaattctaagacatgggcaagatcgggttgtaagacctctgagatttaaggccatgccctggatcatggtgaacttaccaaagcaaacaatgcctgtgagatggtcctgcagcagccaaccagtgaactcttttggtgacatcctgttcttgttgtataactttatattcctataaatccattaaggccccaataaagtttgtctctaa

SEQ ID NO: 296667 - DNA, 1169 bp, Homo sapiens
  misc_feature (38)..(38): n is a, c, g, or t
gccactctgctcccactcctcgccacttcgacgaaaancatccgcgaccttagtcttatgatgtaatcagcacgatttcacttcctgaatttcgatgaattctaagacatgggcaagatcgggttgtaagacctctgagatttaaggccatgccctggatcatggtgaacttaccaaagcaaacaatgcctgtgagatggtcctgcagcagccaaccagtgaactcttttggtgacatcctgttcttgttgtataactttatattcctataaatccattaaggccccaataaagtttgtctctaagcgctgtgttagatctatatgactacatctagtaaattgtgaattttaagtaaatattttataagaactcctatgtaaagcattactaaaattagtgttgaaatatgaccttcttcctacatttattcatttatttatgtctatttattcatttattttagtgaaaaatataaggaaagtagaggaaggttaaatccaaaaaagaattgtttccagtacactttctttaatttgctgtcagtttttgcatggaatctacatctttttatgctaatcctcatcctagtattttacatcttaactatttttttctgactgaaatggttgatgtgcttgttttttgtaattttctactttccttctaaaatgcttagtattgaacaaatagaatatcctaattaaaaacagtaataaatattatggtgaaaaaatacaagtaaaatgggaaaacattagatagcagctttcaatatttcatatagttcataaatgtttcaggaattacaaggttatagaaaaaaatttatagactataataatttccagggatataaaaaaataaagcttctacctttgaattgtaataataaaagataaacagacttgaaagcatatattatatctgaaaatgtcaggtaaacttggcttataaattaaaatataaaataataatacaatttgttcaaataagtaattaaagcttacattgtaaaatgaatatttagagagattgtgaaacctgagtattttacccaatcctctgaaattagtccctagcatcagaattaaagaatctgaaaatcacaaatggaggtatggtgacatttatgtatattctagagttatgttatgcacacttaataa

SEQ ID NO: 296668 - DNA, 305 bp, Homo sapiens
  misc_feature (38)..(38): n is a, c, g, or t
gccactctgctcccactcctcgccacttcgacgaaaancatccgcgaccttagtcttatgatgtaatcagcacgatttcacttcctgaatttcgatgaattctaagacatgggcaagatcgggttgtaagacctctgagatttaaggccatgccctggatcatggtgaacttaccaaagcaaacaatgcctgtgagatggtcctgcagcagccaaccagtgaactcttttggtgacatcctgttcttgttgtataactttatattcctataaatccattaaggccccaataaagtttgtctctaa

SEQ ID NO: 296669 - DNA, 448 bp, Homo sapiens
aaagatcatctagcaaagccttttttcccagctacatataaggaatttgaaagtcacataaaatggttaagaaaatgtgccaagattacctcagtaattctggtctgtgttctcaggagaccctggaaataaacaatgaaaaacgttgacctcttggcgagaatgcaaagaagggaacgcttgcttatacactgttggtgaactgtcacccctacaactcagcttgcaaccagccctggccaccagtttccccacactgagctgaatatcggacatgcccatcttagacattccagcccattctgaaattccacatcgattcacctgacaaagtctgaagttccagggcaatttatctggaaaagcttacctggaatcacgtgtcatttcaaccaacaactgttgaagaggacgtggcattaaaaccaagggtatcaattatttataa

SEQ ID NO: 296670 - DNA, 391 bp, Homo sapiens
gagaagcactgctgcctatgcactccatttacagggttatagagtggaaagtcccacaatctttttcttctctattttcagaaaaacgttgacctcttggcgagaatgcaaagaagggaacgcttgcttatacactgttggtgaactgtcacccctacaactcagcttgcaaccagccctggccaccagtttccccacactgagctgaatatcggacatgcccatcttagacattccagcccattctgaaattccacatcgattcacctgacaaagtctgaagttccagggcaatttatctggaaaagcttacctggaatcacgtgtcatttcaaccaacaactgttgaagaggacgtggcattaaaaccaagggtatcaattatttataa

SEQ ID NO: 296671 - DNA, 607 bp, Homo sapiens
tgatttggccgacggtcatctgccagattctgatgatgattcagaactcagtgtggaagaacatcagagggagaggcaggcgctctttgacttatcaagctgctccctgaggcccaaaagcttcaagtgtcagacttgtaaaaagtcatatatagggaagtggggactggcccagcattttaaacttaatccaggccatggccagctggaccctgagatggtgctatctgagaaagccaatgggagcaccctccgtgggtgcacagaggaaaggacgctcagcctgaccttcccggggctgtccgtgccagcgctccgcgtgagggaggggcccgctcctgcttggtgagagagtcagcacgcggtggcctgggtaatgtttgcatctgggtgtcgttttcggccattctcacactgttataaagaaatacttgagaccagtctcactctgtcgcccaggctggagtacagtggagcagtctgagaatcacttgaacccaggaggcagaggttgcagggaacagatatcgtgccactgcactccagcctggatgactgagcaagactccatctcaaaaacaaaaacaaaaacaaatacaaaaaaaaa

SEQ ID NO: 296672 - DNA, 362 bp, Homo sapiens
cggcacgagggatgttggagcggccgcaaatgtttttcttctctattttcagaaaaacgttgacctcttggcgagaatgcaaagaagggaacgcttgcttatacactgttggtgaactgtcacccctacaactcagcttgcaaccagccctggccaccagtttccccacactgagctgaatatcggacatgcccatcttagacattccagcccattctgaaattccacatcgattcacctgacaaagtctgaagttccagggcaatttatctggaaaagcttacctggaatcacgtgtcatttcaaccaacaactgttgaagaggacgtggcattaaaaccaagggtatcaattatttataa

SEQ ID NO: 296673 - DNA, 480 bp, Homo sapiens
aaaaagggggaaggtgggaggggatgagggtggaaaaattacctatctggtattatgttcactgtttgggggttagaaggccaatccccaccgctaggcaatatatccacgtaacaaacctgcacccttatgccctgaatctatttgtttttcaacattgacttccatggtcactatttgtgaaatcactcctcatgaaccaggacttgcatgtttttttgtttctcaggtgaactgtcacccctacaactcagcttgcaaccagccctggccaccagtttccccacactgagctgaatatcggacatgcccatcttagacattccagcccattctgaaattccacatcgattcacctgacaaagtctgaagttccagggcaatttatctggaaaagcttacctggaatcacgtgtcatttcaaccaacaactgttgaagaggacgtggcattaaaaccaagggtatcaattatttataa

SEQ ID NO: 296674 - DNA, 592 bp, Homo sapiens
cgcgactctcgtacacgacgtattgcaccagaacagagtagaccttgtggaatgactcagtcaggactcactgcaatacggaagagtaggagcttaacttcatcgaaacaaaaggctggggagtttttaagtgccggggtgagatgctgagaaggaactggagacatcaggaagaggttaggaaatgccgtagagctatctgcgttggctcattggaatttttcaaaactgggaatctgcccttctacaaaaactgagacacagatgtatcatctccttcaataattgcattttaaagggatggctctgaagtcttgagaaaggcattcctgggttgcaaaactaggaggaggctagaagaaaatttgggagaagatttgcctctcaaagaggtagagaaagaactcacaattgcaagtttcctaaaataaatcctccgtgaaaaaaggaggcctgatggatggaactggaggtcattatgttgagtgaaataagccaggcacagaagaaaaatactgcatgttctcactcacatgtgggagcttaaaacctggatctcatgaagattgagagtaaattggtagctaccaga

SEQ ID NO: 296675 - DNA, 465 bp, Homo sapiens
tgcggtccgagccacactccctctgaaggccagcattttaaacttaatccaggccatggccagctggaccctgagatggtgctatctgagaaagccaatgggagcaccctccgtgggtgcacagaggaaaggacgctcagcctgaccttcccggggctgtccgtgccagcgctccgcgtgagggaggggcccgctcctgcttggtgagagagtcagcacgcggtggcctgggtaatgtttgcatctgggtgtcgttttcggccattctcacactgttataaagaaatacttgagaccagtctcactctgtcgcccaggctggagtacagtggagcagtctgagaatcacttgaacccaggaggcagaggttgcagggaacagatatcgtgccactgcactccagcctggatgactgagcaagactccatctcaaaaacaaaaacaaaaacaaatacaaaaaaaaa

SEQ ID NO: 296676 - DNA, 739 bp, Homo sapiens
gatgcaaacggccacacagtcatggattcacaatgatctgggtctccatcatcctgcaatccaacaccttgcacagccttcaaacaccagctgggaattcaaaagtggcatgtgcggtagcaggagatctgttcaccctcttatttcctctcatccccatgtagcaatctggtgcaatcacagctcacagcaacctcaaactcctggactcaagtgatcctacctcctcagcctccctagtagctgggactacaggtgtgtgccaccctgccagactgatttttgtagaaacagagtcccactaggttgcccaggctagtctcgaacttctgggctcaagcaatcctcccgccttgcaaatacagagtttgataaaagacctcctgaggtcctacagagagaagtctttaagctccagggcagagacaatttgcatttttctcaccacccagggaatgctaactgggcagcccagggtacccgggagctcaggccatccagtgtcctttgagatgttaggaggaagcagaacagccagctgccaaatgaaacacggcaaaatgctcacccttcaagggtctgcttttgttttgtttttgttttttgagacagtctcactctgtcgcccaggctggagtgcgctggtacaattttggctcactgcaaccaccacctattggattcaagcaattctcctacctcagccttccaagtagctgggactacaggcacgcaccac

SEQ ID NO: 296677 - DNA, 953 bp, Homo sapiens
aggatacaggaaatacggtaagagcgaaacaggaggaagccagctctgtgcctggaggggactcgccgccatctcaggtctcttggctttgccagggcccaccggagaaaactgacgacccgtttctgtaatccttatgggagaccaaccttgtgcctccgggagatccactctcccacctggaaacgcacgggaagccaagcctccaaaaaagcgctgcctcctcgctccgcgttgggattatccggaaggaactcccaacggaggtagtaccactctaccctccgcacctcctcctgcatcagccggcctgaagtcgcaccctcctcctccggagaagtagagaaataaatttctcccaccctaaaccagtctttgagtgattgcagtatgactccatttccctggtgcattcatataatagttcacctggtgaaaacaatgaagattatttacaatgctaccctgctttttctggtgtcctgaacctggaagttgtgctttttaagtcttatgatgtaatcagcacgatttcacttcctgaatttcgatgaattctaagacatgggcaagatcgggttgtaagacctctgagatttaaggccatgccctggatcatggtgaacttaccaaagcaaacaatgcctgtgagatggtcctgcagcagccaaccagtgaactcttttggtgacatcctgttcttgttgtataactttatattcctataaatccattaaggccccaataaagtttgtctctaaaaaaaaaaaaaaaaaaaaaaaaaaaaaacttgtgtgggggcggctggggcccgagaaaaagtttttaaacccattcggttgtgggggcgcggggcgccccatagggttagtggaacccgttggcccaaaaggggtttcccaggaggaaaaaccgggggccagaaacaggtggggtggggttttctcccccaa

SEQ ID NO: 296678 - DNA, 1693 bp, Homo sapiens
cggacgcgtgggtcgacccacgcgtcccagctctgtgcctggaggggactcgccgccatctcaggtctcttggctttgccagggcccaccggagaaaactgacgacccgtttctgtaatccttatgggagaccaaccttgtgcctccgggagatccactctcccacctggaaacgcacgggaagccaagcctccaaaaaagcgctgcctcctcgctccgcgttgggattatccggaaggaactcccaacggaggtagtaccactctaccctccgcacctcctcctgcatcagccggcctgaagtcgcaccctcctcctccggagaagtagagaaataaatttctcccaccctaaaccagtctttgagtgattgcagtatgactccatttccctggtgcattcatataatagttcacctggtgaaaacaatgaagattatttacaatgctaccctgctttttctggtgtcctgaacctggaagttgtgctttttaaggaaagcaactagaagccatttgtgtcaaggtaacgtctggagaaacaaaaggtcaggaatgaccaacgtccctactggccacagtccagccccaatctgcaagacagagccagccgccccgggggaattcccgcctggtgggactccacgtcaccagcccccagctgctcagggtacagcccctcgtgagaactgagccacagtcatgtttcctacatcagcctcctgctcaggggtttgtacagagaccactgccagccctctaggtggtccctgcaaagagagtcccagcccccaaggctccaaatggacagggcaccatgttgaccccttcgtcggcctccagttcgccgactgtaacatgtttcatccagttcaggacgtttatttatttccaacttgcatacaaaacatactgagaaactaaaaccatcgttaaaagtgaagacacgttgagacaggtatctcgacctgccaagtataaagctaaagctgagttcataaaaagggatgatttggccgacggtcatctgccagattctgatgatgattcagaagtcagtgtggaagaagatcagagggagaggcaggcgctctttgacttatcaagctgctccctgaggcccaaaagcttcaagtgtcagacttgtaaaaagtcatatatagggaagtggggactggcccagcattttaaacttaatccaggccatggccagctggaccctgagatggtgctatctgagaaagccaatgggagcaccctccgggggtgcacagaggaaaggacgctcagcctgaccttcccggggctgtccgtgccagcggctccgcgtgagggaggggcccgctcctgcttggtgagagagtcagcacgcagtggcctgcagaaaaacgttgacctcttggcgagaatgcaaagaagggaacgcttgcttatacactgttggtgaactgtcacccctacaactcagcttgcaaccagccctggccaccagtttccccacactgagctgaatatcggacatgcccatcttagacattccagcccattctgaaattccacatcgattcacctgacaaagtctgaagttccagggcaatttatctggaaaagcttacctggaatcacgtgtcatttcaaccaacaactgttgaagaggacgtggcattaaaaccaagggtatcaattatttataa

SEQ ID NO: 296679 - DNA, 1772 bp, Homo sapiens
cggacgcgtgggtcgacccacgcgtcccagctctgtgcctggaggggactcgccgccatctcaggtctcttggctttgccagggcccaccggagaaaactgacgacccgtttctgtaatccttatgggagaccaaccttgtgcctccgggagatccactctcccacctggaaacgcacgggaagccaagcctccaaaaaagcgctgcctcctcgctccgcgttgggattatccggaaggaactcccaacggaggtagtaccactctaccctccgcacctcctcctgcatcagccggcctgaagtcgcaccctcctcctccggagaagtagagaaataaatttctcccaccctaaaccagtctttgagtgattgcagtatgactccatttccctggtgcattcatataatagttcacctggtgaaaacaatgaagattatttacaatgctaccctgctttttctggtgtcctgaacctggaagttgtgctttttaaggtctgctggagttttgctggaggtccactccagaccctgtttgcctgggtatcactagcggaggctgcagaccagcaaagattgctgcctgttctttcctctggaacctttgtcccagagagacacctgccagatgccagccagagctcttctgtatgagtcttatgatgtaatcagcacgatttcacttcctgaatttcgatgaattctaagacatgggcaagatcgggttgtaagacctctgagatttaaggccatgccctggatcatggtgaacttaccaaagcaaacaatgcctgtgagatggtcctgcagcagccaaccagtgaactcttttggtgacatcctgttcttgttgtataactttatattcctataaatccattaaggccccaataaagtttgtctctaagcgctgtgttagatctatatgactacatctagtaaattgtgaattttaagtaaatattttataagaactcctatgtaaagcattactaaaattagtgttgaaatatgaccttcttcctacatttattcatttatttatgtctatttattcatttattttagtgaaaaatataaggaaagtagaggaaggttaaatccaaaaaagaattgtttccagtacactttctttaatttgctgtcagtttttgcatggaatctacatctttttatgctaatcctcatcctagtattttacatcttaactatttttttctgactgaaatggttgatgtgcttgttttttgtaattttctactttccttctaaaatgcttagtattgaacaaatagaatatcctaattaaaaacagtaataaatattatggtgaaaaaatacaagtaaaatgggaaaacattagatagcagctttcaatatttcatatagttcataaatgtttcaggaattacaaggttatagaaaaaaatttatagactataataatttccagggatataaaaaaataaagcttctacctttgaattgtaataataaaagataaacagacttgaaagcatatattatatctgaaaatgtcaggtaaacttggcttataaattaaaatataaaataataatacaatttgttcaaataagtaattaaagcttacattgtaaaatgaatatttagagagattgtgaaacctgagtattttacccaatcctctgaaattagtccctagcatcagaattaaagaatctgaaaatcacaaatggaggtatggtgacatttatgtatattctagagttatgttatgcacacttaataa

SEQ ID NO: 296680 - DNA, 1784 bp, Homo sapiens
cggacgcgtgggtcgacccacgcgtcccagctctgtgcctggaggggactcgccgccatctcaggtctcttggctttgccagggcccaccggagaaaactgacgacccgtttctgtaatccttatgggagaccaaccttgtgcctccgggagatccactctcccacctggaaacgcacgggaagccaagcctccaaaaaagcgctgcctcctcgctccgcgttgggattatccggaaggaactcccaacggaggtagtaccactctaccctccgcacctcctcctgcatcagccggcctgaagtcgcaccctcctcctccggagaagtagagaaataaatttctcccaccctaaaccagtctttgagtgattgcagtatgactccatttccctggtgcattcatataatagttcacctggtgaaaacaatgaagattatttacaatgctaccctgctttttctggtgtcctgaacctggaagttgtgctttttaaggaaagcaactagaagccatttgtgtcaaggtaacgtctggagaaacaaaaggtcaggaatgaccaacgtccctactggccacagtccagccccaatctgcaagacagagccagccgccccgggggaattcccgcctggtgggactccacgtcaccagcccccagctgctcagggtacagcccctcgtgagaactgagccacagtcatgtttcctacatcagcctcctgctcaggggtttgtacagagaccactgccagccctctaggtggtccctgcaaagagagtcccagcccccaaggctccaaatggacagggcaccatgttgaccccttcgtcggcctccagttcgccgactgtaacatgtttcatccagttcaggacgtttatttatttccaacttgcatacaaaacatactgagaaactaaaaccatcgttaaaagtgaagacacgttgagacaggtatctcgacctgccaagtataaagctaaagctgagttcataaaaagggatgatttggccgacggtcatctgccagattctgatgatgattcagaagtcagtgtggaagaagatcagagggagaggcaggcgctctttgacttatcaagctgctccctgaggcccaaaagcttcaagtgtcagacttgtaaaaagtcatatatagggaagtggggactggcccagcattttaaacttaatccaggccatggccagctggaccctgagatggtgctatctgagaaagccaatgggagcaccctccgggggtgcacagaggaaaggacgctcagcctgaccttcccggggctgtccgtgccagcggctccgcgtgagggaggggcccgctcctgcttggtgagagagtcagcacgcagtggcctgcagcaatctggtgcaatcacagctcacagcaacctcaaactcctggactcaagtgatcctacctcctcagcctccctagtagctgggactacagaaaaacgttgacctcttggcgagaatgcaaagaagggaacgcttgcttatacactgttggtgaactgtcacccctacaactcagcttgcaaccagccctggccaccagtttccccacactgagctgaatatcggacatgcccatcttagacattccagcccattctgaaattccacatcgattcacctgacaaagtctgaagttccagggcaatttatctggaaaagcttacctggaatcacgtgtcatttcaaccaacaactgttgaagaggacgtggcattaaaaccaagggtatcaattatttataa

SEQ ID NO: 296681 - DNA, 1896 bp, Homo sapiens
cggacgcgtgggtcgacccacgcgtcccagctctgtgcctggaggggactcgccgccatctcaggtctcttggctttgccagggcccaccggagaaaactgacgacccgtttctgtaatccttatgggagaccaaccttgtgcctccgggagatccactctcccacctggaaacgcacgggaagccaagcctccaaaaaagcgctgcctcctcgctccgcgttgggattatccggaaggaactcccaacggaggtagtaccactctaccctccgcacctcctcctgcatcagccggcctgaagtcgcaccctcctcctccggagaagtagagaaataaatttctcccaccctaaaccagtctttgagtgattgcagtatgactccatttccctggtgcattcatataatagttcacctggtgaaaacaatgaagattatttacaatgctaccctgctttttctggtgtcctgaacctggaagttgtgctttttaaggaaagcaactagaagccatttgtgtcaaggtaacgtctggagaaacaaaaggtcaggaatgaccaacgtccctactggccacagtccagccccaatctgcaagacagagccagccgccccgggggaattcccgcctggtgggactccacgtcaccagcccccagctgctcagggtacagcccctcgtgagaactgagccacagtcatgtttcctacatcagcctcctgctcaggggtttgtacagagaccactgccagccctctaggtggtccctgcaaagagagtcccagcccccaaggctccaaatggacagggcaccatgttgaccccttcgtcggcctccagttcgccgactgtaacatgtttcatccagttcaggacgtttatttatttccaacttgcatacaaaacatactgagaaactaaaaccatcgttaaaagtgaagacacgttgagacaggtatctcgacctgccaagtataaagctaaagctgagttcataaaaagggatgatttggccgacggtcatctgccagattctgatgatgattcagaagtcagtgtggaagaagatcagagggagaggcaggcgctctttgacttatcaagctgctccctgaggcccaaaagcttcaagtgtcagacttgtaaaaagtcatatatagggaagtggggactggcccagcattttaaacttaatccaggccatggccagctggaccctgagatggtgctatctgagaaagccaatgggagcaccctccgggggtgcacagaggaaaggacgctcagcctgaccttcccggggctgtccgtgccagcggctccgcgtgagggaggggcccgctcctgcttggtgagagagtcagcacgcagtggcctgcagggttatagagtggaaagtcccacaatctttttcttctctattttcaggtagatgcattttattactatattctatctatccatttattccatctatctattccatttatcatctacctacctattattatctatcatctatgtattccatctacctgtcattgatctatctatcatctaccaatctacatttttgtcttgtagaaaaacgttgacctcttggcgagaatgcaaagaagggaacgcttgcttatacactgttggtgaactgtcacccctacaactcagcttgcaaccagccctggccaccagtttccccacactgagctgaatatcggacatgcccatcttagacattccagcccattctgaaattccacatcgattcacctgacaaagtctgaagttccagggcaatttatctggaaaagcttacctggaatcacgtgtcatttcaaccaacaactgttgaagaggacgtggcattaaaaccaagggtatcaattatttataa

SEQ ID NO: 296682 - DNA, 1740 bp, Homo sapiens
cggacgcgtgggtcgacccacgcgtcccagctctgtgcctggaggggactcgccgccatctcaggtctcttggctttgccagggcccaccggagaaaactgacgacccgtttctgtaatccttatgggagaccaaccttgtgcctccgggagatccactctcccacctggaaacgcacgggaagccaagcctccaaaaaagcgctgcctcctcgctccgcgttgggattatccggaaggaactcccaacggaggtagtaccactctaccctccgcacctcctcctgcatcagccggcctgaagtcgcaccctcctcctccggagaagtagagaaataaatttctcccaccctaaaccagtctttgagtgattgcagtatgactccatttccctggtgcattcatataatagttcacctggtgaaaacaatgaagattatttacaatgctaccctgctttttctggtgtcctgaacctggaagttgtgctttttaaggaaagcaactagaagccatttgtgtcaaggtaacgtctggagaaacaaaaggtcaggaatgaccaacgtccctactggccacagtccagccccaatctgcaagacagagccagccgccccgggggaattcccgcctggtgggactccacgtcaccagcccccagctgctcagggtacagcccctcgtgagaactgagccacagtcatgtttcctacatcagcctcctgctcaggggtttgtacagagaccactgccagccctctaggtggtccctgcaaagagagtcccagcccccaaggctccaaatggacagggcaccatgttgaccccttcgtcggcctccagttcgccgactgtaacatgtttcatccagttcaggacgtttatttatttccaacttgcatacaaaacatactgagaaactaaaaccatcgttaaaagtgaagacacgttgagacaggtatctcgacctgccaagtataaagctaaagctgagttcataaaaagggatgatttggccgacggtcatctgccagattctgatgatgattcagaagtcagtgtggaagaagatcagagggagaggcaggcgctctttgacttatcaagctgctccctgaggcccaaaagcttcaagtgtcagacttgtaaaaagtcatatatagggaagtggggactggcccagcattttaaacttaatccaggccatggccagctggaccctgagatggtgctatctgagaaagccaatgggagcaccctccgggggtgcacagaggaaaggacgctcagcctgaccttcccggggctgtccgtgccagcggctccgcgtgagggaggggcccgctcctgcttggtgagagagtcagcacgcagtggcctgcagggttatagagtggaaagtcccacaatctttttcttctctattttcagaaaaacgttgacctcttggcgagaatgcaaagaagggaacgcttgcttatacactgttggtgaactgtcacccctacaactcagcttgcaaccagccctggccaccagtttccccacactgagctgaatatcggacatgcccatcttagacattccagcccattctgaaattccacatcgattcacctgacaaagtctgaagttccagggcaatttatctggaaaagcttacctggaatcacgtgtcatttcaaccaacaactgttgaagaggacgtggcattaaaaccaagggtatcaattatttataa

SEQ ID NO: 296683 - DNA, 1634 bp, Homo sapiens
cggacgcgtgggtcgacccacgcgtcccagctctgtgcctggaggggactcgccgccatctcaggtctcttggctttgccagggcccaccggagaaaactgacgacccgtttctgtaatccttatgggagaccaaccttgtgcctccgggagatccactctcccacctggaaacgcacgggaagccaagcctccaaaaaagcgctgcctcctcgctccgcgttgggattatccggaaggaactcccaacggaggtagtaccactctaccctccgcacctcctcctgcatcagccggcctgaagtcgcaccctcctcctccggagaagtagagaaataaatttctcccaccctaaaccagtctttgagtgattgcagtatgactccatttccctggtgcattcatataatagttcacctggtgaaaacaatgaagattatttacaatgctaccctgctttttctggtgtcctgaacctggaagttgtgctttttaaggaaagcaactagaagccatttgtgtcaaggtaacgtctggagaaacaaaaggtcaggaatgaccaacgtccctactggccacagtccagccccaatctgcaagacagagccagccgccccgggggaattcccgcctggtgggactccacgtcaccagcccccagctgctcagggtacagcccctcgtgagaactgagccacagtcatgtttcctacatcagcctcctgctcaggggtttgtacagagaccactgccagccctctaggtggtccctgcaaagagagtcccagcccccaaggctccaaatggacagggcaccatgttgaccccttcgtcggcctccagttcgccgactgtaacatgtttcatccagttcaggacgtttatttatttccaacttgcatacaaaacatactgagaaactaaaaccatcgttaaaagtgaagacacgttgagacaggtatctcgacctgccaagtataaagctaaagctgagttcataaaaagggatgatttggccgacggtcatctgccagattctgatgatgattcagaagtcagtgtggaagaagatcagagggagaggcaggcgctctttgacttatcaagctgctccctgaggcccaaaagcttcaagtgtcagacttgtaaaaagtcatatatagggaagtggggactggcccagcattttaaacttaatccaggccatggccagctggaccctgagatggtgctatctgagaaagccaatgggagcaccctccgggggtgcacagaggaaaggacgctcagcctgaccttcccggggctgtccgtgccagcggctccgcgtgagggaggggcccgctcctgcttggtgagagagtcagcacgcagtggcctgcaggtgaactgtcacccctacaactcagcttgcaaccagccctggccaccagtttccccacactgagctgaatatcggacatgcccatcttagacattccagcccattctgaaattccacatcgattcacctgacaaagtctgaagttccagggcaatttatctggaaaagcttacctggaatcacgtgtcatttcaaccaacaactgttgaagaggacgtggcattaaaaccaagggtatcaattatttataa

SEQ ID NO: 296684 - DNA, 908 bp, Homo sapiens
cggacgcgtgggtcgacccacgcgtcccagctctgtgcctggaggggactcgccgccatctcaggtctcttggctttgccagggcccaccggagaaaactgacgacccgtttctgtaatccttatgggagaccaaccttgtgcctccgggagatccactctcccacctggaaacgcacgggaagccaagcctccaaaaaagcgctgcctcctcgctccgcgttgggattatccggaaggaactcccaacggaggtagtaccactctaccctccgcacctcctcctgcatcagccggcctgaagtcgcaccctcctcctccggagaagtagagaaataaatttctcccaccctaaaccagtctttgagtgattgcagtatgactccatttccctggtgcattcatataatagttcacctggtgaaaacaatgaagattatttacaatgctaccctgctttttctggtgtcctgaacctggaagttgtgctttttaaggtctgctggagttttgctggaggtccactccagaccctgtttgcctgggtatcactagcggaggctgcagaccagcaaagattgctgcctgttctttcctctggaacctttgtcccagagagacacctgccagatgccagccagagctcttctgtatgagtcttatgatgtaatcagcacgatttcacttcctgaatttcgatgaattctaagacatgggcaagatcgggttgtaagacctctgagatttaaggccatgccctggatcatggtgaacttaccaaagcaaacaatgcctgtgagatggtcctgcagcagccaaccagtgaactcttttggtgacatcctgttcttgttgtataactttatattcctataaatccattaaggccccaataaagtttgtctctaa

SEQ ID NO: 296685 - DNA, 1421 bp, Homo sapiens
cggacgcgtgggtcgacccacgcgtcccagctctgtgcctggaggggactcgccgccatctcaggtctcttggctttgccagggcccaccggagaaaactgacgacccgtttctgtaatccttatgggagaccaaccttgtgcctccgggagatccactctcccacctggaaacgcacgggaagccaagcctccaaaaaagcgctgcctcctcgctccgcgttgggattatccggaaggaactcccaacggaggtagtaccactctaccctccgcacctcctcctgcatcagccggcctgaagtcgcaccctcctcctccggagaagtagagaaataaatttctcccaccctaaaccagtctttgagtgattgcagtatgactccatttccctggtgcattcatataatagttcacctggtgaaaacaatgaagattatttacaatgctaccctgctttttctggtgtcctgaacctggaagttgtgctttttaaggaaagcaactagaagccatttgtgtcaaggtaacgtctggagaaacaaaaggtcaggaatgaccaacgtccctactggccacagtccagccccaatctgcaagacagagccagccgccccgggggaattcccgcctggtgggactccacgtcaccagcccccagctgctcagggtacagcccctcgtgagaactgagccacagtcatgtttcctacatcagcctcctgctcaggggtttgtacagagaccactgccagccctctaggtggtccctgcaaagagagtcccagcccccaaggctccaaatggacagggcaccatgttgaccccttcgtcggcctccagttcgccgactgtaacatgtttcatccagttcaggacgtttatttatttccaacttgcatacaaaacatactgagaaactaaaaccatcgttaaaagtgaagacacgttgagacaggtatctcgacctgccaagtataaagctaaagctgagttcataaaaagggatgatttggccgacggtcatctgccagattctgatgatgattcagaagtcagtgtggaagaagatcagagggagaagcactgctgcctatgcactccatttacagaaaaacgttgacctcttggcgagaatgcaaagaagggaacgcttgcttatacactgttggtgaactgtcacccctacaactcagcttgcaaccagccctggccaccagtttccccacactgagctgaatatcggacatgcccatcttagacattccagcccattctgaaattccacatcgattcacctgacaaagtctgaagttccagggcaatttatctggaaaagcttacctggaatcacgtgtcatttcaaccaacaactgttgaagaggacgtggcattaaaaccaagggtatcaattatttataa

SEQ ID NO: 296686 - DNA, 1887 bp, Homo sapiens
ggtggcggggcacgcccaggtctctggctcctgggctgggtcgcggcaggggcggagcgcgtgcgaaggcgacgcccccagcccctaggcctcgcccaggcggcttccgcccgcctcttcaacgcgcacgctgctaccgagctgcaggaggccgcgggcgcgagactgggaatgcgcagggcccccgcctggctctacaagcccgggccgcggcccccgccttccccgccgcctcccggcgctccgtgcccgccccacgaggccggcggctgctgctacctggggccgttgctgcttgtgccgtgagcgacggccagccattgtccccgccgctccgtcagccgcgcccggccgcgcgcgcaccggaaggcgcattggcgtcttgcgggctccgggccgggtgggcaggatggcctccacaagccgcatggcgcgcatggggagcctccgttgatgccgccgcgccgccctccgaggctgcatccgcggaagcccggctccccgagcgctccggcccggcccggcgccccggacctgagtgcgtccccatgaaggcgcccgggctggcccaggcggccgtggcagaggagaccccggactgggcgcccgagctctgccccagctccgaggcgcggtcgccggagccgcctgccaaccgccttcaagacttcgacacgctggtcaccgtgggaaagcaactagaagccatttgtgtcaaggtaacgtctggagaaacaaaaggtcaggaatgaccaacgtccctactggccacagtccagccccaatctgcaagacagagccagccgccccgggggaattcccgcctggtgggactccacgtcaccagcccccagctgctcagggtacagcccctcgtgagaactgagccacagtcatgtttcctacatcagcctcctgctcaggggtttgtacagagaccactgccagccctctaggtggtccctgcaaagagagtcccagcccccaaggctccaaatggacagggcaccatgttgaccccttcgtcggcctccagttcgccgactgtaacatgtttcatccagttcaggacgtttatttatttccaacttgcatacaaaacatactgagaaactaaaaccatcgttaaaagtgaagacacgttgagacaggtatctcgacctgccaagtataaagctaaagctgagttcataaaaagggatgatttggccgacggtcatctgccagattctgatgatgattcagaagtcagtgtggaagaagatcagagggagaggcaggcgctctttgacttatcaagctgctccctgaggcccaaaagcttcaagtgtcagacttgtaaaaagtcatatatagggaagtggggactggcccagcattttaaacttaatccaggccatggccagctggaccctgagatggtgctatctgagaaagccaatgggagcaccctccgggggtgcacagaggaaaggacgctcagcctgaccttcccggggctgtccgtgccagcggctccgcgtgagggaggggcccgctcctgcttggtgagagagtcagcacgcagtggcctgcagaaaaacgttgacctcttggcgagaatgcaaagaagggaacgcttgcttatacactgttggtgaactgtcacccctacaactcagcttgcaaccagccctggccaccagtttccccacactgagctgaatatcggacatgcccatcttagacattccagcccattctgaaattccacatcgattcacctgacaaagtctgaagttccagggcaatttatctggaaaagcttacctggaatcacgtgtcatttcaaccaacaactgttgaagaggacgtggcattaaaaccaagggtatcaattatttataa

SEQ ID NO: 296687 - DNA, 1560 bp, Homo sapiens
cggacgcgtgggtcgacccacgcgtcccagctctgtgcctggaggggactcgccgccatctcaggtctcttggctttgccagggcccaccggagaaaactgacgacccgtttctgtaatccttatgggagaccaaccttgtgcctccgggagatccactctcccacctggaaacgcacgggaagccaagcctccaaaaaagcgctgcctcctcgctccgcgttgggattatccggaaggaactcccaacggaggtagtaccactctaccctccgcacctcctcctgcatcagccggcctgaagtcgcaccctcctcctccggagaagtagagaaataaatttctcccaccctaaaccagtctttgagtgattgcagtatgactccatttccctggtgcattcatataatagttcacctgttttgttctttctgctatctttcagtcttatgatgtaatcagcacgatttcacttcctgaatttcgatgaattctaagacatgggcaagatcgggttgtaagacctctgagatttaaggccatgccctggatcatggtgaacttaccaaagcaaacaatgcctgtgagatggtcctgcagcagccaaccagtgaactcttttggtgacatcctgttcttgttgtataactttatattcctataaatccattaaggccccaataaagtttgtctctaagcgctgtgttagatctatatgactacatctagtaaattgtgaattttaagtaaatattttataagaactcctatgtaaagcattactaaaattagtgttgaaatatgaccttcttcctacatttattcatttatttatgtctatttattcatttattttagtgaaaaatataaggaaagtagaggaaggttaaatccaaaaaagaattgtttccagtacactttctttaatttgctgtcagtttttgcatggaatctacatctttttatgctaatcctcatcctagtattttacatcttaactatttttttctgactgaaatggttgatgtgcttgttttttgtaattttctactttccttctaaaatgcttagtattgaacaaatagaatatcctaattaaaaacagtaataaatattatggtgaaaaaatacaagtaaaatgggaaaacattagatagcagctttcaatatttcatatagttcataaatgtttcaggaattacaaggttatagaaaaaaatttatagactataataatttccagggatataaaaaaataaagcttctacctttgaattgtaataataaaagataaacagacttgaaagcatatattatatctgaaaatgtcaggtaaacttggcttataaattaaaatataaaataataatacaatttgttcaaataagtaattaaagcttacattgtaaaatgaatatttagagagattgtgaaacctgagtattttacccaatcctctgaaattagtccctagcatcagaattaaagaatctgaaaatcacaaatggaggtatggtgacatttatgtatattctagagttatgttatgcacacttaataa

SEQ ID NO: 296688 - DNA, 1475 bp, Homo sapiens
cggacgcgtgggtcgacccacgcgtcccagctctgtgcctggaggggactcgccgccatctcaggtctcttggctttgccagggcccaccggagaaaactgacgacccgtttctgtaatccttatgggagaccaaccttgtgcctccgggagatccactctcccacctggaaacgcacgggaagccaagcctccaaaaaagcgctgcctcctcgctccgcgttgggattatccggaaggaactcccaacggaggtagtaccactctaccctccgcacctcctcctgcatcagccggcctgaagtcgcaccctcctcctccggagaagtagagaaataaatttctcccaccctaaaccagtcttatgatgtaatcagcacgatttcacttcctgaatttcgatgaattctaagacatgggcaagatcgggttgtaagacctctgagatttaaggccatgccctggatcatggtgaacttaccaaagcaaacaatgcctgtgagatggtcctgcagcagccaaccagtgaactcttttggtgacatcctgttcttgttgtataactttatattcctataaatccattaaggccccaataaagtttgtctctaagcgctgtgttagatctatatgactacatctagtaaattgtgaattttaagtaaatattttataagaactcctatgtaaagcattactaaaattagtgttgaaatatgaccttcttcctacatttattcatttatttatgtctatttattcatttattttagtgaaaaatataaggaaagtagaggaaggttaaatccaaaaaagaattgtttccagtacactttctttaatttgctgtcagtttttgcatggaatctacatctttttatgctaatcctcatcctagtattttacatcttaactatttttttctgactgaaatggttgatgtgcttgttttttgtaattttctactttccttctaaaatgcttagtattgaacaaatagaatatcctaattaaaaacagtaataaatattatggtgaaaaaatacaagtaaaatgggaaaacattagatagcagctttcaatatttcatatagttcataaatgtttcaggaattacaaggttatagaaaaaaatttatagactataataatttccagggatataaaaaaataaagcttctacctttgaattgtaataataaaagataaacagacttgaaagcatatattatatctgaaaatgtcaggtaaacttggcttataaattaaaatataaaataataatacaatttgttcaaataagtaattaaagcttacattgtaaaatgaatatttagagagattgtgaaacctgagtattttacccaatcctctgaaattagtccctagcatcagaattaaagaatctgaaaatcacaaatggaggtatggtgacatttatgtatattctagagttatgttatgcacacttaataa

SEQ ID NO: 296689 - DNA, 1158 bp, Homo sapiens
ccctgtgtgcgaagttcacgcgaagtacccacccgcttccgctcttatgatgtaatcagcacgatttcacttcctgaatttcgatgaattctaagacatgggcaagatcgggttgtaagacctctgagatttaaggccatgccctggatcatggtgaacttaccaaagcaaacaatgcctgtgagatggtcctgcagcagccaaccagtgaactcttttggtgacatcctgttcttgttgtataactttatattcctataaatccattaaggccccaataaagtttgtctctaagcgctgtgttagatctatatgactacatctagtaaattgtgaattttaagtaaatattttataagaactcctatgtaaagcattactaaaattagtgttgaaatatgaccttcttcctacatttattcatttatttatgtctatttattcatttattttagtgaaaaatataaggaaagtagaggaaggttaaatccaaaaaagaattgtttccagtacactttctttaatttgctgtcagtttttgcatggaatctacatctttttatgctaatcctcatcctagtattttacatcttaactatttttttctgactgaaatggttgatgtgcttgttttttgtaattttctactttccttctaaaatgcttagtattgaacaaatagaatatcctaattaaaaacagtaataaatattatggtgaaaaaatacaagtaaaatgggaaaacattagatagcagctttcaatatttcatatagttcataaatgtttcaggaattacaaggttatagaaaaaaatttatagactataataatttccagggatataaaaaaataaagcttctacctttgaattgtaataataaaagataaacagacttgaaagcatatattatatctgaaaatgtcaggtaaacttggcttataaattaaaatataaaataataatacaatttgttcaaataagtaattaaagcttacattgtaaaatgaatatttagagagattgtgaaacctgagtattttacccaatcctctgaaattagtccctagcatcagaattaaagaatctgaaaatcacaaatggaggtatggtgacatttatgtatattctagagttatgttatgcacacttaataa

SEQ ID NO: 296690 - DNA, 905 bp, Homo sapiens
gagactctgtctcaaaaaaaaagtccatgaatgaaggagaatgtttttagtaatgatattttcctagtcagcctcattttagcttcttcccatcaagtgaaatttttttttcttaaagcaataaatgcgaccgcacctggcctgtgtatttaccttgtatgctactacattgctgatttcatttattagtttttttttttttaattcttttttaaaaaagaaaaaacagacacagtctgggcgacagagggagactccgtctcaaaaagaaaaaaagcaataaatgctcttccagaaaactcaaaaatgaagataagctaaaagaaaatggaaagcaccagaataccagaatctttccactcactgatgatcagagttaatacctcagtgtcttctgtggcttcagcgtcacctagtgcaggctgccattcaacaaacgcattgtcaacagtcaaccaaaagaaacccattggccaccataccctgaggactaaccctgacacagatgcccttccagatgccctcaatagtctaactgattccatcgccccagccttgggggagaagcactgctgcctatgcactccatttacagaaaaacgttgacctcttggcgagaatgcaaagaagggaacgcttgcttatacactgttggtgaactgtcacccctacaactcagcttgcaaccagccctggccaccagtttccccacactgagctgaatatcggacatgcccatcttagacattccagcccattctgaaattccacatcgattcacctgacaaagtctgaagttccagggcaatttatctggaaaagcttacctggaatcacgtgtcatttcaaccaacaactgttgaagaggacgtggcattaaaaccaagggtatcaattatttataa

SEQ ID NO: 296691 - DNA, 1029 bp, Homo sapiens
ggtggcggggcacgcccaggtctctggctcctgggctgggtcgcggcaggggcggagcgcgtgcgaaggcgacgcccccagcccctaggcctcgcccaggcggcttccgcccgcctcttcaacgcgcacgctgctaccgagctgcaggaggccgcgggcgcgagactgggaatgcgcagggcccccgcctggctctacaagcccgggccgcggcccccgccttccccgccgcctcccggcgctccgtgcccgccccacgaggccggcggctgctgctacctggggccgttgctgcttgtgccgtgagcgacggccagccattgtccccgccgctccgtcagccgcgcccggccgcgcgcgcaccggaaggcgcattggcgtcttgcgggctccgggccgggtgggcaggatggcctccacaagccgcatggcgcgcatggggagcctccgttgatgccgccgcgccgccctccgaggctgcatccgcggaagcccggctccccgagcgctccggcccggcccggcgccccggacctgagtgcgtccccatgaaggcgcccgggctggcccaggcggccgtggcagaggagaccccggactgggcgcccgagctctgccccagctccgaggcgcggtcgccggagccgcctgccaaccgccttcaagacttcgacacgctggtcaccgtgggaaagcaactagaagccatttgtgtcaagaaaaacgttgacctcttggcgagaatgcaaagaagggaacgcttgcttatacactgttggtgaactgtcacccctacaactcagcttgcaaccagccctggccaccagtttccccacactgagctgaatatcggacatgcccatcttagacattccagcccattctgaaattccacatcgattcacctgacaaagtctgaagttccagggcaatttatctggaaaagcttacctggaatcacgtgtcatttcaaccaacaactgttgaagaggacgtggcattaaaaccaagggtatcaattatttataa

SEQ ID NO: 296692 - DNA, 677 bp, Homo sapiens
gcatggcggcaggagactataatcccagctatttgggagattgaacccagaaagcggaggttgcagtgagccaagatcacttcactgcactccagcctgggcgacagagtgagactctgtctcaaaaaaaagaaaaaaaaaaagcattgaaacatgcgacatccacctttttgtaatagttcccatagcctacacaaatgcatatgaaatgcttaatattttgcttgcactattcttttctgctggaagggtggttctgactaaaaaattttactttcccattctttgctttttcattaatgctattttctttgctccagggttatagagtggaaagtcccacaatctttttcttctctattttcagaaaaacgttgacctcttggcgagaatgcaaagaagggaacgcttgcttatacactgttggtgaactgtcacccctacaactcagcttgcaaccagccctggccaccagtttccccacactgagctgaatatcggacatgcccatcttagacattccagcccattctgaaattccacatcgattcacctgacaaagtctgaagttccagggcaatttatctggaaaagcttacctggaatcacgtgtcatttcaaccaacaactgttgaagaggacgtggcattaaaaccaagggtatcaattatttataa

SEQ ID NO: 296693 - DNA, 465 bp, Homo sapiens
cgagctcggtaccctggcaaggtggaaagaatgactcagtcaggactcactgcaatacggaagagtaggagcttaacttcatcgaaacaaaaggctggggagtttttaagtgccggggtgagatgctgagaaggaactggagacatcaggaagagaaaaacgttgacctcttggcgagaatgcaaagaagggaacgcttgcttatacactgttggtgaactgtcacccctacaactcagcttgcaaccagccctggccaccagtttccccacactgagctgaatatcggacatgcccatcttagacattccagcccattctgaaattccacatcgattcacctgacaaagtctgaagttccagggcaatttatctggaaaagcttacctggaatcacgtgtcatttcaaccaacaactgttgaagaggacgtggcattaaaaccaagggtatcaattatttataa

SEQ ID NO: 296694 - DNA, 360 bp, Homo sapiens
gggaacaatgaggctgattgattagttttggaagcctaataaaacaagagtaatagcggtagacatccctgtactttttgggggagaaatatgcctaagataatagaaacatctggtccacctaacagataaattattttgcattcaaatacattagataccaaaaagatgcaggttattgacattgtatgcctttgatttaatatttattaagcactcatctaataattttgcattctctttaacttgcttaatagggaaattggggtgttttctgctcaacagacatatctgacctgtatgataatggaatttctcattataagtcaataaacttttgttctttctgctatctttcag

SEQ ID NO: 296695 - DNA, 7225 bp, Homo sapiens
aaaggttctaaatgtctgcggggctcagagccggatgtcacgtcgtcctcctctgccggttttctcttgggtccttttccgtgccgtcccgcgactccgcctctggccgcgcgtgtctggctgctaggccgacaccaaggactggccgggtacccgggaagaaagcacgtgctccagcagttgccgcgcccagccccgagagaggccctagggcgctgcgggctttcggggtccgcagtccccccgcgacgcgagccaacgggaggcgtcaaaagacccgggccttgtgtggcaggctcgcctggcgctggctggcgtggcccttggccgtcgtcacctgtggagagcacgtcttctctgccgcgccctctgcgcaaggaggagactcgacaacatgtcacccgcgctccaagacctgtcgcaacccgaaggtctgaagaaaaccctgcgggatgagatcaatgccattctgcagaagaggattatggtgctggatggagggatggggaccatgatccagcgggagaagctaaacgaagaacacttccgaggtcaggaatttaaagatcatgccaggccgctgaaaggcaacaatgacattttaagtataactcagcctgatgtcatttaccaaatccataaggaatacttgctggctggggcagatatcattgaaacaaatacttttagcagcactagtattgcccaagctgactatggccttgaacacttggcctaccggatgaacatgtgctctgcaggagtggccagaaaagctgccgaggaggtaactctccagacaggaattaagaggtttgtggcaggggctctgggtccgactaataagacactctctgtgtccccatctgtggaaaggccggattataggaacatcacatttgatgagcttgttgaagcataccaagagcaggccaaaggacttctggatggcggggttgatatcttactcattgaaactatttttgatactgccaatgccaaggcagccttgtttgcactccaaaatctttttgaggagaaatatgctccccggcctatctttatttcagggacgatcgttgataaaagtgggcggactctttccggacagacaggagagggatttgtcatcagcgtgtctcatggagaaccactctgcattggattaaattgtgctttgggtgcagctgaaatgagaccttttattgaaataattggaaaatgtacaacagcctatgtcctctgttatcccaatgcaggtcttcccaacacctttggtgactatgatgaaacgccttctatgatggccaagcacctaaaggattttgctatggatggcttggtcaatatagttggaggatgctgtgggtcaacaccagatcatatcagggaaattgctgaagctgtgaaaaattgtaagcctagagttccacctgccactgcttttgaaggacatatgttactgtctggtctagagcccttcaggattggaccgtacaccaactttgttaacattggagagcgctgtaatgttgcaggatcaaggaagtttgctaaactcatcatggcaggaaactatgaagaagccttgtgtgttgccaaagtgcaggtggaaatgggagcccaggtgttggatgtcaacatggatgatggcatgctagatggtccaagtgcaatgaccagattttgcaacttaattgcttccgagccagacatcgcaaaggtacctttgtgcatcgactcctccaattttgctgtgattgaagctgggttaaagtgctgccaagggaagtgcattgtcaatagcattagtctgaaggaaggagaggacgacttcttggagaaggccaggaagattaaaaagtatggagctgctatggtggtcatggcttttgatgaagaaggacaggcaacagaaacagacacaaaaatcagagtgtgcacccgggcctaccatctgcttgtgaaaaaactgggctttaatccaaatgacattatttttgaccctaatatcctaaccattgggactggaatggaggaacacaacttgtatgccattaattttatccatgcaacaaaagtcattaaagaaacattacctggagccagaataagtggaggtctttccaacttgtccttctccttccgaggaatggaagccattcgagaagcaatgcatggggttttcctttaccatgcaatcaagtctggcatggacatggggatagtgaatgctggaaacctccctgtgtatgatgatatccataaggaacttctgcagctctgtgaagatctcatctggaataaagaccctgaggccactgagaagctcttacgttatgcccagactcaaggcacaggagggaagaaagtcattcagactgatgagtggagaaatggccctgtcgaagaacgccttgagtatgcccttgtgaagggcattgaaaaacatattattgaggatactgaggaagccaggttaaaccaaaaaaaatatccccgacctctcaatataattgaaggacccctgatgaatggaatgaaaattgttggtgatctttttggagctggaaaaatgtttctacctcaggttataaagtcagcccgggttatgaagaaggctgttggccaccttatccctttcatggaaaaagaaagagaagaaaccagagtgcttaacggcacagtagaagaagaggacccttaccagggcaccatcgtgctggccactgttaaaggcgacgtgcacgacataggcaagaacatagttggagtagtccttggctgcaataatttccgagttattgatttaggagtcatgactccatgtgataagatactgaaagctgctcttgaccacaaagcagatataattggcctgtcaggactcatcactccttccctggatgaaatgatttttgttgccaaggaaatggagagattagctataaggattccattgttgattggaggagcaaccacttcaaaaacccacacagcagttaaaatagctccgagatacagtgcacctgtaatccatgtcctggacgcgtccaagagtgtggtggtgtgttcccagctgttagatgaaaatctaaaggatgaatactttgaggaaatcatggaagaatatgaagatattagacaggaccattatgagtctctcaaggagaggagatacttacccttaagtcaagccagaaaaagtggtttccaaatggattggctgtctgaacctcacccagtgaagcccacgtttattgggacccaggtctttgaagactatgacctgcagaagctggtggactacattgactggaagcctttctttgatgtctggcagctccggggcaagtacccgaatcgaggctttcccaagatatttaacgacaaaacagtaggtggagaggccaggaaggtctacgatgatgcccacaatatgctgaacacactgattagtcaaaagaaactccgggcccggggtgtggttgggttctggccagcacagagtatccaagacgacattcacctgtacgcagaggctgctgtgccccaggctgcagagcccatagccaccttctatgggttaaggcaacaggctgagaaggactctgccagcacggagccatactactgcctctcagacttcatcgctcccttgcattctggcatccgtgactacctgggcctgtttgccgttgcctgctttggggtagaagagctgagcaaggcctatgaggatgatggtgacgactacagcagcatcatggtcaaggcgctgggggaccggctggcagaggcctttgcagaagagctccatgaaagagttcgccgagaactgtgggcctactgtggcagtgagcagctggacgtcgcagacctgcgcaggctgcggtacaagggcatccgcccggctcctggctaccccagccagcccgaccacaccgagaagctcaccatgtggagactcgcagacatcgagcagtctacaggcattaggttaacagaatcattagcaatggcacctgcttcagcagtctcaggcctctacttctccaatttgaagtccaaatattttgctgtggggaagatttccaaggatcaggttgaggattatgcattgaggaagaacatatctgtggctgaggttgagaaatggcttggacccattttgggatatgatacagactaactttttttttttttgccttttttattcttgatgatcctcaaggaaatacaacctagggtgccttaaaaataacaacaacaaaaaacctgtgtgcatctggctgacacttacctgcttctggttttcgaagactatttagtggaaccttgtagaggagcagggtcttcctgcagtgcctggaaaacaggcgctgtttttttgggaccttgcgtgaagagcagtgagcagggttcctgtggtttccctggtccctctgagatggggacagactgaagacagaggtcgtttgatttcaaagcaagtcaacctgcttttttctgtttttacagtggaatctaggaggccacttagtcgtctttttttcctcttagaagaaaagcctgaaactgagttgaatagagaagtgtgaccctgtgacaaaatgatactgtgagaaatggggcattttaatctaagtggttataacagtggattctgacggggaaggtgtagctctgttctcttcggaagacctcgttttctaaaggctggactaaatggctgcagaactccctttggcaaaaggcatgcgctcactgcttgcttgtcagaaacactgaagccatttgccccagtgtggtcaagcagccatgctttctgggcattttcgtcctcccataatttcatatttccgtacccctgaggaaacaaaaaggaaatgaggagagaaagttactgttaagggtggttaacattttttttgttttgttttgttttggttttttttttttgagacagagtctggctctgtcgcccaggctggagtgcaggggcgcaatctcggctcatagcaagctccgcctcctgggttcatgccattctcctgcctcagcctccagagtagctgggactacaggtgcccaccaccacacccggctaattttttgtgtttttacaaaatacaaaaaagtagagacaggatttcactgtgttagccaggatggtcttgatctcccgacctcgtgatctgcccacctcagcctcccaaaatgctgggattacaggcgtgagccaccgagcctggccggttaacatcttttaattgtttccaggattgagcaggttctcagctgggctctgatatcccgtgcggagttggacaagtgggcagcataaagtcactcatttcttaccattttattcccctcaattctcaatatattcagtaatgaagaatggtgccaccactcaagcaacaagcctcaaactcaaccatgtcatctttttcttggatgattgcagttatttcaaaaatttgcatgcaaaatatacactcatcctacttcaagatggtggtggcaatagtcaggagaaggtaacattggagtcctggtttgattcgaaggatgaagacgaagaagcaagggaggaacaaatgaagaaccatctttgttcatgaataggaatattcaagattataaaggtatcaggtctcctaaaattgatctatggatttaataccattttcaatggaaattccaacagattttattgaatgaaacaagcaggtgtttatatggagtagcaaaggacttaaaattaccaaatgcttctaaatatgaaggagaggttggggacacgcaccctatgtgataccaagttttattgtcaagacagtgtcatggtgcagaggtaggcattctgagcaggggaacaaaataagggcctagaaactcacccgtgcatatgttgacctttgcaaaatgacctggtgacatggcaagtcagtggggacaggaaggaccactccctaagtaatcccagaacaatggctattcatgtgggaaaaaaagaaattttactttctctcaccttacctggtgataagttccaaatatgttaagggctttaatacaaaaagcaaaaattgtcagtgtttggatgaaaaaagccttagggcaggaaagaatctcttgagacataaagtagtaatcataaaggacaagatggttaagtcaattctgttaaaactcaaggcttatattaagcaaacacttgaagtgagaagatgatccacaacttgagaagacatttataatacaaataactgatgaaggattcataatcacaaatatagagaattcctatttaaaaaaatagaaaaatagtgaagactacacaagaggaaatagggcttttaaataaatagatgttctgtagcattggtcagggaaatatgaattaggaccacaatgagattccattttatatccataagatttgcaaaggttgggtctgacagtaccagttgttagatctgtagggacttgtacaacattgtggatgtgtaaacaggcaccactgctttaaaaaacaattatcccttacagacttgaacatttgcagaccttatgatcttgcttccaactcccacctgtatgtccagcaaactcttgcatgtggccactaggaggaatgtgtaagaatgttcatagttacatatttataatagttaataactggaaaaagtgaaatgtatgtctgtctacaggaaaataggtgaataattagatatatgtattcattctacgggatattattcagtagtggaaatgagtgaactacagctatacctcacaataagaatgaatctcagaaaatattaaggaaaaaagcaagtttgaagagaccacatggggcgtactatttttattgagcccaaaaacaagcaaaaccaaagaatatgtagtctaagcatacgtatacaataaaactatgctattaaaaaaaaaagaaggtaactgataaaccaaaattgagcatagtaattacccacagaaggaggaagtggaagggacaggagcacataggtagatgccaagttatgcagctgttctggttcctcctggtaggcttacaagtgtttactatatgctattaatacattatactttataactaatagataacagttttttacatattaaatatgttctacttaaatatattataaaaaataaaggcaaagtggaatgataacctaaaaaaaaaaat

SEQ ID NO: 296696 - DNA, 581 bp, Homo sapiens
aaaggttctaaatgtctgcggggctcagagccggatgtcacgtcgtcctcctctgccggttttctcttgggtccttttccgtgccgtcccgcgactccgcctctggccgcgcgtgtctggctgctaggccgacaccaaggactggccgggtacccgggaagaaagcacgtgctccagcagttgccgcgcccagccccgagagaggccctagggcgctgcgggctttcggggtccgcagtccccccgcgacgcgagccaacgggaggcgtcaaaagacccgggccttgtgtggcaggctcgcctggcgctggctggcgtggcccttggccgtcgtcacctgtggagagcacgtcttctctgccgcgccctctgcgcaaggaggagactcgacaacatgtcacccgcgctccaagacctgtcgcaacccgaaggtctgaagaaaaccctgcgggatgagatcaatgccattctgcagaagaggattatggtgctggatggagggatggggaccatgatccgcagcttgggcttggcaggttgggccccgacagcccagaaggctttggtactggcacgcacag

SEQ ID NO: 296697 - DNA, 7094 bp, Homo sapiens
aaaggttctaaatgtctgcggggctcagagccggatgtcacgtcgtcctcctctgccggttttctcttgggtccttttccgtgccgtcccgcgactccgcctctggccgcgcgtgtctggctgctaggccgacaccaaggactggccgggtacccgggaagaaagcacgtgctccagcagttgccgcgcccagccccgagagaggccctagggcgctgcgggctttcggggtccgcagtccccccgcgacgcgagccaacgggaggcgtcaaaagacccgggccttgtgtggcaggctcgcctggcgctggctggcgtggcccttggccgtcgtcacctgtggagagcacgtcttctctgccgcgccctctgcgcaaggaggagactcgacaacatgtcacccgcgctccaagacctgtcgcaacccgaaggtctgaagaaaaccctgcgggatgagatcaatgccattctgcagaagaggattatggtgctggatggagggatggggaccatgatccagcgggagaagctaaacgaagaacacttccgaggtcaggaatttaaagatcatgccaggccgctgaaaggcaacaatgacattttaagtataactcagcctgatgtcatttaccaaatccataaggaatacttgctggctggggcagatatcattgaaacaaatacttttagcagcactagtattgcccaagctgactatggccttgaacacttggcctaccggatgaacatgtgctctgcaggagtggccagaaaagctgccgaggaggtaactctccagacaggaattaagaggtttgtggcaggggctctgggtccgactaataagacactctctgtgtccccatctgtggaaaggccggattataggaacatcacatttgatgagcttgttgaagcataccaagagcaggccaaaggacttctggatggcggggttgatatcttactcattgaaactatttttgatactgccaatgccaaggcagccttgtttgcactccaaaatctttttgaggagaaatatgctccccggcctatctttatttcagggacgatcgttgataaaagtgggcggactctttccggacagacaggagagggatttgtcatcagcgtgtctcatggagaaccactctgcattggattaaattgtgctttgggtgcagctgaaatgagaccttttattgaaataattggaaaatgtacaacagcctatgtcctctgttatcccaatgcaggtcttcccaacacctttggtgactatgatgaaacgccttctatgatggccaagcacctaaaggattttgctatggatggcttggtcaatatagttggaggatgctgtgggtcaacaccagatcatatcagggaaattgctgaagctgtgaaaaattgtaagcctagagttccacctgccactgcttttgaaggacatatgttactgtctggtctagagcccttcaggattggaccgtacaccaactttgttaacattggagagcgctgtaatgttgcaggatcaaggaagtttgctaaactcatcatggcaggaaactatgaagaagccttgtgtgttgccaaagtgcaggtggaaatgggagcccaggtgttggatgtcaacatggatgatggcatgctagatggtccaagtgcaatgaccagattttgcaacttaattgcttccgagccagacatcgcaaaggtacctttgtgcatcgactcctccaattttgctgtgattgaagctgggttaaagtgctgccaagggaagtgcattgtcaatagcattagtctgaaggaaggagaggacgacttcttggagaaggccaggaagattaaaaagtatggagctgctatggtggtcatggcttttgatgaagaaggacaggcaacagaaacagacacaaaaatcagagtgtgcacccgggcctaccatctgcttgtgaaaaaactgggctttaatccaaatgacattatttttgaccctaatatcctaaccattgggactggaatggaggaacacaacttgtatgccattaattttatccatgcaacaaaagtcattaaagaaacattacctggagccagaataagtggaggtctttccaacttgtccttctccttccgaggaatggaagccattcgagaagcaatgcatggggttttcctttaccatgcaatcaagtctggcatggacatggggatagtgaatgctggaaacctccctgtgtatgatgatatccataaggaacttctgcagctctgtgaagatctcatctggaataaagaccctgaggccactgagaagctcttacgttatgcccagactcaaggcacaggagggaagaaagtcattcagactgatgagtggagaaatggccctgtcgaagaacgccttgagtatgcccttgtgaagggcattgaaaaacatattattgaggatactgaggaagccaggttaaaccaaaaaaaatatccccgacctctcaatataattgaaggacccctgatgaatggaatgaaaattgttggtgatctttttggagctggaaaaatgtttctacctcaggttataaagtcagcccgggttatgaagaaggctgttggccaccttatccctttcatggaaaaagaaagagaagaaaccagagtgcttaacggcacagtagaagaagaggacccttaccagggcaccatcgtgctggccactgttaaaggcgacgtgcacgacataggcaagaacatagttggagtagtccttggctgcaataatttccgagttattgatttaggagtcatgactccatgtgataagatactgaaagctgctcttgaccacaaagcagatataattggcctgtcaggactcatcactccttccctggatgaaatgatttttgttgccaaggaaatggagagattagctataaggattccattgttgattggaggagcaaccacttcaaaaacccacacagcagttaaaatagctccgagatacagtgcacctgtaatccatgtcctggacgcgtccaagagtgtggtggtgtgttcccagctgttagatgaaaatctaaaggatgaatactttgaggaaatcatggaagaatatgaagatattagacaggaccattatgagtctctcaaggagaggagatacttacccttaagtcaagccagaaaaagtggtttccaaatggattggctgtctgaacctcacccagtgaagcccacgtttattgggacccaggtctttgaagactatgacctgcagaagctggtggactacattgactggaagcctttctttgatgtctggcagctccggggcaagtacccgaatcgaggctttcccaagatatttaacgacaaaacagtaggtggagaggccaggaaggtctacgatgatgcccacaatatgctgaacacactgattagtcaaaagaaactccgggcccggggtgtggttgggttctggccagcacagagtatccaagacgacattcacctgtacgcagaggctgctgtgccccaggctgcagagcccatagccaccttctatgggttaaggcaacaggctgagaaggactctgccagcacggagccatactactgcctctcagacttcatcgctcccttgcattctggcatccgtgactacctgggcctgtttgccgttgcctgctttggggtagaagagctgagcaaggcctatgaggatgatggtgacgactacagcagcatcatggtcaaggcgctgggggaccggctggcagaggcctttgcagaagagctccatgaaagagttcgccgagaactgtgggcctactgtggcagtgagcagctggacgtcgcagacctgcgcaggctgcggtacaagggcatccgcccggctcctggctaccccagccagcccgaccacaccgagaagctcaccatgtggagactcgcagacatcgagcagtctacaggcattaggttaacagaatcattagcaatggcacctgcttcagcagtctcaggcctctacttctccaatttgaagtccaaatattttgctgtggggaagatttccaaggatcaggttgaggattatgcattgaggaagaacatatctgtggctgaggttgagaaatggcttggacccattttgggatatgatacagactaactttttttttttttgccttttttattcttgatgatcctcaaggaaatacaacctagggtgccttaaaaataacaacaacaaaaaacctgtgtgcatctggctgacacttacctgcttctggttttcgaagactatttagtggaaccttgtagaggagcagggtcttcctgcagtgcctggaaaacaggcgctgtttttttgggaccttgcgtgaagagcagtgagcagggttcctgtggtttccctggtccctctgagatggggacagactgaagacagaggtcgtttgatttcaaagcaagtcaacctgcttttttctgtttttacagtggaatctaggaggccacttagtcgtctttttttcctcttagaagaaaagcctgaaactgagttgaatagagaagtgtgaccctgtgacaaaatgatactgtgagaaatggggcattttaatctaagtggttataacagtggattctgacggggaaggtgtagctctgttctcttcggaagacctcgttttctaaaggctggactaaatggctgcagaactccctttggcaaaaggcatgcgctcactgcttgcttgtcagaaacactgaagccatttgccccagtgtggtcaagcagccatgctttctgggcattttcgtcctcccataatttcatatttccgtacccctgaggaaacaaaaaggaaatgaggagagaaagttactgttaagggtggttaacattttttttgttttgttttgttttggttttttttttttgagacagagtctggctctgtcgcccaggctggagtgcaggggcgcaatctcggctcatagcaagctccgcctcctgggttcatgccattctcctgcctcagcctccagagtagctgggactacaggtgcccaccaccacacccggctaattttttgtgtttttacaaaatacaaaaaagtagagacaggatttcactgtgttagccaggatggtcttgatatcccgtgcggagttggacaagtgggcagcataaagtcactcatttcttaccattttattcccctcaattctcaatatattcagtaatgaagaatggtgccaccactcaagcaacaagcctcaaactcaaccatgtcatctttttcttggatgattgcagttatttcaaaaatttgcatgcaaaatatacactcatcctacttcaagatggtggtggcaatagtcaggagaaggtaacattggagtcctggtttgattcgaaggatgaagacgaagaagcaagggaggaacaaatgaagaaccatctttgttcatgaataggaatattcaagattataaaggtatcaggtctcctaaaattgatctatggatttaataccattttcaatggaaattccaacagattttattgaatgaaacaagcaggtgtttatatggagtagcaaaggacttaaaattaccaaatgcttctaaatatgaaggagaggttggggacacgcaccctatgtgataccaagttttattgtcaagacagtgtcatggtgcagaggtaggcattctgagcaggggaacaaaataagggcctagaaactcacccgtgcatatgttgacctttgcaaaatgacctggtgacatggcaagtcagtggggacaggaaggaccactccctaagtaatcccagaacaatggctattcatgtgggaaaaaaagaaattttactttctctcaccttacctggtgataagttccaaatatgttaagggctttaatacaaaaagcaaaaattgtcagtgtttggatgaaaaaagccttagggcaggaaagaatctcttgagacataaagtagtaatcataaaggacaagatggttaagtcaattctgttaaaactcaaggcttatattaagcaaacacttgaagtgagaagatgatccacaacttgagaagacatttataatacaaataactgatgaaggattcataatcacaaatatagagaattcctatttaaaaaaatagaaaaatagtgaagactacacaagaggaaatagggcttttaaataaatagatgttctgtagcattggtcagggaaatatgaattaggaccacaatgagattccattttatatccataagatttgcaaaggttgggtctgacagtaccagttgttagatctgtagggacttgtacaacattgtggatgtgtaaacaggcaccactgctttaaaaaacaattatcccttacagacttgaacatttgcagaccttatgatcttgcttccaactcccacctgtatgtccagcaaactcttgcatgtggccactaggaggaatgtgtaagaatgttcatagttacatatttataatagttaataactggaaaaagtgaaatgtatgtctgtctacaggaaaataggtgaataattagatatatgtattcattctacgggatattattcagtagtggaaatgagtgaactacagctatacctcacaataagaatgaatctcagaaaatattaaggaaaaaagcaagtttgaagagaccacatggggcgtactatttttattgagcccaaaaacaagcaaaaccaaagaatatgtagtctaagcatacgtatacaataaaactatgctattaaaaaaaaaagaaggtaactgataaaccaaaattgagcatagtaattacccacagaaggaggaagtggaagggacaggagcacataggtagatgccaagttatgcagctgttctggttcctcctggtaggcttacaagtgtttactatatgctattaatacattatactttataactaatagataacagttttttacatattaaatatgttctacttaaatatattataaaaaataaaggcaaagtggaatgataacctaaaaaaaaaaat

SEQ ID NO: 296698 - DNA, 7064 bp, Homo sapiens
ctctgggcccaagcagtcctcctgccttagccttccgagtagctgggactacgggcatgtgccaccatgcctggctaatttttcgtgttgttttggttagagacagggtctttctatgttgcacagactggtcttgaactcctggcctcaagcagtcctctcaccttggcttcccaaagtgctatgattacaagcgtgagccaccatgcctggctgatgtgttaccttatgttagcatatagctaccctgtgaagtagggttataatatatttgaatgaagagactgagactcagagagtttaagggacttgattaagttcttataaccttagcatgttaacattgtctgaattcaagtttcgtgtttatttattcataccacgtgcctttctgtgaaatccttacacctttttgcatctctaccttctaatgcagtgccttactcttagtaaatggtcaaaaggtagctgctgataatggtggtaatgaaagggcatgtttattctgggggcacaagaaactctaaagctcataattgacattataatctcttgttgcaggaatacttgctggctggggcagatatcattgaaacaaatacttttagcagcactagtattgcccaagctgactatggccttgaacacttggcctaccggatgaacatgtgctctgcaggagtggccagaaaagctgccgaggaggtaactctccagacaggaattaagaggtttgtggcaggggctctgggtccgactaataagacactctctgtgtccccatctgtggaaaggccggattataggaacatcacatttgatgagcttgttgaagcataccaagagcaggccaaaggacttctggatggcggggttgatatcttactcattgaaactatttttgatactgccaatgccaaggcagccttgtttgcactccaaaatctttttgaggagaaatatgctccccggcctatctttatttcagggacgatcgttgataaaagtgggcggactctttccggacagacaggagagggatttgtcatcagcgtgtctcatggagaaccactctgcattggattaaattgtgctttgggtgcagctgaaatgagaccttttattgaaataattggaaaatgtacaacagcctatgtcctctgttatcccaatgcaggtcttcccaacacctttggtgactatgatgaaacgccttctatgatggccaagcacctaaaggattttgctatggatggcttggtcaatatagttggaggatgctgtgggtcaacaccagatcatatcagggaaattgctgaagctgtgaaaaattgtaagcctagagttccacctgccactgcttttgaaggacatatgttactgtctggtctagagcccttcaggattggaccgtacaccaactttgttaacattggagagcgctgtaatgttgcaggatcaaggaagtttgctaaactcatcatggcaggaaactatgaaatggtccaagtgcaatgaccagattttgcaacttaattgcttccgagccagacatcgcaaaggtacctttgtgcatcgactcctccaattttgctgtgattgaagctgggttaaagtgctgccaagggaagtgcattgtcaatagcattagtctgaaggaaggagaggacgacttcttggagaaggccaggaagattaaaaagtatggagctgctatggtggtcatggcttttgatgaagaaggacaggcaacagaaacagacacaaaaatcagagtgtgcacccgggcctaccatctgcttgtgaaaaaactgggctttaatccaaatgacattatttttgaccctaatatcctaaccattgggactggaatggaggaacacaacttgtatgccattaattttatccatgcaacaaaagtcattaaagaaacattacctggagccagaataagtggaggtctttccaacttgtccttctccttccgaggaatggaagccattcgagaagcaatgcatggggttttcctttaccatgcaatcaagtctggcatggacatggggatagtgaatgctggaaacctccctgtgtatgatgatatccataaggaacttctgcagctctgtgaagatctcatctggaataaagaccctgaggccactgagaagctcttacgttatgcccagactcaaggcacaggagggaagaaagtcattcagactgatgagtggagaaatggccctgtcgaagaacgccttgagtatgcccttgtgaagggcattgaaaaacatattattgaggatactgaggaagccaggttaaaccaaaaaaaatatccccgacctctcaatataattgaaggacccctgatgaatggaatgaaaattgttggtgatctttttggagctggaaaaatgtttctacctcaggttataaagtcagcccgggttatgaagaaggctgttggccaccttatccctttcatggaaaaagaaagagaagaaaccagagtgcttaacggcacagtagaagaagaggacccttaccagggcaccatcgtgctggccactgttaaaggcgacgtgcacgacataggcaagaacatagttggagtagtccttggctgcaataatttccgagttattgatttaggagtcatgactccatgtgataagatactgaaagctgctcttgaccacaaagcagatataattggcctgtcaggactcatcactccttccctggatgaaatgatttttgttgccaaggaaatggagagattagctataaggattccattgttgattggaggagcaaccacttcaaaaacccacacagcagttaaaatagctccgagatacagtgcacctgtaatccatgtcctggacgcgtccaagagtgtggtggtgtgttcccagctgttagatgaaaatctaaaggatgaatactttgaggaaatcatggaagaatatgaagatattagacaggaccattatgagtctctcaaggagaggagatacttacccttaagtcaagccagaaaaagtggtttccaaatggattggctgtctgaacctcacccagtgaagcccacgtttattgggacccaggtctttgaagactatgacctgcagaagctggtggactacattgactggaagcctttctttgatgtctggcagctccggggcaagtacccgaatcgaggctttcccaagatatttaacgacaaaacagtaggtggagaggccaggaaggtctacgatgatgcccacaatatgctgaacacactgattagtcaaaagaaactccgggcccggggtgtggttgggttctggccagcacagagtatccaagacgacattcacctgtacgcagaggctgctgtgccccaggctgcagagcccatagccaccttctatgggttaaggcaacaggctgagaaggactctgccagcacggagccatactactgcctctcagacttcatcgctcccttgcattctggcatccgtgactacctgggcctgtttgccgttgcctgctttggggtagaagagctgagcaaggcctatgaggatgatggtgacgactacagcagcatcatggtcaaggcgctgggggaccggctggcagaggcctttgcagaagagctccatgaaagagttcgccgagaactgtgggcctactgtggcagtgagcagctggacgtcgcagacctgcgcaggctgcggtacaagggcatccgcccggctcctggctaccccagccagcccgaccacaccgagaagctcaccatgtggagactcgcagacatcgagcagtctacaggcattaggttaacagaatcattagcaatggcacctgcttcagcagtctcaggcctctacttctccaatttgaagtccaaatattttgctgtggggaagatttccaaggatcaggttgaggattatgcattgaggaagaacatatctgtggctgaggttgagaaatggcttggacccattttgggatatgatacagactaactttttttttttttgccttttttattcttgatgatcctcaaggaaatacaacctagggtgccttaaaaataacaacaacaaaaaacctgtgtgcatctggctgacacttacctgcttctggttttcgaagactatttagtggaaccttgtagaggagcagggtcttcctgcagtgcctggaaaacaggcgctgtttttttgggaccttgcgtgaagagcagtgagcagggttcctgtggtttccctggtccctctgagatggggacagactgaagacagaggtcgtttgatttcaaagcaagtcaacctgcttttttctgtttttacagtggaatctaggaggccacttagtcgtctttttttcctcttagaagaaaagcctgaaactgagttgaatagagaagtgtgaccctgtgacaaaatgatactgtgagaaatggggcattttaatctaagtggttataacagtggattctgacggggaaggtgtagctctgttctcttcggaagacctcgttttctaaaggctggactaaatggctgcagaactccctttggcaaaaggcatgcgctcactgcttgcttgtcagaaacactgaagccatttgccccagtgtggtcaagcagccatgctttctgggcattttcgtcctcccataatttcatatttccgtacccctgaggaaacaaaaaggaaatgaggagagaaagttactgttaagggtggttaacattttttttgttttgttttgttttggttttttttttttgagacagagtctggctctgtcgcccaggctggagtgcaggggcgcaatctcggctcatagcaagctccgcctcctgggttcatgccattctcctgcctcagcctccagagtagctgggactacaggtgcccaccaccacacccggctaattttttgtgtttttacaaaatacaaaaaagtagagacaggatttcactgtgttagccaggatggtcttgatctcccgacctcgtgatctgcccacctcagcctcccaaaatgctgggattacaggcgtgagccaccgagcctggccggttaacatcttttaattgtttccaggattgagcaggttctcagctgggctctgatatcccgtgcggagttggacaagtgggcagcataaagtcactcatttcttaccattttattcccctcaattctcaatatattcagtaatgaagaatggtgccaccactcaagcaacaagcctcaaactcaaccatgtcatctttttcttggatgattgcagttatttcaaaaatttgcatgcaaaatatacactcatcctacttcaagatggtggtggcaatagtcaggagaaggtaacattggagtcctggtttgattcgaaggatgaagacgaagaagcaagggaggaacaaatgaagaaccatctttgttcatgaataggaatattcaagattataaaggtatcaggtctcctaaaattgatctatggatttaataccattttcaatggaaattccaacagattttattgaatgaaacaagcaggtgtttatatggagtagcaaaggacttaaaattaccaaatgcttctaaatatgaaggagaggttggggacacgcaccctatgtgataccaagttttattgtcaagacagtgtcatggtgcagaggtaggcattctgagcaggggaacaaaataagggcctagaaactcacccgtgcatatgttgacctttgcaaaatgacctggtgacatggcaagtcagtggggacaggaaggaccactccctaagtaatcccagaacaatggctattcatgtgggaaaaaaagaaattttactttctctcaccttacctggtgataagttccaaatatgttaagggctttaatacaaaaagcaaaaattgtcagtgtttggatgaaaaaagccttagggcaggaaagaatctcttgagacataaagtagtaatcataaaggacaagatggttaagtcaattctgttaaaactcaaggcttatattaagcaaacacttgaagtgagaagatgatccacaacttgagaagacatttataatacaaataactgatgaaggattcataatcacaaatatagagaattcctatttaaaaaaatagaaaaatagtgaagactacacaagaggaaatagggcttttaaataaatagatgttctgtagcattggtcagggaaatatgaattaggaccacaatgagattccattttatatccataagatttgcaaaggttgggtctgacagtaccagttgttagatctgtagggacttgtacaacattgtggatgtgtaaacaggcaccactgctttaaaaaacaattatcccttacagacttgaacatttgcagaccttatgatcttgcttccaactcccacctgtatgtccagcaaactcttgcatgtggccactaggaggaatgtgtaagaatgttcatagttacatatttataatagttaataactggaaaaagtgaaatgtatgtctgtctacaggaaaataggtgaataattagatatatgtattcattctacgggatattattcagtagtggaaatgagtgaactacagctatacctcacaataagaatgaatctcagaaaatattaaggaaaaaagcaagtttgaagagaccacatggggcgtactatttttattgagcccaaaaacaagcaaaaccaaagaatatgtagtctaagcatacgtatacaataaaactatgctattaaaaaaaaaagaaggtaactgataaaccaaaattgagcatagtaattacccacagaaggaggaagtggaagggacaggagcacataggtagatgccaagttatgcagctgttctggttcctcctggtaggcttacaagtgtttactatatgctattaatacattatactttataactaatagataacagttttttacatattaaatatgttctacttaaatatattataaaaaataaaggcaaagtggaatgataacctaaaaaaaaaaat

SEQ ID NO: 296699 - DNA, 2973 bp, Homo sapiens
aagcacaaattgataatcatatgctcagatccatagcgctatgtatccaaatgctttctggttttcgaagactatttagtggaaccttgtagaggagcagggtcttcctgcagtgcctggaaaacaggcgctgtttttttgggaccttgcgtgaagagcagtgagcagggttcctgtggtttccctggtccctctgagatggggacagactgaagacagaggtcgtttgatttcaaagcaagtcaacctgcttttttctgtttttacagtggaatctaggaggccacttagtcgtctttttttcctcttagaagaaaagcctgaaactgagttgaatagagaagtgtgaccctgtgacaaaatgatactgtgagaaatggggcattttaatctaagtggttataacagtggattctgacggggaaggtgtagctctgttctcttcggaagacctcgttttctaaaggctggactaaatggctgcagaactccctttggcaaaaggcatgcgctcactgcttgcttgtcagaaacactgaagccatttgccccagtgtggtcaagcagccatgctttctgggcattttcgtcctcccataatttcatatttccgtacccctgaggaaacaaaaaggaaatgaggagagaaagttactgttaagggtggttaacattttttttgttttgttttgttttggttttttttttttgagacagagtctggctctgtcgcccaggctggagtgcaggggcgcaatctcggctcatagcaagctccgcctcctgggttcatgccattctcctgcctcagcctccagagtagctgggactacaggtgcccaccaccacacccggctaattttttgtgtttttacaaaatacaaaaaagtagagacaggatttcactgtgttagccaggatggtcttgatctcccgacctcgtgatctgcccacctcagcctcccaaaatgctgggattacaggcgtgagccaccgagcctggccggttaacatcttttaattgtttccaggattgagcaggttctcagctgggctctgatatcccgtgcggagttggacaagtgggcagcataaagtcactcatttcttaccattttattcccctcaattctcaatatattcagtaatgaagaatggtgccaccactcaagcaacaagcctcaaactcaaccatgtcatctttttcttggatgattgcagttatttcaaaaatttgcatgcaaaatatacactcatcctacttcaagatggtggtggcaatagtcaggagaaggtaacattggagtcctggtttgattcgaaggatgaagacgaagaagcaagggaggaacaaatgaagaaccatctttgttcatgaataggaatattcaagattataaaggtatcaggtctcctaaaattgatctatggatttaataccattttcaatggaaattccaacagattttattgaatgaaacaagcaggtgtttatatggagtagcaaaggacttaaaattaccaaatgcttctaaatatgaaggagaggttggggacacgcaccctatgtgataccaagttttattgtcaagacagtgtcatggtgcagaggtaggcattctgagcaggggaacaaaataagggcctagaaactcacccgtgcatatgttgacctttgcaaaatgacctggtgacatggcaagtcagtggggacaggaaggaccactccctaagtaatcccagaacaatggctattcatgtgggaaaaaaagaaattttactttctctcaccttacctggtgataagttccaaatatgttaagggctttaatacaaaaagcaaaaattgtcagtgtttggatgaaaaaagccttagggcaggaaagaatctcttgagacataaagtagtaatcataaaggacaagatggttaagtcaattctgttaaaactcaaggcttatattaagcaaacacttgaagtgagaagatgatccacaacttgagaagacatttataatacaaataactgatgaaggattcataatcacaaatatagagaattcctatttaaaaaaatagaaaaatagtgaagactacacaagaggaaatagggcttttaaataaatagatgttctgtagcattggtcagggaaatatgaattaggaccacaatgagattccattttatatccataagatttgcaaaggttgggtctgacagtaccagttgttagatctgtagggacttgtacaacattgtggatgtgtaaacaggcaccactgctttaaaaaacaattatcccttacagacttgaacatttgcagaccttatgatcttgcttccaactcccacctgtatgtccagcaaactcttgcatgtggccactaggaggaatgtgtaagaatgttcatagttacatatttataatagttaataactggaaaaagtgaaatgtatgtctgtctacaggaaaataggtgaataattagatatatgtattcattctacgggatattattcagtagtggaaatgagtgaactacagctatacctcacaataagaatgaatctcagaaaatattaaggaaaaaagcaagtttgaagagaccacatggggcgtactatttttattgagcccaaaaacaagcaaaaccaaagaatatgtagtctaagcatacgtatacaataaaactatgctattaaaaaaaaaagaaggtaactgataaaccaaaattgagcatagtaattacccacagaaggaggaagtggaagggacaggagcacataggtagatgccaagttatgcagctgttctggttcctcctggtaggcttacaagtgtttactatatgctattaatacattatactttataactaatagataacagttttttacatattaaatatgttctacttaaatatattataaaaaataaaggcaaagtggaatgataacctaaaaaaaaaaat

SEQ ID NO: 296700 - DNA, 2161 bp, Homo sapiens
tgactcagcgagcgccacggtatcttggattacagacgtgcgccaccatctctggctaatttttgtatttttagtagagacggggtttcgccatgttggccaggctagttctcaaactcccgacctcaggagatctacccacctcagcctcccaaaatgctgggattacaggcgtgagccaccgagcctggccggttaacatcttttaattgtttccaggattgagcaggttctcagctgggctctgatatcccgtgcggagttggacaagtgggcagcataaagtcactcatttcttaccattttattcccctcaattctcaatatattcagtaatgaagaatggtgccaccactcaagcaacaagcctcaaactcaaccatgtcatctttttcttggatgattgcagttatttcaaaaatttgcatgcaaaatatacactcatcctacttcaagatggtggtggcaatagtcaggagaaggtaacattggagtcctggtttgattcgaaggatgaagacgaagaagcaagggaggaacaaatgaagaaccatctttgttcatgaataggaatattcaagattataaaggtatcaggtctcctaaaattgatctatggatttaataccattttcaatggaaattccaacagattttattgaatgaaacaagcaggtgtttatatggagtagcaaaggacttaaaattaccaaatgcttctaaatatgaaggagaggttggggacacgcaccctatgtgataccaagttttattgtcaagacagtgtcatggtgcagaggtaggcattctgagcaggggaacaaaataagggcctagaaactcacccgtgcatatgttgacctttgcaaaatgacctggtgacatggcaagtcagtggggacaggaaggaccactccctaagtaatcccagaacaatggctattcatgtgggaaaaaaagaaattttactttctctcaccttacctggtgataagttccaaatatgttaagggctttaatacaaaaagcaaaaattgtcagtgtttggatgaaaaaagccttagggcaggaaagaatctcttgagacataaagtagtaatcataaaggacaagatggttaagtcaattctgttaaaactcaaggcttatattaagcaaacacttgaagtgagaagatgatccacaacttgagaagacatttataatacaaataactgatgaaggattcataatcacaaatatagagaattcctatttaaaaaaatagaaaaatagtgaagactacacaagaggaaatagggcttttaaataaatagatgttctgtagcattggtcagggaaatatgaattaggaccacaatgagattccattttatatccataagatttgcaaaggttgggtctgacagtaccagttgttagatctgtagggacttgtacaacattgtggatgtgtaaacaggcaccactgctttaaaaaacaattatcccttacagacttgaacatttgcagaccttatgatcttgcttccaactcccacctgtatgtccagcaaactcttgcatgtggccactaggaggaatgtgtaagaatgttcatagttacatatttataatagttaataactggaaaaagtgaaatgtatgtctgtctacaggaaaataggtgaataattagatatatgtattcattctacgggatattattcagtagtggaaatgagtgaactacagctatacctcacaataagaatgaatctcagaaaatattaaggaaaaaagcaagtttgaagagaccacatggggcgtactatttttattgagcccaaaaacaagcaaaaccaaagaatatgtagtctaagcatacgtatacaataaaactatgctattaaaaaaaaaagaaggtaactgataaaccaaaattgagcatagtaattacccacagaaggaggaagtggaagggacaggagcacataggtagatgccaagttatgcagctgttctggttcctcctggtaggcttacaagtgtttactatatgctattaatacattatactttataactaatagataacagttttttacatattaaatatgttctacttaaatatattataaaaaataaaggcaaagtggaatgataacctaaaaaaaaaaat

SEQ ID NO: 296701 - DNA, 1920 bp, Homo sapiens
ctctgggcccaagcagtcctcctgccttagccttccgagtagctgggactacgggcatgtgccaccatgcctggctaatttttcgtgttgttttggttagagacagggtctttctatgttgcacagactggtcttgaactcctggcctcaagcagtcctctcaccttggcttcccaaagtgctatgattacaagcgtgagccaccatgcctggctgatgtgttaccttatgttagcatatagctaccctgtgaagtagggttataatatatttgaatgaagagactgagactcagagagtttaagggacttgattaagttcttataaccttagcatgttaacattgtctgaattcaagtttcgtgtttatttattcataccacgtgcctttctgtgaaatccttacacctttttgcatctctaccttctaatgcagtgccttactcttagtaaatggtcaaaaggtagctgctgataatggtggtaatgaaagggcatgtttattctgggggcacaagaaactctaaagctcataattgacattataatctcttgttgcaggaatacttgctggctggggcagatatcattgaaacaaatacttttagcagcactagtattgcccaagctgactatggccttgaacacttggcctaccggatgaacatgtgctctgcaggagtggccagaaaagctgccgaggaggtaactctccagacaggaattaagaggtttgtggcaggggctctgggtccgactaataagacactctctgtgtccccatctgtggaaaggccggattataggaacatcacatttgatgagcttgttgaagcataccaagagcaggccaaaggacttctggatggcggggttgatatcttactcattgaaactatttttgatactgccaatgccaaggcagccttgtttgcactccaaaatctttttgaggagaaatatgctccccggcctatctttatttcagggacgatcgttgataaaagtgggcggactctttccggacagacaggagagggatttgtcatcagcgtgtctcatggagaaccactctgcattggattaaattgtgctttgggtgcagctgaaatgagaccttttattgaaataattggaaaatgtacaacagcctatgtcctctgttatcccaatgcaggtcttcccaacacctttggtgactatgatgaaacgccttctatgatggccaagcacctaaaggattttgctatggatggcttggtcaatatagttggaggatgctgtgggtcaacaccagatcatatcagggaaattgctgaagctgtgaaaaattgtaagcctagagttccacctgccactgcttttgaaggacatatgttactgtctggtctagagcccttcaggattggaccgtacaccaactttgttaacattggagagcgctgtaatgttgcaggatcaaggaagtttgctaaactcatcatggcaggaaactatgaagaagccttgtgtgttgccaaagtgcaggtggaaatgggagcccaggtgttggatgtcaacatggatgatggcatgctagatggtccaagtgcaatgaccagattttgcaacttaattgcttccgagccagacatcgcaaaggtacctttgtgcatcgactcctccaattttgctgtgattgaagctgggttaaagtgctgccaagggaagtgcattgtcaatagcattagtctgaaggaaggagaggacgacttcttggagaaggccaggaagattaaaaagtatggagctgctatggtggtcatggcttttgatgaagaaggacaggtgagtggtttcttttggcctaatccattgtgtttcccaggttagatagtggtgggagaaaatgcaagtctgaaacagctacatatatacata

SEQ ID NO: 296702 - DNA, 281 bp, Homo sapiens
ttagcaatggcacctgcttcagcagtctcaggcctctacttctccaatttgaagtccaaatattttgctgtggggaagatttccaaggatcaggtaagctagctgttgcattatatgtggcttgcctagttcaaatgaaattctagaacctctctcattttaaatgtgaatgagaataaagtgaggggaaaggatgaagaaatttactccagttaatgtcttaatttgatttcaatagaatacctctattctagccctcacttctacatgcaagccacaca

SEQ ID NO: 296703 - DNA, 3402 bp, Homo sapiens
  misc_feature (2)..(3): n is a, c, g, or t
gnnagaaagtaactccaggacgagaccggagcgacccgcgcagcgagcataggcggcgaagctgcgcccggcgcccgagaccggcagctgcgtggggcgggggctgcgcccgagcccgatctgccggctccgagcagtggtctcggaaagagggtcgtggtcccgcacggatgcgcttgttgggagaaaccttggagattcacggcaaggcgtaaagcctggggcttccaacgatactctgggcagggatggaagcctagatgcctcaccgcaaggagcggccgagcgggtcctcgcttcacacacacggcagcaccggcaccgcggagggaggaaacatgtcccggctgtctctcacccggtcgcctgtgtctcccctggctgcccagggcatccccctgccagcccagctcaccaagtccaatgcacctgtgcacatcgatgtgggcggccacatgtacaccagcagcctggccacgctcaccaagtaccctgactccaggataagccgcctcttcaatggcactgaacccatcgtcctggacagtttgaagcaacattatttcattgaccgggatggggagattttccgctacgtcctgagcttcctgcggacgtccaagctgctgcttccggatgactttaaggacttcagtctgctgtacgaggaggcgcgctactatcagctccagcccatggtgcgcgagctggagcgctggcagcaggagcaggagcagcggcgccgcagccgggcctgtgactgcctggtggtgcgcgtcacgcccgacttgggcgagcggatcgcactcagcggcgagaaggccctcatcgaggaggtcttccccgagaccggagacgtcatgtgcaactccgtcaacgccggctggaaccaggaccccacgcacgtcatccgcttcccgctcaatggctactgccggctcaactcggtacaggatgttctataaaaatggcccagagtattttcaacaaagcgtgcttcatttgacacccagagtctgactttggattcgaactaaacccaggcaacaggcgaggcaggacagaggctgagtggaaaggtggtctggagccccttccctctccctgctgaccttggagtcgcaggcacccaccagctgccaagagaatccctggaccggctcttcctggatgggtccaagaattggacagctcagatggagtgagggcctattttccaacagctcttcgcagacccaagagcttggcacatttccgggttagggtggaatgggctttgcagggaagagggccccctgtgcacgcattccacagcctgtcggtcagaacttgctagttgcaggagacgggtgttacacgcagtcatcagacctcaccctcacagaggcacaaacccacatagttgtggacgcctgcagagactcaaatattgagaggacttctcctttttctctccctccagagctcccacgagctgatgcacccccaggcttcaaaccacctggaatgcacagctcagggaagctggtggatgcctagaggctgaaggacagggaactctccattattggggcaggactcagggaggacacttggggccatgtgtctggagagagggcataggttacaccctacagaataaagaagggacccaaagcctctttttgcctcccggaatcaaggccctgagggcagcaggatggtggcctgggtggggtcgtccaactaggtttgctaacctgaggggtcactgggcctggccacttctgtccctctggtggtggaacccagcacgtggttctgtagggacctttgtcagtgagcaagactgagatcgtcacaggagaaggtgcccttgctggctgccccagcaggcacccacctccctgccaggccaagccaggtgtcctcttgcagcttggccttgatgacctctgtttcttcctgggcaggtcctggagcggctgttccagaggggtttcagcgtggctgcgtcctgtgggggcggtgtggactcctcccagttcagcgagtatgtgctttgccgggaggagcggcggccgcagcccacccccactgctgttcgaatcaagcaggaacccctggactaggccctgcttcagtgcccacctgggcccccccagggacctggaaacagtgctggggagttctgcctgtgtatacttggccgtgggcatgagaccgagggtgaggctggagggtccaaagctggcccagcgagcaccagggtcccaggtgtcatggcaacagaacgtgggatgctggaggcatgcctgcagaaggactgttgatgcgacccaaagatacagcggtgggatctctgctgccagctctcccagcccctcagcttcgcagcctggcgcagcatcctctgaggccccggggcctgttggggcggggttggaagagccgtctgcagctacttcagaggagctgtttatccctctccacgcggggcagactctggcgggtctcctagcgtccgagagatggcttatttttctacagtatttaaaatggatgcagccctaactgcaaaagtcagagaggctgacaaggaccaatgcttctttatctggtgctcagttctcagtcagacgtgcagcatggctgcagggtggaccagctgcctggcattcaggcccagatgcctgcagggctggggctctcgggacagatgcagggatgtgtgctgcagggctgctgggaggagagtggtgggggcctgagggctgagtgattctgtaaccacctgagaccttcacgtttgctgccgttgggggctcaggctgcactccccgggtcacctgacctgctgcccaggggcttccagtcctgtctgtgtggactggcacctgggctgctggagaagtctcctcccgttcggaccagcctcagggctgcacgttacctcaggaatgggccccaccatgaaggggcccatctgtcagcagcgtcttctaggtccccagctcagggagccatccccagctccagttttctcatgcgaatatgcacagttttaattcacgttgttacactagcctgccgatgagacccagacacaggcagacctggcgctcttgacccctgattccagtgaggactggccctgaggagtccttgcagacctgctgcctgccccacgacaggcccaaagatggaccccccctggccttgtgacagctccccaagtgttctccggtggagaaactgcagaggactggtgggcggggctccccagccatcaccatcctgtgtacaatggctgtagacttgtatatggctcctttaatattgtaaagatgctgatgtacaattgtcgtgcatttgtgtgaacacattgcgttcccagtccatgccataaatgatgctctcaag

SEQ ID NO: 296704 - DNA, 3933 bp, Homo sapiens
  misc_feature (2)..(3): n is a, c, g, or t
gnnagaaagtaactccaggacgagaccggagcgacccgcgcagcgagcataggcggcgaagctgcgcccggcgcccgagaccggcagctgcgtggggcgggggctgcgcccgagcccgatctgccggctccgagcagtggtctcggaaagagggtcgtggtcccgcacggatgcgcttgttgggagaaaccttggagattcacggcaaggcgtaaagcctggggcttccaacgatactctgggcagggatggaagcctagatgcctcaccgcaaggagcggccgagcgggtcctcgcttcacacacacggcagcaccggcaccgcggagggaggaaacatgtcccggctgtctctcacccggtcgcctgtgtctcccctggctgcccagggcatccccctgccagcccagctcaccaagtccaatgcacctgtgcacatcgatgtgggcggccacatgtacaccagcagcctggccacgctcaccaagtaccctgactccaggataagccgcctcttcaatggcactgaacccatcgtcctggacagtttgaagcaacattatttcattgaccgggatggggagattttccgctacgtcctgagcttcctgcggacgtccaagctgctgcttccggatgactttaaggacttcagtctgctgtacgaggaggcgcgctactatcagctccagcccatggtgcgcgagctggagcgctggcagcaggagcaggagcagcggcgccgcagccgggcctgtgactgcctggtggtgcgcgtcacgcccgacttgggcgagcggatcgcactcagcggcgagaaggccctcatcgaggaggtcttccccgagaccggagacgtcatgtgcaactccgtcaacgccggctggaaccaggaccccacgcacgtcatccgcttcccgctcaatggctactgccggctcaactcggtacaggtcctggagcggctgttccagaggggtttcagcgtggctgcgtcctgtgggggcggtgtggactcctcccagttcagcgagtatgtgctttgccgggaggagcggcggccgcagcccacccccactgctgttcgaatcaagcaggaacccctggactaggccctgcttcagtgcccacctgggcccccccagggacctggaaacagtgctggggagttctgcctgtgtatacttggccgtgggcatgagaccgagggtgaggctggagggtccaaagctggcccagcgagcaccagggtcccaggtgtcatggcaacagaacgtgggatgctggaggcatgcctgcagaaggactgttgatgcgacccaaagatacagcggtgggatctctgctgccagctctcccagcccctcagcttcgcagcctggcgcagcatcctctgaggccccggggcctgttggggcggggttggaagagccgtctgcagctacttcagaggagctgtttatccctctccacgcggggcagactctggcgggtctcctagcgtccgagagatggcttatttttctacagtatttaaaatggatgcagccctaactgcaaaagtcagagaggctgacaaggaccaatgcttctttatctggtgctcagttctcagtcagacgtgcagcatggctgcagggtggaccagctgcctggcattcaggcccagatgcctgcagggctggggctctcgggacagatgcagggatgtgtgctgcagggctgctgggaggagagtggtgggggcctgagggctgagtgattctgtaaccacctgagaccttcacgtttgctgccgttgggggctcaggctgcactccccgggtcacctgacctgctgcccaggggcttccagtcctgtctgtgtggactggcacctgggctgctggagaagtctcctcccgttcggaccagcctcagggctgcacgttacctcaggaatgggccccaccatgaaggggcccatctgtcagcagcgtcttctaggtccccagctcagggagccatccccagctccagttttctcatgcgaatatgcacagttttaattcacgttgttacactagcctgccgatgagacccagacacaggcagacctggcgctcttgacccctgattccagtgaggactggccctgaggagtccttgcagacctgctgcctgccccacgacaggcccaaagatggaccccccctggccttgtgacagctccccaagtgttctccggtggagaaactgcagaggactggtgggcggggctccccagccatcaccatcctgtgtacaatggctgtagacttgtatatggctcctttaatattgtaaagatgctgatgtacaattgtcgtgcatttgtgtgaacacattgcgttcccagtccatgccataaatgatgctctcaagcaaaagactggaggctctgtcctgtgcagaagcagcagccagactcccgcattcgatgttgtgcagggaggtttgggggcggaacggattcctcccttggatccttcagttcccatcgaggaataacccgcagcagtggtggaggaaggtcagtggctgggtcctgagcttggtgttatttattgcatttgggtgcctgtcccctcagggcagcacagattctgaattctgattcacagtccctagccagatgggaactgggaaagagacagaaggcgtctgggtgcttttgaaccctgtctcaaatgtttgggattttctctctcactattctttggttggggatgatgtcctctttagacccccacgtaatggtatgagaaggtggcaggcagtggctcagccagccagggggcaccaagtcatgcagccagcgtgagacctgcagttcacctaagcacagaacgagatctcagtatgcctccatgtaaacagattcacataggcctccaatttcaatgagaccttttgcattttttctcaaagcccttatgttctaacccatgagaaccattttacctgccctctaagggccaccagcttcgacctgcctcaggggacagcagcacagaccagtggctccctgtccaaggccgcagagcagacgccatcccactgtacaatcgaatttgctggacaaacttgataggtttctctgcttagcaacgagcctatagttagttggcacatctgcgttttggcatctgaggctcccatctgagtggaggagaaagtgttgtgtttattagcaggaagtcttgtgaaaacagctcgctgctgtgtatgtttatggatttttctgatataacagccagcatggttaccgagtggtagagattctcgaacattctcaaactctctttttgggtaaatgattgtgctaaaaataaaatttattaataaagaaggggaaaaaggagtaactctacctgactaaatgttactctaatttatttatttctttactaattaagtaaaaccaggaagtatgattttacatcaaccagagaatttctgaatttatagggaaacactatgtccccataatgatgctataattctaatatatctagtccccataaacagtaagtacaaattatcattcctttaaagcatttttacacttcctggaatgagtatattatcagcaatcttttgtcaaatgccagccgtataaatgttacttctgctctttgtaaacctcaaaactcattattcttgattataagcaactggacagaaccatgccaaagcttccccgtttcccaccaaacccctgccagtgagtgcagagaactcgcaaagccacagcaggcggtctcagccaccgtcccgctcacaggggcccaatgccaggtcacaacactaagaatatctttcaaaaaatgtgtctttttttttttttttaaagctactgcttgactgttccttagaataaataaaggatattttataaattaaaaaaaaagc

SEQ ID NO: 296705 - DNA, 3391 bp, Homo sapiens
  misc_feature (2)..(3): n is a, c, g, or t
gnnagaaagtaactccaggacgagaccggagcgacccgcgcagcgagcataggcggcgaagctgcgcccggcgcccgagaccggcagctgcgtggggcgggggctgcgcccgagcccgatctgccggctccgagcagtggtctcggaaagagggtcgtggtcccgcacggatgcgcttgttgggagaaaccttggagattcacggcaaggcgtaaagcctggggcttccaacgatactctgggcagggatggaagcctagatgcctcaccgcaaggagcggccgagcgggtcctcgcttcacacacacggcagcaccggcaccgcggagggaggaaacatgtcccggctgtctctcacccggtcgcctgtgtctcccctggctgcccagggcatccccctgccagcccagctcaccaagtccaatgcacctgtgcacatcgatgtgggcggccacatgtacaccagcagcctggccacgctcaccaagtaccctgactccaggataagccgcctcttcaatggcactgaacccatcgtcctggacagtttgaagcaacattatttcattgaccgggatggggagattttccgctacgtcctgagcttcctgcggacgtccaagctgctgcttccggatgactttaaggacttcagtctgctgtacgaggaggcgcgctactatcagctccagcccatggtgcgcgagctggagcgctggcagcaggagcaggagcagcggcgccgcagccgggcctgtgactgcctggtggtgcgcgtcacgcccgacttgggcgagcggatcgcactcagcggcgagaaggccctcatcgaggaggtcttccccgagaccggagacgtcatgtgcaactccgtcaacgccggctggaaccaggaccccacgcacgtcatccgcttcccgctcaatggctactgccggctcaactcggtacaggtcctggagcggctgttccagaggggtttcagcgtggctgcgtcctgtgggggcggtgtggactcctcccagttcagcgagtatgtgctttgccgggaggagcggcggccgcagcccacccccactgctgttcgaatcaagcaggaacccctggactaggccctgcttcagtgcccacctgggcccccccagggacctggaaacagtgctggggagttctgcctgtgtatacttggccgtgggcatgagaccgagggtgaggctggagggtccaaagctggcccagcgagcaccagggtcccaggtgtcatggcaacagaacgtgggatgctggaggcatgcctgcagaaggactgttgatgcgacccaaagatacagcggtgggatctctgctgccagctctcccagcccctcagcttcgcagcctggcgcagcatcctctgaggccccggggcctgttggggcggggttggaagagccgtctgcagctacttcagaggagctgtttatccctctccacgcggggcagactctggcgggtctcctagcgtccgagagatggcttatttttctacagtatttaaaatggatgcagccctaactgcaaaagtcagagaggctgacaaggaccaatgcttctttatctggtgctcagttctcagtcagacgtgcagcatggctgcagggtggaccagctgcctggcattcaggcccagatgcctgcagggctggggctctcgggacagatgcagggatgtgtgctgcagggctgctgggaggagagtggtgggggcctgagggctgagtgattctgtaaccacctgagaccttcacgtttgctgccgttgggggctcaggctgcactccccgggtcacctgacctgctgcccaggggcttccagtcctgtctgtgtggactggcacctgggctgctggagaagtctcctcccgttcggaccagcctcagggctgcacgttacctcaggaatgggccccaccatgaaggggcccatctgtcagcagcgtcttctaggtccccagctcagggagccatccccagctccagttttctcatgcgaatatgcacagttttaattcacgttgttacactagcctgccgatgagacccagacacaggcagacctggcgctcttgacccctgattccagtgaggactggccctgaggagtccttgcagacctgctgcctgccccacgacaggcccaaagatggaccccccctggccttgtgacagctccccaagtgttctccggtggagaaactgcagaggactggtgggcggggctccccagccatcaccatcctgtgtacaatggctgtagacttgtatatggctcctttaatattgtaaagatgctgatgtacaattgtcgtgcatttgtgtgaacacattgcgttcccagtccatgccataaatgatgctctcaagcaaaagactggaggctctgtcctgtgcagaagcagcagccagactcccgcattcgatgttgtgcagggaggtttgggggcggaacggattcctcccttggatccttcagttcccatcgaggaataacccgcagcagtggtggaggaaggtcagtggctgggtcctgagcttggtgttatttattgcatttgggtgcctgtcccctcagggcagcacagattctgaattctgattcacagtccctagccagatgggaactgggaaagagacagaaggcgtctgggtgcttttgaaccctgtctcaaatgtttgggattttctctctcactattctttggttggggatgatgtcctctttagacccccacgtaatggtatgagaaggtggcaggcagtggctcagccagccagggggcaccaagtcatgcagccagcgtgagacctgcagttcacctaagcacagaacgagatctcagtatgcctccatgtaaacagattcacataggcctccaatttcaatgagaccttttgcattttttctcaaagcccttatgttctaacccatgagaaccattttacctgccctctaagggccaccagcttcgacctgcctcaggggacagcagcacagaccagtggctccctgtccaaggccgcagagcagacgccatcccactgtacaatcgaatttgctggacaaacttgataggtttctctgcttagcaacgagcctatagttagttggcacatctgcgttttggcatctgaggctcccatctgagtggaggagaaagtgttgtgtttattagcaggaagtcttgtgaaaacagctcgctgctgtgtatgtttatggatttttctgatataacagccagcatggttaccgagtggtagagattctcgaacattctcaaactctctttttgggtaaatgattgtgctaaaaataaaatttattaataaagaaggggaaaaaggagtaactcta

SEQ ID NO: 296706 - DNA, 3810 bp, Homo sapiens
  misc_feature (2)..(3): n is a, c, g, or t
gnnagaaagtaactccaggacgagaccggagcgacccgcgcagcgagcataggcggcgaagctgcgcccggcgcccgagaccggcagctgcgtggggcgggggctgcgcccgagcccgatctgccggctccgagcagtggtctcggaaagagggtcgtggtcccgcacggatgcgcttgttgggagaaaccttggagattcacggcaaggcgtaaagcctggggcttccaacgatactctgggcagggatggaagcctagatgcctcaccgcaaggagcggccgagcgggtcctcgcttcacacacacggcagcaccggcaccgcggagggaggaaacatgtcccggctgtctctcacccggtcgcctgtgtctcccctggctgcccagggcatccccctgccagcccagctcaccaagtccaatgcacctgtgcacatcgatgtgggcggccacatgtacaccagcagcctggccacgctcaccaagtaccctgactccaggataagccgcctcttcaatggcactgaacccatcgtcctggacagtttgaagcaacattatttcattgaccgggatggggagattttccgctacgtcctgagcttcctgcggacgtccaagctgctgcttccggatgactttaaggacttcagtctgctgtacgaggaggcgcgctactatcagctccagcccatggtgcgcgagctggagcgctggcagcaggagcaggagcagcggcgccgcagccgggcctgtgactgcctggtggtgcgcgtcacgcccgacttgggcgagcggatcgcactcagcggcgagaaggccctcatcgaggaggtcttccccgagaccggagacgtcatgtgcaactccgtcaacgccggctggaaccaggaccccacgcacgtcatccgcttcccgctcaatggctactgccggctcaactcggtacaggtcctggagcggctgttccagaggggtttcagcgtggctgcgtcctgtgggggcggtgtggactcctcccagttcagcgagtatgtgctttgccgggaggagcggcggccgcagcccacccccactgctgttcgaatcaagcaggaacccctggactaggccctgcttcagtgcccacctgggcccccccagggacctggaaacagtgctggggagttctgcctgtgtatacttggccgtgggcatgagaccgagggtgaggctggagggtccaaagctggcccagcgagcaccagggtcccaggtgtcatggcaacagaacgtgggatgctggaggcatgcctgcagaaggactgttgatgcgacccaaagatacagcggtgggatctctgctgccagctctcccagcccctcagcttcgcagcctggcgcagcatcctctgaggccccggggcctgttggggcggggttggaagagccgtctgcagctacttcagaggagctgtttatccctctccacgcggggcagactctggcgggtctcctagcgtccgagagatggcttatttttctacagtatttaaaatggatgcagccctaactgcaaaagtcagagaggctgacaaggaccaatgcttctttatctggtgctcagttctcagtcagacgtgcagcatggctgcagggtggaccagctgcctggcattcaggcccagatgcctgcagggctggggctctcgggacagatgcagggatgtgtgctgcagggctgctgggaggagagtggtgggggcctgagggctgagtgattctgtaaccacctgagaccttcacgtttgctgccgttgggggctcaggctgcactccccgggtcacctgacctgctgcccaggggcttccagtcctgtctgtgtggactggcacctgggctgctggagaagtctcctcccgttcggaccagcctcagggctgcacgttacctcaggaatgggccccaccatgaaggggcccatctgtcagcagcgtcttctaggtccccagctcagggagccatccccagctccagttttctcatgcgaatatgcacagttttaattcacgttgttacactagcctgccgatgagacccagacacaggcagacctggcgctcttgacccctgattccagtgaggactggccctgaggagtccttgcagacctgctgcctgccccacgacaggcccaaagatggaccccccctggccttgtgacagctccccaagtgttctccggtggagaaactgcagaggactggtgggcggggctccccagccatcaccatcctgtgtacaatggctgtagacttgtatatggctcctttaatattgtaaagatgctgatgtacaattgtcgtgcatttgtgtgaacacattgcgttcccagtccatgccataaatgatgctctcaagcaaaagactggaggctctgtcctgtgcagaagcagcagccagactcccgcattcgatgttgtgcagggaggtttgggggcggaacggattcctcccttggatccttcagttcccatcgaggaataacccgcagcagtggtggaggaaggtcagtggctgggtcctgagcttggtgttatttattgcatttgggtgcctgtcccctcagggcagcacagattctgaattctgattcacagtccctagccagatgggaactgggaaagagacagaaggcgtctgggtgcttttgaaccctgtctcaaatgtttgggattttctctctcactattctttggttggggatgatgtcctctttagacccccacgtaatggtatgagaaggtggcaggcagtggctcagccagccagggggcaccaagtcatgcagccagcgtgagacctgcagttcacctaagcacagaacgagatctcagtatgcctccatgtaaacagattcacataggcctccaatttcaatgagaccttttgcattttttctcaaagcccttatgttctaacccatgagaaccattttacctgccctctaagggccaccagcttcgacctgcctcaggggacagcagcacagaccagtggctccctgtccaaggccgcagagcagacgccatcccactgtacaatcgaatttgctggacaaacttgataggtttctctgcttagcaacgagcctatagttagttggcacatctgcgttttggcatctgaggctcccatctgagtggaggagaaagtgttgtgtttattagcaggaagtcttgtgaaaacagctcgctgctgtgtatgtttatggatttttctgatataacagccagcatggttaccgagtggtagagattctcgaacattctcaaactctctttttgggtaaatgattgtgctaaaaataaaatttattaataaagaaggggaaaaaggagtaactctacctgactaaatgttactctaatttatttatttctttactaattaagtaaaaccaggaagtatgattttacatcaaccagagaatttctgaatttatagggaaacactatgtccccataatgatgctataattctaatatatctagtccccataaacagtaagtacaaattatcattcctttaaagcatttttacacttcctggaatgagtatattatcagcaatcttttgtcaaatgccagccgtataaatgttacttctgctctttgtaaacctcaaaactcattattcttgattataagcaactggacagaaccatgccaaagcttccccgtttcagcgtggctgcgtcctgtgggggcggtgtggactcctcccagttcagcgagtatgtgctttgccgggaggagcggcggccgc

SEQ ID NO: 296707 - DNA, 5061 bp, Homo sapiens
gggctggcggcgcgggggtgcccagcacaaaggcctggtgcaagagtggggttgcccacgtgggctggtcctggccgcgggtggaccctccccacgcgggcggtctcggagcttcctgccgcgcggtgtgtgtgtgtgtgtgtgtgtgtgtgtgtgtgcgcgcgcgcgcgcttgtggaggtccccgcactctggcccctgttctgggccgagcgccctgcagagctggcgagtttccggggtcagaaacgggctcacgcaactggggcttcgggatgcacaagtcccggcttggcgcccaaaatcagagaaagtctccagtgggacagatgtgcgtcctctgacgcccaccccacgagtccgaaacctggcaggaggggctgtcgcgctggtggtggtcccgggcgcgcagggtttggggctgggagaggggccgcgatgggagggatcgccgcctgcagatccggttccccgctgcccgcccgcaccccctgacctggacgcgcgcacccggcacacactcgcaaacacacccgggggcggacccccgcctctgcagcgcctttctgtcttccggcggcccccacccgcgactgcagaaagataagcttcaagttttcgctccgtatctcaaatgtgcatgaaggaatttaactgcacgagtgaataacagcattagtttcaattaatttttttttaatcccggcaacaataaactttgagaacaaaagcgcttttacgtccttaattaggcgagcttcccatctgtggtctccaagtgtctgcctcttgatttaactttgtccccgccccgcctccgcggcaacccctcccagcccagccccgcgcttcgggtgccgcggccaccccgccccgcggcgcctccagccttggcccaagccctctcccgtcgcccctaagttcacaccggccggctggctccgcggcggaggcgggagggggggggtggggaggctggcgcgcaccaggtggcccgcctgcctctccggggccacccctgggacaattgtgcaggcccccaggactttcgccccgggccagcgccctgagtgcggagccgaggggagctcgagaggcgccttctgtttaccttttatggttaaaataacagcttagcaaagaagcgacttcagaagaagcgatttagtgaaatcgtctcaagctgccgcagctcagccagtttaatcacccccagagagccgaacaactgcgagcgcaatgggacacaaaatcattttgtgtcagtggtctcggaaagagggtcgtggtcccgcacggatgcgcttgttgggagaaaccttggagattcacggcaaggcgtaaagcctggggcttccaacgatactctgggcagggatggaagcctagatgcctcaccgcaaggagcggccgagcgggtcctcgcttcacacacacggcagcaccggcaccgcggagggaggaaacatgtcccggctgtctctcacccggtcgcctgtgtctcccctggctgcccagggcatccccctgccagcccagctcaccaagtccaatgcacctgtgcacatcgatgtgggcggccacatgtacaccagcagcctggccacgctcaccaagtaccctgactccaggataagccgcctcttcaatggcactgaacccatcgtcctggacagtttgaagcaacattatttcattgaccgggatggggagattttccgctacgtcctgagcttcctgcggacgtccaagctgctgcttccggatgactttaaggacttcagtctgctgtacgaggaggcgcgctactatcagctccagcccatggtgcgcgagctggagcgctggcagcaggagcaggagcagcggcgccgcagccgggcctgtgactgcctggtggtgcgcgtcacgcccgacttgggcgagcggatcgcactcagcggcgagaaggccctcatcgaggaggtcttccccgagaccggagacgtcatgtgcaactccgtcaacgccggctggaaccaggaccccacgcacgtcatccgcttcccgctcaatggctactgccggctcaactcggtacaggtcctggagcggctgttccagaggggtttcagcgtggctgcgtcctgtgggggcggtgtggactcctcccagttcagcgagtatgtgctttgccgggaggagcggcggccgcagcccacccccactgctgttcgaatcaagcaggaacccctggactaggccctgcttcagtgcccacctgggcccccccagggacctggaaacagtgctggggagttctgcctgtgtatacttggccgtgggcatgagaccgagggtgaggctggagggtccaaagctggcccagcgagcaccagggtcccaggtgtcatggcaacagaacgtgggatgctggaggcatgcctgcagaaggactgttgatgcgacccaaagatacagcggtgggatctctgctgccagctctcccagcccctcagcttcgcagcctggcgcagcatcctctgaggccccggggcctgttggggcggggttggaagagccgtctgcagctacttcagaggagctgtttatccctctccacgcggggcagactctggcgggtctcctagcgtccgagagatggcttatttttctacagtatttaaaatggatgcagccctaactgcaaaagtcagagaggctgacaaggaccaatgcttctttatctggtgctcagttctcagtcagacgtgcagcatggctgcagggtggaccagctgcctggcattcaggcccagatgcctgcagggctggggctctcgggacagatgcagggatgtgtgctgcagggctgctgggaggagagtggtgggggcctgagggctgagtgattctgtaaccacctgagaccttcacgtttgctgccgttgggggctcaggctgcactccccgggtcacctgacctgctgcccaggggcttccagtcctgtctgtgtggactggcacctgggctgctggagaagtctcctcccgttcggaccagcctcagggctgcacgttacctcaggaatgggccccaccatgaaggggcccatctgtcagcagcgtcttctaggtccccagctcagggagccatccccagctccagttttctcatgcgaatatgcacagttttaattcacgttgttacactagcctgccgatgagacccagacacaggcagacctggcgctcttgacccctgattccagtgaggactggccctgaggagtccttgcagacctgctgcctgccccacgacaggcccaaagatggaccccccctggccttgtgacagctccccaagtgttctccggtggagaaactgcagaggactggtgggcggggctccccagccatcaccatcctgtgtacaatggctgtagacttgtatatggctcctttaatattgtaaagatgctgatgtacaattgtcgtgcatttgtgtgaacacattgcgttcccagtccatgccataaatgatgctctcaagcaaaagactggaggctctgtcctgtgcagaagcagcagccagactcccgcattcgatgttgtgcagggaggtttgggggcggaacggattcctcccttggatccttcagttcccatcgaggaataacccgcagcagtggtggaggaaggtcagtggctgggtcctgagcttggtgttatttattgcatttgggtgcctgtcccctcagggcagcacagattctgaattctgattcacagtccctagccagatgggaactgggaaagagacagaaggcgtctgggtgcttttgaaccctgtctcaaatgtttgggattttctctctcactattctttggttggggatgatgtcctctttagacccccacgtaatggtatgagaaggtggcaggcagtggctcagccagccagggggcaccaagtcatgcagccagcgtgagacctgcagttcacctaagcacagaacgagatctcagtatgcctccatgtaaacagattcacataggcctccaatttcaatgagaccttttgcattttttctcaaagcccttatgttctaacccatgagaaccattttacctgccctctaagggccaccagcttcgacctgcctcaggggacagcagcacagaccagtggctccctgtccaaggccgcagagcagacgccatcccactgtacaatcgaatttgctggacaaacttgataggtttctctgcttagcaacgagcctatagttagttggcacatctgcgttttggcatctgaggctcccatctgagtggaggagaaagtgttgtgtttattagcaggaagtcttgtgaaaacagctcgctgctgtgtatgtttatggatttttctgatataacagccagcatggttaccgagtggtagagattctcgaacattctcaaactctctttttgggtaaatgattgtgctaaaaataaaatttattaataaagaaggggaaaaaggagtaactctacctgactaaatgttactctaatttatttatttctttactaattaagtaaaaccaggaagtatgattttacatcaaccagagaatttctgaatttatagggaaacactatgtccccataatgatgctataattctaatatatctagtccccataaacagtaagtacaaattatcattcctttaaagcatttttacacttcctggaatgagtatattatcagcaatcttttgtcaaatgccagccgtataaatgttacttctgctctttgtaaacctcaaaactcattattcttgattataagcaactggacagaaccatgccaaagcttccccgtttcccaccaaacccctgccagtgagtgcagagaactcgcaaagccacagcaggcggtctcagccaccgtcccgctcacaggggcccaatgccaggtcacaacactaagaatatctttcaaaaaatgtgtctttttttttttttttaaagctactgcttgactgttccttagaataaataaaggatattttataaattaaaaaaaaagc

SEQ ID NO: 296708 - DNA, 4064 bp, Homo sapiens
  misc_feature (2)..(3): n is a, c, g, or t
gnnagaaagtaactccaggacgagaccggagcgacccgcgcagcgagcataggcggcgaagctgcgcccggcgcccgagaccggcagctgcgtggggcgggggctgcgcccgagcccgatctgccggctccgagcttagcaaagaagcgacttcagaagaagcgatttagtgaaatcgtctcaagctgccgcagctcagccagtttaatcacccccagagagccgaacaactgcgagcgcaatgggacacaaaatcattttgtgtcagtggtctcggaaagagggtcgtggtcccgcacggatgcgcttgttgggagaaaccttggagattcacggcaaggcgtaaagcctggggcttccaacgatactctgggcagggatggaagcctagatgcctcaccgcaaggagcggccgagcgggtcctcgcttcacacacacggcagcaccggcaccgcggagggaggaaacatgtcccggctgtctctcacccggtcgcctgtgtctcccctggctgcccagggcatccccctgccagcccagctcaccaagtccaatgcacctgtgcacatcgatgtgggcggccacatgtacaccagcagcctggccacgctcaccaagtaccctgactccaggataagccgcctcttcaatggcactgaacccatcgtcctggacagtttgaagcaacattatttcattgaccgggatggggagattttccgctacgtcctgagcttcctgcggacgtccaagctgctgcttccggatgactttaaggacttcagtctgctgtacgaggaggcgcgctactatcagctccagcccatggtgcgcgagctggagcgctggcagcaggagcaggagcagcggcgccgcagccgggcctgtgactgcctggtggtgcgcgtcacgcccgacttgggcgagcggatcgcactcagcggcgagaaggccctcatcgaggaggtcttccccgagaccggagacgtcatgtgcaactccgtcaacgccggctggaaccaggaccccacgcacgtcatccgcttcccgctcaatggctactgccggctcaactcggtacaggtcctggagcggctgttccagaggggtttcagcgtggctgcgtcctgtgggggcggtgtggactcctcccagttcagcgagtatgtgctttgccgggaggagcggcggccgcagcccacccccactgctgttcgaatcaagcaggaacccctggactaggccctgcttcagtgcccacctgggcccccccagggacctggaaacagtgctggggagttctgcctgtgtatacttggccgtgggcatgagaccgagggtgaggctggagggtccaaagctggcccagcgagcaccagggtcccaggtgtcatggcaacagaacgtgggatgctggaggcatgcctgcagaaggactgttgatgcgacccaaagatacagcggtgggatctctgctgccagctctcccagcccctcagcttcgcagcctggcgcagcatcctctgaggccccggggcctgttggggcggggttggaagagccgtctgcagctacttcagaggagctgtttatccctctccacgcggggcagactctggcgggtctcctagcgtccgagagatggcttatttttctacagtatttaaaatggatgcagccctaactgcaaaagtcagagaggctgacaaggaccaatgcttctttatctggtgctcagttctcagtcagacgtgcagcatggctgcagggtggaccagctgcctggcattcaggcccagatgcctgcagggctggggctctcgggacagatgcagggatgtgtgctgcagggctgctgggaggagagtggtgggggcctgagggctgagtgattctgtaaccacctgagaccttcacgtttgctgccgttgggggctcaggctgcactccccgggtcacctgacctgctgcccaggggcttccagtcctgtctgtgtggactggcacctgggctgctggagaagtctcctcccgttcggaccagcctcagggctgcacgttacctcaggaatgggccccaccatgaaggggcccatctgtcagcagcgtcttctaggtccccagctcagggagccatccccagctccagttttctcatgcgaatatgcacagttttaattcacgttgttacactagcctgccgatgagacccagacacaggcagacctggcgctcttgacccctgattccagtgaggactggccctgaggagtccttgcagacctgctgcctgccccacgacaggcccaaagatggaccccccctggccttgtgacagctccccaagtgttctccggtggagaaactgcagaggactggtgggcggggctccccagccatcaccatcctgtgtacaatggctgtagacttgtatatggctcctttaatattgtaaagatgctgatgtacaattgtcgtgcatttgtgtgaacacattgcgttcccagtccatgccataaatgatgctctcaagcaaaagactggaggctctgtcctgtgcagaagcagcagccagactcccgcattcgatgttgtgcagggaggtttgggggcggaacggattcctcccttggatccttcagttcccatcgaggaataacccgcagcagtggtggaggaaggtcagtggctgggtcctgagcttggtgttatttattgcatttgggtgcctgtcccctcagggcagcacagattctgaattctgattcacagtccctagccagatgggaactgggaaagagacagaaggcgtctgggtgcttttgaaccctgtctcaaatgtttgggattttctctctcactattctttggttggggatgatgtcctctttagacccccacgtaatggtatgagaaggtggcaggcagtggctcagccagccagggggcaccaagtcatgcagccagcgtgagacctgcagttcacctaagcacagaacgagatctcagtatgcctccatgtaaacagattcacataggcctccaatttcaatgagaccttttgcattttttctcaaagcccttatgttctaacccatgagaaccattttacctgccctctaagggccaccagcttcgacctgcctcaggggacagcagcacagaccagtggctccctgtccaaggccgcagagcagacgccatcccactgtacaatcgaatttgctggacaaacttgataggtttctctgcttagcaacgagcctatagttagttggcacatctgcgttttggcatctgaggctcccatctgagtggaggagaaagtgttgtgtttattagcaggaagtcttgtgaaaacagctcgctgctgtgtatgtttatggatttttctgatataacagccagcatggttaccgagtggtagagattctcgaacattctcaaactctctttttgggtaaatgattgtgctaaaaataaaatttattaataaagaaggggaaaaaggagtaactctacctgactaaatgttactctaatttatttatttctttactaattaagtaaaaccaggaagtatgattttacatcaaccagagaatttctgaatttatagggaaacactatgtccccataatgatgctataattctaatatatctagtccccataaacagtaagtacaaattatcattcctttaaagcatttttacacttcctggaatgagtatattatcagcaatcttttgtcaaatgccagccgtataaatgttacttctgctctttgtaaacctcaaaactcattattcttgattataagcaactggacagaaccatgccaaagcttccccgtttcccaccaaacccctgccagtgagtgcagagaactcgcaaagccacagcaggcggtctcagccaccgtcccgctcacaggggcccaatgccaggtcacaacactaagaatatctttcaaaaaatgtgtctttttttttttttttaaagctactgcttgactgttccttagaataaataaaggatattttataaattaaaaaaaaagc

SEQ ID NO: 296709 - DNA, 3849 bp, Homo sapiens
  misc_feature (2)..(3): n is a, c, g, or t
gnnagaaagtaactccaggacgagaccggagcgacccgcgcagcgagcataggcggcgaagctgcgcccggcgcccgagaccggcagctgcgtggggcgggggctgcgcccgagcccgatctgccggctccgagcagtggtctcggaaagagggtcgtggtcccgcacggatgcgcttgttgggagaaaccttggagattcacggcaaggcgtaaagcctggggcttccaacgatactctgggcagggatggaagcctagatgcctcaccgcaaggagcggccgagcgggtcctcgcttcacacacacggcagcaccggcaccgcggagggaggaaacatgtcccggctgtctctcacccggtcgcctgtgtctcccctggctgcccagggcatccccctgccagcccagctcaccaagtccaatgcacctgtgcacatcgatgtgggcggccacatgtacaccagcagcctggccacgctcaccaagtaccctgactccaggataagccgcctcttcaatggcactgaacccatcgtcctggacagtttgaagcaacattatttcattgaccgggatggggagattttccgctacgtcctgagcttcctgcggacgtccaagctgctgcttccggatgactttaaggacttcagtctgctgtacgaggaggcgcgctactatcagctccagcccatggtgcgcgagctggagcgctggcagcaggagcaggagcagcggcgccgcagccgggcctgtgactgcctggtggtgcgcgtcacgcccgacttgggcgagcggatcgcactcagcggcgagaaggccctcatcgaggaggtcttccccgagaccggagacgtcatgtgcaactccgtcaacgccggctggaaccaggaccccacgcacgtcatccgcttcccgctcaatggctactgccggctcaactcggtacaggtcctggagcggctgttccagaggggtttcagcgtggctgcgtcctgtgggggcggtgtggactcctcccagttcagcgagtatgtgctttgccgggaggagcggcggccgcagcccacccccactgctgttcgaatcaagcaggaacccctggactaggccctgcttcagtgcccacctgggcccccccagggacctggaaacagtgctggggagttctgcctgtgtatacttggccgtgggcatgagaccgagggtgaggctggagggtccaaagctggcccagcgagcaccagggtcccaggtgtcatggcaacagaacgtgggatgctggaggcatgcctgcagaaggactgttgatgcgacccaaagatacagcggtgggatctctgctgccagctctcccagcccctcagcttcgcagcctggcgcagcatcctctgaggccccggggcctgttggggcggggttggaagagccgtctgcagctacttcagaggagctgtttatccctctccacgcggggcagactctggcgggtctcctagcgtccgagagatggcttatttttctacagtatttaaaatggatgcagccctaactgcaaaagtcagagaggctgacaaggaccaatgcttctttatctggtgctcagttctcagtcagacgtgcagcatggctgcagggtggaccagctgcctggcattcaggcccagatgcctgcagggctggggctctcgggacagatgcagggatgtgtgctgcagggctgctgggaggagagtggtgggggcctgagggctgagtgattctgtaaccacctgagaccttcacgtttgctgccgttgggggctcaggctgcactccccgggtcacctgacctgctgcccaggggcttccagtcctgtctgtgtggactggcacctgggctgctggagaagtctcctcccgttcggaccagcctcagggctgcacgttacctcaggaatgggccccaccatgaaggggcccatctgtcagcagcgtcttctaggtccccagctcagggagccatccccagctccagttttctcatgcgaatatgcacagttttaattcacgttgttacactagcctgccgatgagacccagacacaggcccaaagatggaccccccctggccttgtgacagctccccaagtgttctccggtggagaaactgcagaggactggtgggcggggctccccagccatcaccatcctgtgtacaatggctgtagacttgtatatggctcctttaatattgtaaagatgctgatgtacaattgtcgtgcatttgtgtgaacacattgcgttcccagtccatgccataaatgatgctctcaagcaaaagactggaggctctgtcctgtgcagaagcagcagccagactcccgcattcgatgttgtgcagggaggtttgggggcggaacggattcctcccttggatccttcagttcccatcgaggaataacccgcagcagtggtggaggaaggtcagtggctgggtcctgagcttggtgttatttattgcatttgggtgcctgtcccctcagggcagcacagattctgaattctgattcacagtccctagccagatgggaactgggaaagagacagaaggcgtctgggtgcttttgaaccctgtctcaaatgtttgggattttctctctcactattctttggttggggatgatgtcctctttagacccccacgtaatggtatgagaaggtggcaggcagtggctcagccagccagggggcaccaagtcatgcagccagcgtgagacctgcagttcacctaagcacagaacgagatctcagtatgcctccatgtaaacagattcacataggcctccaatttcaatgagaccttttgcattttttctcaaagcccttatgttctaacccatgagaaccattttacctgccctctaagggccaccagcttcgacctgcctcaggggacagcagcacagaccagtggctccctgtccaaggccgcagagcagacgccatcccactgtacaatcgaatttgctggacaaacttgataggtttctctgcttagcaacgagcctatagttagttggcacatctgcgttttggcatctgaggctcccatctgagtggaggagaaagtgttgtgtttattagcaggaagtcttgtgaaaacagctcgctgctgtgtatgtttatggatttttctgatataacagccagcatggttaccgagtggtagagattctcgaacattctcaaactctctttttgggtaaatgattgtgctaaaaataaaatttattaataaagaaggggaaaaaggagtaactctacctgactaaatgttactctaatttatttatttctttactaattaagtaaaaccaggaagtatgattttacatcaaccagagaatttctgaatttatagggaaacactatgtccccataatgatgctataattctaatatatctagtccccataaacagtaagtacaaattatcattcctttaaagcatttttacacttcctggaatgagtatattatcagcaatcttttgtcaaatgccagccgtataaatgttacttctgctctttgtaaacctcaaaactcattattcttgattataagcaactggacagaaccatgccaaagcttccccgtttcccaccaaacccctgccagtgagtgcagagaactcgcaaagccacagcaggcggtctcagccaccgtcccgctcacaggggcccaatgccaggtcacaacactaagaatatctttcaaaaaatgtgtctttttttttttttttaaagctactgcttgactgttccttagaataaataaaggatattttataaattaaaaaaaaagc

SEQ ID NO: 296710 - DNA, 3896 bp, Homo sapiens
  misc_feature (2)..(3): n is a, c, g, or t
gnnagaaagtaactccaggacgagaccggagcgacccgcgcagcgagcataggcggcgaagctgcgcccggcgcccgagaccggcagctgcgtggggcgggggctgcgcccgagcccgatctgccggctccgagcagtggtctcggaaagagggtcgtggtcccgcacggatgcgcttgttgggagaaaccttggagattcacggcaaggcgtaaagcctggggcttccaacgatactctgggcagggatggaagcctagatgcctcaccgcaaggagcggccgagcgggtcctcgcttcacacacacggcagcaccggcaccgcggagggaggaaacatgtcccggctgtctctcacccggtcgcctgtgtctcccctggctgcccagggcatccccctgccagcccagctcaccaagtccaatgcacctgtgcacatcgatgtgggcggccacatgtacaccagcagcctggccacgctcaccaagtaccctgactccaggataagccgcctcttcaatggcactgaacccatcgtcctggacagtttgaagcaacattatttcattgaccgggatggggagattttccgctacgtcctgagcttcctgcggacgtccaagctgctgcttccggatgactttaaggacttcagtctgctgtacgaggaggcgcgctactatcagctccagcccatggtgcgcgagctggagcgctggcagcaggagcaggagcagcggcgccgcagccgggcctgtgactgcctggtggtgcgcgtcacgcccgacttgggcgagcggatcgcactcagcggcgagaaggccctcatcgaggaggtcttccccgagaccggagacgtcatgtgcaactccgtcaacgccggctggaaccaggaccccacgcacgtcatccgcttcccgctcaatggctactgccggctcaactcggtacaggtcctggagcggctgttccagaggggtttcagcgtggctgcgtcctgtgggggcggtgtggactcctcccagttcagcgagtatgtgctttgccgggaggagcggcggccgcagcccacccccactgctttcagtgcccacctgggcccccccagggacctggaaacagtgctggggagttctgcctgtgtatacttggccgtgggcatgagaccgagggtgaggctggagggtccaaagctggcccagcgagcaccagggtcccaggtgtcatggcaacagaacgtgggatgctggaggcatgcctgcagaaggactgttgatgcgacccaaagatacagcggtgggatctctgctgccagctctcccagcccctcagcttcgcagcctggcgcagcatcctctgaggccccggggcctgttggggcggggttggaagagccgtctgcagctacttcagaggagctgtttatccctctccacgcggggcagactctggcgggtctcctagcgtccgagagatggcttatttttctacagtatttaaaatggatgcagccctaactgcaaaagtcagagaggctgacaaggaccaatgcttctttatctggtgctcagttctcagtcagacgtgcagcatggctgcagggtggaccagctgcctggcattcaggcccagatgcctgcagggctggggctctcgggacagatgcagggatgtgtgctgcagggctgctgggaggagagtggtgggggcctgagggctgagtgattctgtaaccacctgagaccttcacgtttgctgccgttgggggctcaggctgcactccccgggtcacctgacctgctgcccaggggcttccagtcctgtctgtgtggactggcacctgggctgctggagaagtctcctcccgttcggaccagcctcagggctgcacgttacctcaggaatgggccccaccatgaaggggcccatctgtcagcagcgtcttctaggtccccagctcagggagccatccccagctccagttttctcatgcgaatatgcacagttttaattcacgttgttacactagcctgccgatgagacccagacacaggcagacctggcgctcttgacccctgattccagtgaggactggccctgaggagtccttgcagacctgctgcctgccccacgacaggcccaaagatggaccccccctggccttgtgacagctccccaagtgttctccggtggagaaactgcagaggactggtgggcggggctccccagccatcaccatcctgtgtacaatggctgtagacttgtatatggctcctttaatattgtaaagatgctgatgtacaattgtcgtgcatttgtgtgaacacattgcgttcccagtccatgccataaatgatgctctcaagcaaaagactggaggctctgtcctgtgcagaagcagcagccagactcccgcattcgatgttgtgcagggaggtttgggggcggaacggattcctcccttggatccttcagttcccatcgaggaataacccgcagcagtggtggaggaaggtcagtggctgggtcctgagcttggtgttatttattgcatttgggtgcctgtcccctcagggcagcacagattctgaattctgattcacagtccctagccagatgggaactgggaaagagacagaaggcgtctgggtgcttttgaaccctgtctcaaatgtttgggattttctctctcactattctttggttggggatgatgtcctctttagacccccacgtaatggtatgagaaggtggcaggcagtggctcagccagccagggggcaccaagtcatgcagccagcgtgagacctgcagttcacctaagcacagaacgagatctcagtatgcctccatgtaaacagattcacataggcctccaatttcaatgagaccttttgcattttttctcaaagcccttatgttctaacccatgagaaccattttacctgccctctaagggccaccagcttcgacctgcctcaggggacagcagcacagaccagtggctccctgtccaaggccgcagagcagacgccatcccactgtacaatcgaatttgctggacaaacttgataggtttctctgcttagcaacgagcctatagttagttggcacatctgcgttttggcatctgaggctcccatctgagtggaggagaaagtgttgtgtttattagcaggaagtcttgtgaaaacagctcgctgctgtgtatgtttatggatttttctgatataacagccagcatggttaccgagtggtagagattctcgaacattctcaaactctctttttgggtaaatgattgtgctaaaaataaaatttattaataaagaaggggaaaaaggagtaactctacctgactaaatgttactctaatttatttatttctttactaattaagtaaaaccaggaagtatgattttacatcaaccagagaatttctgaatttatagggaaacactatgtccccataatgatgctataattctaatatatctagtccccataaacagtaagtacaaattatcattcctttaaagcatttttacacttcctggaatgagtatattatcagcaatcttttgtcaaatgccagccgtataaatgttacttctgctctttgtaaacctcaaaactcattattcttgattataagcaactggacagaaccatgccaaagcttccccgtttcccaccaaacccctgccagtgagtgcagagaactcgcaaagccacagcaggcggtctcagccaccgtcccgctcacaggggcccaatgccaggtcacaacactaagaatatctttcaaaaaatgtgtctttttttttttttttaaagctactgcttgactgttccttagaataaataaaggatattttataaattaaaaaaaaagc

SEQ ID NO: 296711 - DNA, 5170 bp, Homo sapiens
  misc_feature (2)..(3): n is a, c, g, or t
gnnagaaagtaactccaggacgagaccggagcgacccgcgcagcgagcataggcggcgaagctgcgcccggcgcccgagaccggcagctgcgtggggcgggggctgcgcccgagcccgatctgccggctccgagcagtggtctcggaaagagggtcgtggtcccgcacggatgcgcttgttgggagaaaccttggagattcacggcaaggcgtaaagcctggggcttccaacgatactctgggcagggatggaagcctagatgcctcaccgcaaggagcggccgagcgggtcctcgcttcacacacacggcagcaccggcaccgcggagggaggaaacatgtcccggctgtctctcacccggtcgcctgtgtctcccctggctgcccagggcatccccctgccagcccagctcaccaagtccaatgcacctgtgcacatcgatgtgggcggccacatgtacaccagcagcctggccacgctcaccaagtaccctgactccaggataagccgcctcttcaatggcactgaacccatcgtcctggacagtttgaagcaacattatttcattgaccgggatggggagattttccgctacgtcctgagcttcctgcggacgtccaagctgctgcttccggatgactttaaggacttcagtctgctgtacgaggaggcgcgctactatcagctccagcccatggtgcgcgagctggagcgctggcagcaggagcaggagcagcggcgccgcagccgggcctgtgactgcctggtggtgcgcgtcacgcccgacttgggcgagcggatcgcactcagcggcgagaaggccctcatcgaggaggtcttccccgagaccggagacgtcatgtgcaactccgtcaacgccggctggaaccaggaccccacgcacgtcatccgcttcccgctcaatggctactgccggctcaactcggtacaggtgagggctgcacgctgccccctccccgccgcacccccggcgtccgcggagccctccaggggcagagtgagctggagggaggcgcgatccctgaaacggtgaagccccccgtgccatcctacaaaaaaggcaacaatgtgtcgatgcataatttatgtccctctcataattaaatgatggcgcctgggggatggacttaaaaaaatcgatctgtactttttttttttttttccaaaaggatgttctataaaaatggcccagagtattttcaacaaagcgtgcttcatttgacacccagagtctgactttggattcgaactaaacccaggcaacaggcgaggcaggacagaggctgagtggaaaggtggtctggagccccttccctctccctgctgaccttggagtcgcaggcacccaccagctgccaagagaatccctggaccggctcttcctggatgggtccaagaattggacagctcagatggagtgagggcctattttccaacagctcttcgcagacccaagagcttggcacatttccgggttagggtggaatgggctttgcagggaagagggccccctgtgcacgcattccacagcctgtcggtcagaacttgctagttgcaggagacgggtgttacacgcagtcatcagacctcaccctcacagaggcacaaacccacatagttgtggacgcctgcagagactcaaatattgagaggacttctcctttttctctccctccagagctcccacgagctgatgcacccccaggcttcaaaccacctggaatgcacagctcagggaagctggtggatgcctagaggctgaaggacagggaactctccattattggggcaggactcagggaggacacttggggccatgtgtctggagagagggcataggttacaccctacagaataaagaagggacccaaagcctctttttgcctcccggaatcaaggccctgagggcagcaggatggtggcctgggtggggtcgtccaactaggtttgctaacctgaggggtcactgggcctggccacttctgtccctctggtggtggaacccagcacgtggttctgtagggacctttgtcagtgagcaagactgagatcgtcacaggagaaggtgcccttgctggctgccccagcaggcacccacctccctgccaggccaagccaggtgtcctcttgcagcttggccttgatgacctctgtttcttcctgggcaggtcctggagcggctgttccagaggggtttcagcgtggctgcgtcctgtgggggcggtgtggactcctcccagttcagcgagtatgtgctttgccgggaggagcggcggccgcagcccacccccactgctgttcgaatcaagcaggaacccctggactaggccctgcttcagtgcccacctgggcccccccagggacctggaaacagtgctggggagttctgcctgtgtatacttggccgtgggcatgagaccgagggtgaggctggagggtccaaagctggcccagcgagcaccagggtcccaggtgtcatggcaacagaacgtgggatgctggaggcatgcctgcagaaggactgttgatgcgacccaaagatacagcggtgggatctctgctgccagctctcccagcccctcagcttcgcagcctggcgcagcatcctctgaggccccggggcctgttggggcggggttggaagagccgtctgcagctacttcagaggagctgtttatccctctccacgcggggcagactctggcgggtctcctagcgtccgagagatggcttatttttctacagtatttaaaatggatgcagccctaactgcaaaagtcagagaggctgacaaggaccaatgcttctttatctggtgctcagttctcagtcagacgtgcagcatggctgcagggtggaccagctgcctggcattcaggcccagatgcctgcagggctggggctctcgggacagatgcagggatgtgtgctgcagggctgctgggaggagagtggtgggggcctgagggctgagtgattctgtaaccacctgagaccttcacgtttgctgccgttgggggctcaggctgcactccccgggtcacctgacctgctgcccaggggcttccagtcctgtctgtgtggactggcacctgggctgctggagaagtctcctcccgttcggaccagcctcagggctgcacgttacctcaggaatgggccccaccatgaaggggcccatctgtcagcagcgtcttctaggtccccagctcagggagccatccccagctccagttttctcatgcgaatatgcacagttttaattcacgttgttacactagcctgccgatgagacccagacacaggcagacctggcgctcttgacccctgattccagtgaggactggccctgaggagtccttgcagacctgctgcctgccccacgacaggcccaaagatggaccccccctggccttgtgacagctccccaagtgttctccggtggagaaactgcagaggactggtgggcggggctccccagccatcaccatcctgtgtacaatggctgtagacttgtatatggctcctttaatattgtaaagatgctgatgtacaattgtcgtgcatttgtgtgaacacattgcgttcccagtccatgccataaatgatgctctcaagcaaaagactggaggctctgtcctgtgcagaagcagcagccagactcccgcattcgatgttgtgcagggaggtttgggggcggaacggattcctcccttggatccttcagttcccatcgaggaataacccgcagcagtggtggaggaaggtcagtggctgggtcctgagcttggtgttatttattgcatttgggtgcctgtcccctcagggcagcacagattctgaattctgattcacagtccctagccagatgggaactgggaaagagacagaaggcgtctgggtgcttttgaaccctgtctcaaatgtttgggattttctctctcactattctttggttggggatgatgtcctctttagacccccacgtaatggtatgagaaggtggcaggcagtggctcagccagccagggggcaccaagtcatgcagccagcgtgagacctgcagttcacctaagcacagaacgagatctcagtatgcctccatgtaaacagattcacataggcctccaatttcaatgagaccttttgcattttttctcaaagcccttatgttctaacccatgagaaccattttacctgccctctaagggccaccagcttcgacctgcctcaggggacagcagcacagaccagtggctccctgtccaaggccgcagagcagacgccatcccactgtacaatcgaatttgctggacaaacttgataggtttctctgcttagcaacgagcctatagttagttggcacatctgcgttttggcatctgaggctcccatctgagtggaggagaaagtgttgtgtttattagcaggaagtcttgtgaaaacagctcgctgctgtgtatgtttatggatttttctgatataacagccagcatggttaccgagtggtagagattctcgaacattctcaaactctctttttgggtaaatgattgtgctaaaaataaaatttattaataaagaaggggaaaaaggagtaactctacctgactaaatgttactctaatttatttatttctttactaattaagtaaaaccaggaagtatgattttacatcaaccagagaatttctgaatttatagggaaacactatgtccccataatgatgctataattctaatatatctagtccccataaacagtaagtacaaattatcattcctttaaagcatttttacacttcctggaatgagtatattatcagcaatcttttgtcaaatgccagccgtataaatgttacttctgctctttgtaaacctcaaaactcattattcttgattataagcaactggacagaaccatgccaaagcttccccgtttcccaccaaacccctgccagtgagtgcagagaactcgcaaagccacagcaggcggtctcagccaccgtcccgctcacaggggcccaatgccaggtcacaacactaagaatatctttcaaaaaatgtgtctttttttttttttttaaagctactgcttgactgttccttagaataaataaaggatattttataaattaaaaaaaaagc

SEQ ID NO: 296712 - DNA, 2989 bp, Homo sapiens
  misc_feature (2)..(3): n is a, c, g, or t
gnnagaaagtaactccaggacgagaccggagcgacccgcgcagcgagcataggcggcgaagctgcgcccggcgcccgagaccggcagctgcgtggggcgggggctgcgcccgagcccgatctgccggctccgagcagtggtctcggaaagagggtcgtggtcccgcacggatgcgcttgttgggagaaaccttggagattcacggcaaggcgtaaagcctggggcttccaacgatactctgggcagggatggaagcctagatgcctcaccgcaaggagcggccgagcgggtcctcgcttcacacacacggcagcaccggcaccgcggagggaggaaacatgtcccggctgtctctcacccggtcgcctgtgtctcccctggctgcccagggcatccccctgccagcccagctcaccaagtccaatgcacctgtgcacatcgatgtgggcggccacatgtacaccagcagcctggccacgctcaccaagtaccctgactccaggataagccgcctcttcaatggcactgaacccatcgtcctggacagtttgaagcaacattatttcattgaccgggatggggagattttccgctacgtcctgagcttcctgcggacgtccaagctgctgcttccggatgactttaaggacttcagtctgctgtacgaggaggcgcgctactatcagctccagcccatggtgcgcgagctggagcgctggcagcaggagcaggagcagcggcgccgcagccgggcctgtgactgcctggtggtgcgcgtcacgcccgacttgggcgagcggatcgcactcagcggcgagaaggccctcatcgaggaggtcttccccgagaccggagacgtcatgtgcaactccgtcaacgccggctggaaccaggaccccacgcacgtcatccgcttcccgctcaatggctactgccggctcaactcggtacaggtcctggagcggctgttccagaggggtttcagcgtggctgcgtcctgtgggggcggtgtggactcctcccagttcagcgagtatgtgctttgccgggaggagcggcggccgcagcccacccccactgctgttcgaatcaagcaggaacccctggactaggccctgcttcagtgcccacctgggcccccccagggacctggaaacagtgctggggagttctgcctgtgtatacttggccgtgggcatgagaccgagggtgaggctggagggtccaaagctggcccagcgagcaccagggtcccaggtgtcatggcaacagaacgtgggatgctggaggcatgcctgcagaaggactgttgatgcgacccaaagatacagcggtgggatctctgctgccagctctcccagcccctcagcttcgcagcctggcgcagcatcctctgaggccccggggcctgttggggcggggttggaagagccgtctgcagctacttcagaggagctgtttatccctctccacgcggggcagactctggcgggtctcctagcgtccgagagatggcttatttttctacagtatttaaaatggatgcagccctaactgcaaaagtcagagaggctgacaaggaccaatgcttctttatctggtgctcagttctcagtcagacgtgcagcatggctgcagggtggaccagctgcctggcattcaggcccagatgcctgcagggctggggctctcgggacagatgcagggatgtgtgctgcagggctgctgggaggagagtggtgggggcctgagggctgagtgattctgtaaccacctgagaccttcacgtttgctgccgttgggggctcaggctgcactccccgggtcacctgacctgctgcccaggggcttccagtcctgtctgtgtggactggcacctgggctgctggagaagtctcctcccgttcggaccagcctcagggctgcacgttacctcaggaatgggccccaccatgaaggggcccatctgtcagcagcgtcttctaggtccccagctcagggagccatccccagctccagttttctcatgcgaatatgcacagttttaattcacgttgttacactagcctgccgatgagacccagacacaggcagacctggcgctcttgacccctgattccagtgaggactggccctgaggagtccttgcagacctgctgcctgccccacgacaggcccaaagatggaccccccctggccttgtgacagctccccaagtgttctccggtggagaaactgcagaggactggtgggcggggctccccagccatcaccatcctgtgtacaatggctgtagacttgtatatggctcctttaatattgtaaagatgctgatgtacaattgtcgtgcatttgtgtgaacacattgcgttcccagtccatgccataaatgatgctctcaagcaaaagactggaggctctgtcctgtgcagaagcagcagccagactcccgcattcgatgttgtgcagggaggtttgggggcggaacggattcctcccttggatccttcagttcccatcgaggaataacccgcagcagtggtggaggaaggtcagtggctgggtcctgagcttggtgttatttattgcatttgggtgcctgtcccctcagggcagcacagattctgaattctgattcacagtccctagccagatgggaactgggaaagagacagaaggcgtctgggtgcttttgaaccctgtctcaaatgtttgggattttctctctcactattctttggttggggatgatgtcctctttagacccccacgtaatggtatgagaaggtggcaggcagtggctcagccagccagggggcaccaagtcatgcagccagcgtgagacctgcagttcacctacccagacgggactagatcctactgtaacagatcaatggcctcaattaatagcctttcattttccaagcctatgctaccatgaaccattacccccctaggcacagtagccctcagggaacagcaaccatgc

SEQ ID NO: 296713 - DNA, 1193 bp, Homo sapiens
tcatgcagccagcgtgacttggtgccccctggctggctgagccactgcctgccaccttctcataccattacgtgggggcaccaagtcatgcagccagcgtgagacctgcagttcacctaagcacagaacgagatctcagtatgcctccatgtaaacagattcacataggcctccaatttcaatgagaccttttgcattttttctcaaagcccttatgttctaacccatgagaaccattttacctgccctctaagggccaccagcttcgacctgcctcaggggacagcagcacagaccagtggctccctgtccaaggccgcagagcagacgccatcccactgtacaatcgaatttgctggacaaacttgataggtttctctgcttagcaacgagcctatagttagttggcacatctgcgttttggcatctgaggctcccatctgagtggaggagaaagtgttgtgtttattagcaggaagtcttgtgaaaacagctcgctgctgtgtatgtttatggatttttctgatataacagccagcatggttaccgagtggtagagattctcgaacattctcaaactctctttttgggtaaatgattgtgctaaaaataaaatttattaataaagaaggggaaaaaggagtaactctacctgactaaatgttactctaatttatttatttctttactaattaagtaaaaccaggaagtatgattttacatcaaccagagaatttctgaatttatagggaaacactatgtccccataatgatgctataattctaatatatctagtccccataaacagtaagtacaaattatcattcctttaaagcatttttacacttcctggaatgagtatattatcagcaatcttttgtcaaatgccagccgtataaatgttacttctgctctttgtaaacctcaaaactcattattcttgattataagcaactggacagaaccatgccaaagcttccccgtttcccaccaaacccctgccagtgagtgcagagaactcgcaaagccacagcaggcggtctcagccaccgtcccgctcacaggggcccaatgccaggtcacaacactaagaatatctttcaaaaaatgtgtctttttttttttttttaaagctactgcttgactgttccttagaataaataaaggatattttataaattaaaaaaaaagc

SEQ ID NO: 296714 - DNA, 1853 bp, Homo sapiens
cgttcctcggcgccgccggggccccagagggcagcggcagcaacagcagcagcagcagcagcgggggaggagtggagatggcggcggcggcggctcaggggggcgggggcggggagccccgtagaaccgagggggtcggcccgggggtcccgggggaggtggagatggtgaaggggcagccgttcgacgtgggcccgcgctacacgcagttgcagtacatcggcgagggcgcgtacggcatggtcagctcggcctatgaccacgtgcgcaagactcgcgtggccatcaagaagatcagccccttcgaacatcagacctactgccagcgcacgctccgggagatccagatcctgctgcgcttccgccatgagaatgtcatcggcatccgagacattctgcgggcgtccaccctggaagccatgagagatgtctacattgtgcaggacctgatggagactgacctgtacaagttgctgaaaagccagcagctgagcaatgaccatatctgctacttcctctaccagatcctgcggggcctcaagtacatccactccgccaacgtgctccaccgagatctaaagccctccaacctgctcatcaacaccacctgcgaccttaagatttgtgatttcggcctggcccggattgccgatcctgagcatgaccacaccggcttcctgacggagtatgtggctacgcgctggtaccgggccccagagatcatgctgaactccaagggctataccaagtccatcgacatctggtctgtgggctgcattctggctgagatgctctctaaccggcccatcttccctggcaagcactacctggatcagctcaaccacattctgggcatcctgggctccccatcccaggaggacctgaattgtatcatcaacatgaaggcccgaaactacctacagtctctgccctccaagaccaaggtggcttgggccaagcttttccccaagtcagactccaaagcccttgacctgctggaccggatgttaacctttaaccccaataaacggatcacagtggaggaagcgctggctcacccctacctggagcagtactatgacccgacggatgagccagtggccgaggagcccttcaccttcgccatggagctggatgacctacctaaggagcggctgaaggagctcatcttccaggagacagcacgcttccagcccggagtgctggaggccccctagcccagacagacatctctgcaccctggggcctggacctgcctcctgcctgcccctctcccgccagactgttagaaaatggacactgtgcccagcccggaccttggcagcccaggccggggtggagcatgggcctggccacctctctcctttgctgaggcctccagcttcaggcaggccaaggccttctcctccccacccgccctccccacggggcctcgggacctcaggtggccccagttcaatctcccgctgctgctgctgcgcccttaccttccccagcgtcccagtctctggcagttctggaatggaagggttctggctgccccaacctgctgaagggcagaggtggagggtggggggcgctgagtagggactcagggccatgcctgcccccctcatctcattcaaaccccaccctagtttccctgaaggaacattccttagtctcaagggctagcatccctgaggagccaggccgggccgaatcccctccctgtcaaagctgtcacttcgcgtgccctcgctgcttctgtgtgtggtgagcagaagtggagctggggggcgtggagagcccggcgcccctgccacctccctgacccgtctaatatataaatatagagatgtgtctatggctga

SEQ ID NO: 296715 - DNA, 885 bp, Homo sapiens
gcaggctggtacccccggggtacgggatgagcgctttccgggacgtggagacgcggagcgtcccgaggagctcggcctatgaccacgtgcgcaagactcgcgtggccatcaagaagatcagccccttcgaacatcagacctactgccagcgcacgctccgggagatccagatcctgctgcgcttccgccatgagaatgtcatcggcatccgagacattctgcgggcgtccaccctggaagccatgagagatgtctacattgtgcaggacctgatggagactgacctgtacaagttgctgaaaagccagcagctgagcaatgaccatatctgctacttcctctaccagatcctgcggggcctcaagtacatccactccgccaacgtgctccaccgagatctaaagccctccaacctgctcatcaacaccacctgcgaccttaagatttgtgatttcggcctggcccggattgccgatcctgagcatgaccacaccggcttcctgacggagtatgtggctacgcgctggtaccgggccccagagatcatgctgaactccaagggctataccaagtccatcgacatctggtctgtgggctgcattctggctgagatgctctctaaccggcccatcttccctggcaagcactacctggatcagctcaaccacattctggcatcctgggctccccatcccagggaggacctgacattgtcatcaatccaaccatggaatgtgccccgaaaaacgtacctacaaggacttctgtgccgttccgaagaaccaaaggtggacttggggcagcaagtgagttgtccaccccaaggtcagactccagaaggccattgaacactgctggaaccgggaatgttcaacccttgaagcg

SEQ ID NO: 296716 - DNA, 819 bp, Homo sapiens
  misc_feature (229)..(229): n is a, c, g, or t
  misc_feature (256)..(256): n is a, c, g, or t
ttcgcggtgccctcgctgcttctgtgtgaggagccaggccgggccgaatcccctccctgtcaaagctgtcacttcgcgtgccctcgctgcttctgtgtgtggtgagcagaagtggagctggggggcgtggagagcccggcgcccctgccacctccctgacccgtctaatatataaatatagagatgtgtctatggctgaaaaaaaaaaaaaaaaaaaaaaaaaaaaaanaaaaaaaaaaaaaaaaaaaaaaaaaanaaaaaaaaaaaaaaaaagaaagagggggggggcgcgcgcgcctaaaaatatattctccccggggggggcgcccaaatttagcgccgcgccccccctttttttttaacaagaagaggggcgccccctagagagggaggggttatataatatataaccgcgcgagcgggcggggggcgggggcttattaaaaacaaagggttgggaggagggagaaagaaatggctgcttcagtggggggtctattcttgggggggagagagcacaccccccattggtggggggggggggggcgaacaccatagtgggggcagcacaacatctctcctggaaagaagagattattaagaagcgtcgtcgggaggaggaaatatatataaaacaatttgcaggaggggtgtatataagagtgtgtgtgttagaccacacagccagcgtgaaatgttgtggaggggtcggtgtagaaaaaaagtttgtggtctacgcagcagagttgtatattttgctgggaaccaaattattttatcgacgacgagcgcttggttgatataaagaaagagactgtg

SEQ ID NO: 296717 - DNA, 328 bp, Homo sapiens
  misc_feature (29)..(29): n is a, c, g, or t
aagggcccacgtgtggggaggattcccanggaagtctctgctgagaggggatatgataaccacccagaagcaccagtgcttcttacctgtacttacccaagtggcaggctgtgtgccaactcctttatacacgttgtctcacctaaaccttagaatcccttttttatagctgaagaaactcaggcccacagaagcagcaagccaggtgtcacccagctgatgaatcaggagccaaggctgcccagactggtggcccaccgagtcctccagccccaaatgtctctgcctgtcaacaccttgcatcctccagccccacaagccattctaa

SEQ ID NO: 296718 - DNA, 1829 bp, Homo sapiens
  misc_feature (9)..(9): n is a, c, g, or t
  misc_feature (15)..(15): n is a, c, g, or t
tctttcatnaagccncggtttatggtacgaggcctgggtggggaggagtggagatggcggcggcggcggctcaggggggcgggggcggggagccccgtagaaccgagggggtcggcccgggggtcccgggggaggtggagatggtgaaggggcagccgttcgacgtgggcccgcgctacacgcagttgcagtacatcggcgagggcgcgtacggcatggtcagctcggcctatgaccacgtgcgcaagactcgcgtggccatcaagaagatcagccccttcgaacatcagacctactgccagcgcacgctccgggagatccagatcctgctgcgcttccgccatgagaatgtcatcggcatccgagacattctgcgggcgtccaccctggaagccatgagagatgtctacattgtgcaggacctgatggagactgacctgtacaagttgctgaaaagccagcagctgagcaatgaccatatctgctacttcctctaccagatcctgcggggcctcaagtacatccactccgccaacgtgctccaccgagatctaaagccctccaacctgctcatcaacaccacctgcgaccttaagatttgtgatttcggcctggcccggattgccgatcctgagcatgaccacaccggcttcctgacggagtatgtggctacgcgctggtaccgggccccagagatcatgctgaactccaagggctataccaagtccatcgacatctggtctgtgggctgcattctggctgagatgctctctaaccggcccatcttccctggcaagcactacctggatcagctcaaccacattctgggcatcctgggctccccatcccaggaggacctgaattgtatcatcaacatgaaggcccgaaactacctacagtctctgccctccaagaccaaggtggcttgggccaagcttttccccaagtcagactccaaagcccttgacctgctggaccggatgttaacctttaaccccaataaacggatcacagtggaggaagcgctggctcacccctacctggagcagtactatgacccgacggatgagccagtggccgaggagcccttcaccttcgccatggagctggatgacctacctaaggagcggctgaaggagctcatcttccaggagacagcacgcttccagcccggagtgctggaggccccctagcccagacagacatctctgcaccctggggcctggacctgcctcctgcctgcccctctcccgccagactgttagaaaatggacactgtgcccagcccggaccttggcagcccaggccggggtggagcatgggcctggccacctctctcctttgctgaggcctccagcttcaggcaggccaaggccttctcctccccacccgccctccccacggggcctcgggacctcaggtggccccagttcaatctcccgctgctgctgctgcgcccttaccttccccagcgtcccagtctctggcagttctggaatggaagggttctggctgccccaacctgctgaagggcagaggtggagggtggggggcgctgagtagggactcagggccatgcctgcccccctcatctcattcaaaccccaccctagtttccctgaaggaacattccttagtctcaagggctagcatccctgaggagccaggccgggccgaatcccctccctgtcaaagctgtcacttcgcgtgccctcgctgcttctgtgtgtggtgagcagaagtggagctggggggcgtggagagcccggcgcccctgccacctccctgacccgtctaatatataaatatagagatgtgtctatggctga

SEQ ID NO: 296719 - DNA, 2449 bp, Homo sapiens
  misc_feature (9)..(9): n is a, c, g, or t
  misc_feature (15)..(15): n is a, c, g, or t
  misc_feature (1859)..(1859): n is a, c, g, or t
  misc_feature (1886)..(1886): n is a, c, g, or t
tctttcatnaagccncggtttatggtacgaggcctgggtggggaggagtggagatggcggcggcggcggctcaggggggcgggggcggggagccccgtagaaccgagggggtcggcccgggggtcccgggggaggtggagatggtgaaggggcagccgttcgacgtgggcccgcgctacacgcagttgcagtacatcggcgagggcgcgtacggcatggtcagctcggcctatgaccacgtgcgcaagactcgcgtggccatcaagaagatcagccccttcgaacatcagacctactgccagcgcacgctccgggagatccagatcctgctgcgcttccgccatgagaatgtcatcggcatccgagacattctgcgggcgtccaccctggaagccatgagagatgtctacattgtgcaggacctgatggagactgacctgtacaagttgctgaaaagccagcagctgagcaatgaccatatctgctacttcctctaccagatcctgcggggcctcaagtacatccactccgccaacgtgctccaccgagatctaaagccctccaacctgctcatcaacaccacctgcgaccttaagatttgtgatttcggcctggcccggattgccgatcctgagcatgaccacaccggcttcctgacggagtatgtggctacgcgctggtaccgggccccagagatcatgctgaactccaagggctataccaagtccatcgacatctggtctgtgggctgcattctggctgagatgctctctaaccggcccatcttccctggcaagcactacctggatcagctcaaccacattctgggcatcctgggctccccatcccaggaggacctgaattgtatcatcaacatgaaggcccgaaactacctacagtctctgccctccaagaccaaggtggcttgggccaagcttttccccaagtcagactccaaagcccttgacctgctggaccggatgttaacctttaaccccaataaacggatcacagtggaggaagcgctggctcacccctacctggagcagtactatgacccgacggatgagccagtggccgaggagcccttcaccttcgccatggagctggatgacctacctaaggagcggctgaaggagctcatcttccaggagacagcacgcttccagcccggagtgctggaggccccctagcccagacagacatctctgcaccctggggcctggacctgcctcctgcctgcccctctcccgccagactgttagaaaatggacactgtgcccagcccggaccttggcagcccaggccggggtggagcatgggcctggccacctctctcctttgctgaggcctccagcttcaggcaggccaaggccttctcctccccacccgccctccccacggggcctcgggacctcaggtggccccagttcaatctcccgctgctgctgctgcgcccttaccttccccagcgtcccagtctctggcagttctggaatggaagggttctggctgccccaacctgctgaagggcagaggtggagggtggggggcgctgagtagggactcagggccatgcctgcccccctcatctcattcaaaccccaccctagtttccctgaaggaacattccttagtctcaagggctagcatccctgaggagccaggccgggccgaatcccctccctgtcaaagctgtcacttcgcgtgccctcgctgcttctgtgtgtggtgagcagaagtggagctggggggcgtggagagcccggcgcccctgccacctccctgacccgtctaatatataaatatagagatgtgtctatggctgaaaaaaaaaaaaaaaaaaaaaaaaaaaaaanaaaaaaaaaaaaaaaaaaaaaaaaaanaaaaaaaaaaaaaaaaagaaagagggggggggcgcgcgcgcctaaaaatatattctccccggggggggcgcccaaatttagcgccgcgccccccctttttttttaacaagaagaggggcgccccctagagagggaggggttatataatatataaccgcgcgagcgggcggggggcgggggcttattaaaaacaaagggttgggaggagggagaaagaaatggctgcttcagtggggggtctattcttgggggggagagagcacaccccccattggtggggggggggggggcgaacaccatagtgggggcagcacaacatctctcctggaaagaagagattattaagaagcgtcgtcgggaggaggaaatatatataaaacaatttgcaggaggggtgtatataagagtgtgtgtgttagaccacacagccagcgtgaaatgttgtggaggggtcggtgtagaaaaaaagtttgtggtctacgcagcagagttgtatattttgctgggaaccaaattattttatcgacgacgagcgcttggttgatataaagaaagagactgtg

SEQ ID NO: 296720 - DNA, 2455 bp, Homo sapiens
  misc_feature (9)..(9): n is a, c, g, or t
  misc_feature (15)..(15): n is a, c, g, or t
tctttcatnaagccncggtttatggtacgaggcctgggtggggaggagtggagatggcggcggcggcggctcaggggggcgggggcggggagccccgtagaaccgagggggtcggcccgggggtcccgggggaggtggagatggtgaaggggcagccgttcgacgtgggcccgcgctacacgcagttgcagtacatcggcgagggcgcgtacggcatggtcagctcggcctatgaccacgtgcgcaagactcgcgtggccatcaagaagatcagccccttcgaacatcagacctactgccagcgcacgctccgggagatccagatcctgctgcgcttccgccatgagaatgtcatcggcatccgagacattctgcgggcgtccaccctggaagccatgagagatgtctacattgtgcaggacctgatggagactgacctgtacaagttgctgaaaagccagcagctgagcaatgaccatatctgctacttcctctaccagatcctgcggggcctcaagtacatccactccgccaacgtgctccaccgagatctaaagccctccaacctgctcatcaacaccacctgcgaccttaagatttgtgatttcggcctggcccggattgccgatcctgagcatgaccacaccggcttcctgacggagtatgtggctacgcgctggtaccgggccccagagatcatgctgaactccaagggctataccaagtccatcgacatctggtctgtgggctgcattctggctgagatgctctctaaccggcccatcttccctggcaagcactacctggatcagctcaaccacattctgggcatcctgggctccccatcccaggaggacctgaattgtatcatcaacatgaaggcccgaaactacctacagtctctgccctccaagaccaaggtggcttgggccaagcttttccccaagtcagactccaaagcccttgacctgctggaccggatgttaacctttaaccccaataaacggatcacagtggaggaagcgctggctcacccctacctggagcagtactatgacccgacggatgagccagtggccgaggagcccttcaccttcgccatggagctggatgacctacctaaggagcggctgaaggagctcatcttccaggagacagcacgcttccagcccggagtgctggaggccccctagcccagacagacatctctgcaccctggggcctggacctgcctcctgcctgcccctctcccgccagactgttagaaaatggacactgtgcccagcccggaccttggcagcccaggccggggtggagcatgggcctggccacctctctcctttgctgaggcctccagcttcaggcaggccaaggccttctcctccccacccgccctccccacggggcctcgggacctcaggtggccccagttcaatctcccgctgctgctgctgcgcccttaccttccccagcgtcccagtctctggcagttctggaatggaagggttctggctgccccaacctgctgaagggcagaggtggagggtggggggcgctgagtagggactcagggccatgcctgcccccctcatctcattcaaaccccaccctagtttccctgaaggaacattccttagtctcaagggctagcatccctgaggagccaggccgggccgaatcccctccctgtcaaagctgtcacttcgcgtgccctcgctgcttctgtgtgtggtgagcagaagtggagctggggggcgtggagagcccggcgcccctgccacctccctgacccgtctaatatataaatatagagatgtgtctatggctgagaccctggctctgtctgtgttcgcgacgcccccgccctgccccgtgcggctctgaggacagacttgacttgggctttcaggggcctggtgcccttcactcccagctgcccagggctggggacggggctctggagagctccagactcctagaaagaagggggtcagttttccccttagtcactgtcctgtcctctcgctaatggcttcctgtctaactggctgggggtgattcggggtgactcaggagcaccctacacacccctggatcctctgaaatggcaaggggtaggcatgttggatgcgctggctacaagtaccagtgagagggagaggtcctgacagtcctgggtggtttttactcccctcatgtagcccaggacggggctgctgggggctgggaagggcctggggatatgagagccagggctacttgcctcacctcctgacactaccccagcttcagccgaaccctgcagcctggctccaagccagcccagcggcaggctcagcaggtcccaggggcgtggcagtggccagtagtagagccggcccacactggctaggcaggcagcacagtcccgcggacggctgagcgtgtggctgcaggagcttctgtgggagtacgg

SEQ ID NO: 296721 - DNA, 1839 bp, Homo sapiens
  misc_feature (9)..(9): n is a, c, g, or t
  misc_feature (15)..(15): n is a, c, g, or t
tctttcatnaagccncggtttatggtacgaggcctgggtggggaggagtggagatggcggcggcggcggctcaggggggcgggggcggggagccccgtagaaccgagggggtcggcccgggggtcccgggggaggtggagatggtgaaggggcagccgttcgacgtgggcccgcgctacacgcagttgcagtacatcggcgagggcgcgtacggcatggtcagctcggcctatgaccacgtgcgcaagactcgcgtggccatcaagaagatcagccccttcgaacatcagacctactgccagcgcacgctccgggagatccagatcctgctgcgcttccgccatgagaatgtcatcggcatccgagacattctgcgggcgtccaccctggaagccatgagagatgtctacattgtgcaggacctgatggagactgacctgtacaagttgctgaaaagccagcagctgagcaatgaccatatctgctacttcctctaccagatcctgcggggcctcaagtacatccactccgccaacgtgctccaccgagatctaaagccctccaacctgctcatcaacaccacctgcgaccttaagatttgtgatttcggcctggcccggattgccgatcctgagcatgaccacaccggcttcctgacggagtatgtggctacgcgctggtaccgggccccagagatcatgctgaactccaagggctataccaagtccatcgacatctggtctgtgggctgcattctggctgagatgctctctaaccggcccatcttccctggcaagcactacctggatcagctcaaccacattctgggcatcctgggctccccatcccaggaggacctgaattgtatcatcaacatgaaggcccgaaactacctacagtctctgccctccaagaccaaggtggcttgggccaagcttttccccaagtcagactccaaagcccttgacctgctggaccggatgttaacctttaaccccaataaacggatcacagtggaggaagcgctggctcacccctacctggagcagtactatgacccgacggatgagccagtggccgaggagcccttcaccttcgccatggagctggatgacctacctaaggagcggctgaaggagctcatcttccaggagacagcacgcttccagcccggagtgctggaggccccctagcccagacagacatctctgcaccctggggcctggacctgcctcctgcctgcccctctcccgccagactgttagaaaatggacactgtgcccagcccggaccttggcagcccaggccggggtggagcatgggcctggccacctctctcctttgctgaggcctccagcttcaggcaggccaaggccttctcctccccacccgccctccccacggggcctcgggacctcaggtggccccagttcaatctcccgctgctgctgctgcgcccttaccttccccagcgtcccagtctctggcagttctggaatggaagggttctggctgccccaacctgctgaagggcagaggtggagggtggggggcgctgagtagggactcagggccatgcctgcccccctcatctcattcaaaccccaccctagtttccctgaaggaacattccttagtctcaagggctagcatccctgaggagccaggccgggccgaatcccctccctgtcaaagctgtcacttcgcgtgccctcgctgcttctgtgtgtggtgagcagaagtggagctggggggcgtggagagcccggcgcccctgccacctccctgacccattagtggactctgcatttaaaaataaataaataaataaaagaaaaa

SEQ ID NO: 296722 - DNA, 1786 bp, Homo sapiens
ccagctgtaccggccgagtttaggatgctcagggggcgggggcggggagccccgtagaaccgagggggtcggcccgggggtcccgggggaggtggagatggtgaaggggcagccgttcgacgtgggcccgcgctacacgcagttgcagtacatcggcgagggcgcgtacggcatggtcagctcggcctatgaccacgtgcgcaagactcgcgtggccatcaagaagatcagccccttcgaacatcagacctactgccagcgcacgctccgggagatccagatcctgctgcgcttccgccatgagaatgtcatcggcatccgagacattctgcgggcgtccaccctggaagccatgagagatgtctacattgtgcaggacctgatggagactgacctgtacaagttgctgaaaagccagcagctgagcaatgaccatatctgctacttcctctaccagatcctgcggggcctcaagtacatccactccgccaacgtgctccaccgagatctaaagccctccaacctgctcatcaacaccacctgcgaccttaagatttgtgatttcggcctggcccggattgccgatcctgagcatgaccacaccggcttcctgacggagtatgtggctacgcgctggtaccgggccccagagatcatgctgaactccaagggctataccaagtccatcgacatctggtctgtgggctgcattctggctgagatgctctctaaccggcccatcttccctggcaagcactacctggatcagctcaaccacattctgggcatcctgggctccccatcccaggaggacctgaattgtatcatcaacatgaaggcccgaaactacctacagtctctgccctccaagaccaaggtggcttgggccaagcttttccccaagtcagactccaaagcccttgacctgctggaccggatgttaacctttaaccccaataaacggatcacagtggaggaagcgctggctcacccctacctggagcagtactatgacccgacggatgagccagtggccgaggagcccttcaccttcgccatggagctggatgacctacctaaggagcggctgaaggagctcatcttccaggagacagcacgcttccagcccggagtgctggaggccccctagcccagacagacatctctgcaccctggggcctggacctgcctcctgcctgcccctctcccgccagactgttagaaaatggacactgtgcccagcccggaccttggcagcccaggccggggtggagcatgggcctggccacctctctcctttgctgaggcctccagcttcaggcaggccaaggccttctcctccccacccgccctccccacggggcctcgggacctcaggtggccccagttcaatctcccgctgctgctgctgcgcccttaccttccccagcgtcccagtctctggcagttctggaatggaagggttctggctgccccaacctgctgaagggcagaggtggagggtggggggcgctgagtagggactcagggccatgcctgcccccctcatctcattcaaaccccaccctagtttccctgaaggaacattccttagtctcaagggctagcatccctgaggagccaggccgggccgaatcccctccctgtcaaagctgtcacttcgcgtgccctcgctgcttctgtgtgtggtgagcagaagtggagctggggggcgtggagagcccggcgcccctgccacctccctgacccgtctaatatataaatatagagatgtgtctatggctga

SEQ ID NO: 296723 - DNA, 1880 bp, Homo sapiens
  misc_feature (9)..(9): n is a, c, g, or t
  misc_feature (15)..(15): n is a, c, g, or t
tctttcatnaagccncggtttatggtacgaggcctgggtggggaggagtggagatggcggcggcggcggctcaggggggcgggggcggggagccccgtagaaccgagggggtcggcccgggggtcccgggggaggtggagatggtgaaggggcagccgttcgacgtgggcccgcgctacacgcagttgcagtacatcggcgagggcgcgtacggcatggtcagctcggcctatgaccacgtgcgcaagactcgcgtggccatcaagaagatcagccccttcgaacatcagacctactgccagcgcacgctccgggagatccagatcctgctgcgcttccgccatgagaatgtcatcggcatccgagacattctgcgggcgtccaccctggaagccatgagagatgtctacattgtgcaggacctgatggagactgacctgtacaagttgctgaaaagccagcagctgagcaatgaccatatctgctacttcctctaccagatcctgcggggcctcaagtacatccactccgccaacgtgctccaccgagatctaaagccctccaacctgctcatcaacaccacctgcgaccttaagatttgtgatttcggcctggcccggattgccgatcctgagcatgaccacaccggcttcctgacggagtatgtggctacgcgctggtaccgggccccagagatcatgctgaactccaagggctataccaagtccatcgacatctggtctgtgggctgcattctggctgagatgctctctaaccggcccatcttccctggcaagcactacctggatcagctcaaccacattctgggcatcctgggctccccatcccaggaggacctgaattgtatcatcaacatgaaggcccgaaactacctacagtctctgccctccaagaccaaggtggcttgggccaagcttttccccaagtcagactccaaagcccttgacctgctggaccggatgttaacctttaaccccaataaacggatcacagtggaggaagcgctggctcacccctacctggagcagtactatgacccgacggatgagccagtggccgaggagcccttcaccttcgccatggagctggatgacctacctaaggagcggctgaaggagctcatcttccaggagacagcacgcttccagcccggagtgctggaggccccctagcccagacagacatctctgcaccctggggcctggaacagaactggcaaagaggcaagaggtcactgagggcctctgtcacccaggacctgcctcctgcctgcccctctcccgccagactgttagaaaatggacactgtgcccagcccggaccttggcagcccaggccggggtggagcatgggcctggccacctctctcctttgctgaggcctccagcttcaggcaggccaaggccttctcctccccacccgccctccccacggggcctcgggacctcaggtggccccagttcaatctcccgctgctgctgctgcgcccttaccttccccagcgtcccagtctctggcagttctggaatggaagggttctggctgccccaacctgctgaagggcagaggtggagggtggggggcgctgagtagggactcagggccatgcctgcccccctcatctcattcaaaccccaccctagtttccctgaaggaacattccttagtctcaagggctagcatccctgaggagccaggccgggccgaatcccctccctgtcaaagctgtcacttcgcgtgccctcgctgcttctgtgtgtggtgagcagaagtggagctggggggcgtggagagcccggcgcccctgccacctccctgacccgtctaatatataaatatagagatgtgtctatggctga

SEQ ID NO: 296724 - DNA, 1772 bp, Homo sapiens
  misc_feature (9)..(9): n is a, c, g, or t
  misc_feature (15)..(15): n is a, c, g, or t
tctttcatnaagccncggtttatggtacgaggcctgggtggggaggagtggagatggcggcggcggcggctcaggggggcgggggcggggagccccgtagaaccgagggggtcggcccgggggtcccgggggaggtggagatggtgaaggggcagccgttcgacgtgggcccgcgctacacgcagttgcagtacatcggcgagggcgcgtacggcatggtcagctcggcctatgaccacgtgcgcaagactcgcgtggccatcaagaagatcagccccttcgaacatcagacctactgccagcgcacgctccgggagatccagatcctgctgcgcttccgccatgagaatgtcatcggcatccgagacattctgcgggcgtccaccctggaagccatgagagatgtctacattgtgcaggacctgatggagactgacctgtacaagttgctgaaaagccagcagctgagcaatgaccatatctgctacttcctctaccagatcctgcggggcctcaagtacatccactccgccaacgtgctccaccgagatctaaagccctccaacctgctcatcaacaccacctgcgaccttaagatttgtgatttcggcctggcccggattgccgatcctgagcatgaccacaccggcttcctgacggagtatgtggctacgcgctggtaccgggccccagagatcatgctgaactccaagggctataccaagtccatcgacatctggtctgtgggctgcattctggctgagatgctctctaaccggcccatcttccctggcaagcactacctggatcagctcaaccacattctgggcatcctgggctccccatcccaggaggacctgaattgtatcatcaacatgaaggcccgaaactacctacagtctctgccctccaagaccaaggtggcttgggccaagcttttccccaagtcagactccaaagcccttgacctgctggaccggatgttaacctttaaccccaataaacggatcacaccagtggccgaggagcccttcaccttcgccatggagctggatgacctacctaaggagcggctgaaggagctcatcttccaggagacagcacgcttccagcccggagtgctggaggccccctagcccagacagacatctctgcaccctggggcctggacctgcctcctgcctgcccctctcccgccagactgttagaaaatggacactgtgcccagcccggaccttggcagcccaggccggggtggagcatgggcctggccacctctctcctttgctgaggcctccagcttcaggcaggccaaggccttctcctccccacccgccctccccacggggcctcgggacctcaggtggccccagttcaatctcccgctgctgctgctgcgcccttaccttccccagcgtcccagtctctggcagttctggaatggaagggttctggctgccccaacctgctgaagggcagaggtggagggtggggggcgctgagtagggactcagggccatgcctgcccccctcatctcattcaaaccccaccctagtttccctgaaggaacattccttagtctcaagggctagcatccctgaggagccaggccgggccgaatcccctccctgtcaaagctgtcacttcgcgtgccctcgctgcttctgtgtgtggtgagcagaagtggagctggggggcgtggagagcccggcgcccctgccacctccctgacccgtctaatatataaatatagagatgtgtctatggctga

SEQ ID NO: 296725 - DNA, 2126 bp, Homo sapiens
  misc_feature (9)..(9): n is a, c, g, or t
  misc_feature (15)..(15): n is a, c, g, or t
tctttcatnaagccncggtttatggtacgaggcctgggtggggaggagtggagatggcggcggcggcggctcaggggggcgggggcggggagccccgtagaaccgagggggtcggcccgggggtcccgggggaggtggagatggtgaaggggcagccgttcgacgtgggcccgcgctacacgcagttgcagtacatcggcgagggcgcgtacggcatggtcagctcggcctatgaccacgtgcgcaagactcgcgtggccatcaagaagatcagccccttcgaacatcagacctactgccagcgcacgctccgggagatccagatcctgctgcgcttccgccatgagaatgtcatcggcatccgagacattctgcgggcgtccaccctggaagccatgagagatgtctacattgtgcaggacctgatggagactgacctgtacaagttgctgaaaagccagcagctgagcaatgaccatatctgctacttcctctaccagatcctgcggggcctcaagtacatccactccgccaacgtgctccaccgagatctaaagccctccaacctgctcatcaacaccacctgcgaccttaagatttgtgatttcggcctggcccggattgccgatcctgagcatgaccacaccggcttcctgacggagtatgtggctacgcgctggtaccgggccccagagatcatgctgaactccaagggctataccaagtccatcgacatctggtctgtgggctgcattctggctgagatgctctctaaccggcccatcttccctggcaagcactacctggatcagctcaaccacattctgggcatcctgggctccccatcccaggaggacctgaattgtatcatcaacatgaaggcccgaaactacctacagtctctgccctccaagaccaaggtggcttgggccaagcttttccccaagtcagactccaaagcccttgacctgctggaccggatgttaacctttaaccccaataaacggatcacagtggaggaagcgctggctcacccctacctggagcagtactatgacccgacggatgagccagtggccgaggagcccttcaccttcgccatggagctggatgacctacctaaggagcggctgaaggagctcatcttccaggagacagcacgcttccagcccggagtgctggaggccccctagcccagacagacatctctgcaccctggggcctggacctgcctcctgcctgcccctctcccgccagactgttagaaaatggacactgtgcccagcccggaccttggcagcccaggccggggtggagcatgggcctggccacctctctcctttgctgaggcctccagcttccaaagctgtcacttcgcgtgccctcgctgcttctgtgtgtggtgagcagaagtggagctggggggcgtggagagcccggcgcccctgccacctccctgacccgtctaatatataaatatagagatgtgtctatggctgagaccctggctctgtctgtgttcgcgacgcccccgccctgccccgtgcggctctgaggacagacttgacttgggctttcaggggcctggtgcccttcactcccagctgcccagggctggggacggggctctggagagctccagactcctagaaagaagggggtcagttttccccttagtcactgtcctgtcctctcgctaatggcttcctgtctaactggctgggggtgattcggggtgactcaggagcaccctacacacccctggatcctctgaaatggcaaggggtaggcatgttggatgcgctggctacaagtaccagtgagagggagaggtcctgacagtcctgggtggtttttactcccctcatgtagcccaggacggggctgctgggggctgggaagggcctggggatatgagagccagggctacttgcctcacctcctgacactaccccagcttcagccgaaccctgcagcctggctccaagccagcccagcggcaggctcagcaggtcccaggggcgtggcagtggccagtagtagagccggcccacactggctaggcaggcagcacagtcccgcggacggctgagcgtgtggctgcaggagcttctgtgggagtacgg

SEQ ID NO: 296726 - DNA, 1511 bp, Homo sapiens
  misc_feature (9)..(9): n is a, c, g, or t
  misc_feature (15)..(15): n is a, c, g, or t
tctttcatnaagccncggtttatggtacgaggcctgggtggggaggagtggagatggcggcggcggcggctcaggggggcgggggcggggagccccgtagaaccgagggggtcggcccgggggtcccgggggaggtggagatggtgaaggggcagccgttcgacgtgggcccgcgctacacgcagttgcagtacatcggcgagggcgcgtacggcatggtcagctcggcctatgaccacgtgcgcaagactcgcgtggccatcaagaagatcagccccttcgaacatcagacctactgccagcgcacgctccgggagatccagatcctgctgcgcttccgccatgagaatgtcatcggcatccgagacattctgcgggcgtccaccctggaagccatgagagatgtctacattgtgcaggacctgatggagactgacctgtacaagttgctgaaaagccagcagctgagcaatgaccatatctgctacttcctctaccagatcctgcggggcctcaagtacatccactccgccaacgtgctccaccgagatctaaagccctccaacctgctcatcaacaccacctgcgaccttaagatttgtgatttcggcctggcccggattgccgatcctgagcatgaccacaccggcttcctgacggagtatgtggctacgcgctggtaccgggccccagagatcatgctgaactccaagggctataccaagtccatcgacatctggtctgtgggctgcattctggctgagatgctctctaaccggcccatcttccctggcaagcactacctggatcagctcaaccacattctgggcatcctgggctccccatcccaggaggacctgaattgtatcatcaacatgaaggcccgaaactacctacagtctctgccctccaagaccaaggtggcttgggccaagcttttccccaagtcagactccaaagcccttgacctgctggaccggatgttaacctttaaccccaataaacggatcacagtggaggaagcgctggctcacccctacctggagcagtactatgacccgacggatgagccagtggccgaggagcccttcaccttcgccatggagctggatgacctacctaaggagcggctgaaggagctcatcttccaggagacagcacgcttccagcccggagtgctggaggccccctagcccagacagacatctctgcaccctggggcctggaacagaactggcaaagaggcaagaggtcactgagggcctctgtcacccagactgcctctggctgccctctcccgcagactggtgtgaaatggcctgtgcccagcccgactgggagcccagcgggtggacatgggctggcctctttcttgtgagggccatatcagagcagggtctccaccacggccacagggggatcaagtcgccaaaaccaggggggaaaaaccaacacgaaagagaggcaaaaaaggggggaaagaagcacaaacacagataacacgcaagtca

SEQ ID NO: 296727 - DNA, 1674 bp, Homo sapiens
taggctaggtacgaggccgggggtgcgcagttgcagtacatcggcgagggcgcgtacggcatggtcagctcggcctatgaccacgtgcgcaagactcgcgtggccatcaagaagatcagccccttcgaacatcagacctactgccagcgcacgctccgggagatccagatcctgctgcgcttccgccatgagaatgtcatcggcatccgagacattctgcgggcgtccaccctggaagccatgagagatgtctacattgtgcaggacctgatggagactgacctgtacaagttgctgaaaagccagcagctgagcaatgaccatatctgctacttcctctaccagatcctgcggggcctcaagtacatccactccgccaacgtgctccaccgagatctaaagccctccaacctgctcatcaacaccacctgcgaccttaagatttgtgatttcggcctggcccggattgccgatcctgagcatgaccacaccggcttcctgacggagtatgtggctacgcgctggtaccgggccccagagatcatgctgaactccaagggctataccaagtccatcgacatctggtctgtgggctgcattctggctgagatgctctctaaccggcccatcttccctggcaagcactacctggatcagctcaaccacattctgggcatcctgggctccccatcccaggaggacctgaattgtatcatcaacatgaaggcccgaaactacctacagtctctgccctccaagaccaaggtggcttgggccaagcttttccccaagtcagactccaaagcccttgacctgctggaccggatgttaacctttaaccccaataaacggatcacagtggaggaagcgctggctcacccctacctggagcagtactatgacccgacggatgagccagtggccgaggagcccttcaccttcgccatggagctggatgacctacctaaggagcggctgaaggagctcatcttccaggagacagcacgcttccagcccggagtgctggaggccccctagcccagacagacatctctgcaccctggggcctggacctgcctcctgcctgcccctctcccgccagactgttagaaaatggacactgtgcccagcccggaccttggcagcccaggccggggtggagcatgggcctggccacctctctcctttgctgaggcctccagcttcaggcaggccaaggccttctcctccccacccgccctccccacggggcctcgggacctcaggtggccccagttcaatctcccgctgctgctgctgcgcccttaccttccccagcgtcccagtctctggcagttctggaatggaagggttctggctgccccaacctgctgaagggcagaggtggagggtggggggcgctgagtagggactcagggccatgcctgcccccctcatctcattcaaaccccaccctagtttccctgaaggaacattccttagtctcaagggctagcatccctgaggagccaggccgggccgaatcccctccctgtcaaagctgtcacttcgcgtgccctcgctgcttctgtgtgtggtgagcagaagtggagctggggggcgtggagagcccggcgcccctgccacctccctgacccgtctaatatataaatatagagatgtgtctatggctga

SEQ ID NO: 296728 - DNA, 1723 bp, Homo sapiens
gcagtcgattccttagtctcaatggcagcatccctgaggagcagtgcgggccgaatcccctccctgtcaaagctgtcacttcgcgtacatcggcgagggcgcgtacggcatggtcagctcggcctatgaccacgtgcgcaagactcgcgtggccatcaagaagatcagccccttcgaacatcagacctactgccagcgcacgctccgggagatccagatcctgctgcgcttccgccatgagaatgtcatcggcatccgagacattctgcgggcgtccaccctggaagccatgagagatgtctacattgtgcaggacctgatggagactgacctgtacaagttgctgaaaagccagcagctgagcaatgaccatatctgctacttcctctaccagatcctgcggggcctcaagtacatccactccgccaacgtgctccaccgagatctaaagccctccaacctgctcatcaacaccacctgcgaccttaagatttgtgatttcggcctggcccggattgccgatcctgagcatgaccacaccggcttcctgacggagtatgtggctacgcgctggtaccgggccccagagatcatgctgaactccaagggctataccaagtccatcgacatctggtctgtgggctgcattctggctgagatgctctctaaccggcccatcttccctggcaagcactacctggatcagctcaaccacattctgggcatcctgggctccccatcccaggaggacctgaattgtatcatcaacatgaaggcccgaaactacctacagtctctgccctccaagaccaaggtggcttgggccaagcttttccccaagtcagactccaaagcccttgacctgctggaccggatgttaacctttaaccccaataaacggatcacagtggaggaagcgctggctcacccctacctggagcagtactatgacccgacggatgagccagtggccgaggagcccttcaccttcgccatggagctggatgacctacctaaggagcggctgaaggagctcatcttccaggagacagcacgcttccagcccggagtgctggaggccccctagcccagacagacatctctgcaccctggggcctggacctgcctcctgcctgcccctctcccgccagactgttagaaaatggacactgtgcccagcccggaccttggcagcccaggccggggtggagcatgggcctggccacctctctcctttgctgaggcctccagcttcaggcaggccaaggccttctcctccccacccgccctccccacggggcctcgggacctcaggtggccccagttcaatctcccgctgctgctgctgcgcccttaccttccccagcgtcccagtctctggcagttctggaatggaagggttctggctgccccaacctgctgaagggcagaggtggagggtggggggcgctgagtagggactcagggccatgcctgcccccctcatctcattcaaaccccaccctagtttccctgaaggaacattccttagtctcaagggctagcatccctgaggagccaggccgggccgaatcccctccctgtcaaagctgtcacttcgcgtgccctcgctgcttctgtgtgtggtgagcagaagtggagctggggggcgtggagagcccggcgcccctgccacctccctgacccgtctaatatataaatatagagatgtgtctatggctga

SEQ ID NO: 296729 - DNA, 2237 bp, Homo sapiens
gtgccagggagcctgggggagaagagccgagatcagggtggggcagggctttggccccaccaccccaggggcccagagagagatgaggcggccaggagtgccacctgcatgttttgggaggggtctgtgagtgcccccggccccaccgtgtgctctgggcctctatccctctgggacagccccgctgcccggatccctcaccctgggaccctcccctgccctgtccattctctcctgcccctcccctggctgccaccttcccagtatttgccccatggtgtgtccccagcatctgcacccccggacctgtcttgggttaaggagcctttcctgggaatgggggcgaagggttcagggccagtagaatggaaggggattgaggagaggggaagtcagtgagcggtcagtctcttcctctgtttgtaaagtcaccgaagggccgcctggctggtccccagctttctctctggagatcccaggcctccacagcaggaaggaaccagcattgtttatgatttgaccagagccagctcctgctctctcccctccctgccaaggcctgggtggggccaccaggcccggactccccctttgtaaggccacagcagcagcctctctccggtcccctcagctcggcctatgaccacgtgcgcaagactcgcgtggccatcaagaagatcagccccttcgaacatcagacctactgccagcgcacgctccgggagatccagatcctgctgcgcttccgccatgagaatgtcatcggcatccgagacattctgcgggcgtccaccctggaagccatgagagatgtctacattgtgcaggacctgatggagactgacctgtacaagttgctgaaaagccagcagctgagcaatgaccatatctgctacttcctctaccagatcctgcggggcctcaagtacatccactccgccaacgtgctccaccgagatctaaagccctccaacctgctcatcaacaccacctgcgaccttaagatttgtgatttcggcctggcccggattgccgatcctgagcatgaccacaccggcttcctgacggagtatgtggctacgcgctggtaccgggccccagagatcatgctgaactccaagggctataccaagtccatcgacatctggtctgtgggctgcattctggctgagatgctctctaaccggcccatcttccctggcaagcactacctggatcagctcaaccacattctgggcatcctgggctccccatcccaggaggacctgaattgtatcatcaacatgaaggcccgaaactacctacagtctctgccctccaagaccaaggtggcttgggccaagcttttccccaagtcagactccaaagcccttgacctgctggaccggatgttaacctttaaccccaataaacggatcacagtggaggaagcgctggctcacccctacctggagcagtactatgacccgacggatgagccagtggccgaggagcccttcaccttcgccatggagctggatgacctacctaaggagcggctgaaggagctcatcttccaggagacagcacgcttccagcccggagtgctggaggccccctagcccagacagacatctctgcaccctggggcctggacctgcctcctgcctgcccctctcccgccagactgttagaaaatggacactgtgcccagcccggaccttggcagcccaggccggggtggagcatgggcctggccacctctctcctttgctgaggcctccagcttcaggcaggccaaggccttctcctccccacccgccctccccacggggcctcgggacctcaggtggccccagttcaatctcccgctgctgctgctgcgcccttaccttccccagcgtcccagtctctggcagttctggaatggaagggttctggctgccccaacctgctgaagggcagaggtggagggtggggggcgctgagtagggactcagggccatgcctgcccccctcatctcattcaaaccccaccctagtttccctgaaggaacattccttagtctcaagggctagcatccctgaggagccaggccgggccgaatcccctccctgtcaaagctgtcacttcgcgtgccctcgctgcttctgtgtgtggtgagcagaagtggagctggggggcgtggagagcccggcgcccctgccacctccctgacccgtctaatatataaatatagagatgtgtctatggctga

SEQ ID NO: 296730 - DNA, 1855 bp, Homo sapiens
cgttcctcggcgccgccggggccccagagggcagcggcagcaacagcagcagcagcagcagcgggggaggagtggagatggcggcggcggcggctcaggggggcgggggcggggagccccgtagaaccgagggggtcggcccgggggtcccgggggaggtggagatggtgaaggggcagccgttcgacgtgggcccgcgctacacgcagttgcagtacatcggcgaggtgcgcgtactggcatggtcagctcggcctatgaccacgtgcgcaagactcgcgtggccatcaagaagatcagccccttcgaacatcagacctactgccagcgcacgctccgggagatccagatcctgctgcgcttccgccatgagaatgtcatcggcatccgagacattctgcgggcgtccaccctggaagccatgagagatgtctacattgtgcaggacctgatggagactgacctgtacaagttgctgaaaagccagcagctgagcaatgaccatatctgctacttcctctaccagatcctgcggggcctcaagtacatccactccgccaacgtgctccaccgagatctaaagccctccaacctgctcatcaacaccacctgcgaccttaagatttgtgatttcggcctggcccggattgccgatcctgagcatgaccacaccggcttcctgacggagtatgtggctacgcgctggtaccgggccccagagatcatgctgaactccaagggctataccaagtccatcgacatctggtctgtgggctgcattctggctgagatgctctctaaccggcccatcttccctggcaagcactacctggatcagctcaaccacattctgggcatcctgggctccccatcccaggaggacctgaattgtatcatcaacatgaaggcccgaaactacctacagtctctgccctccaagaccaaggtggcttgggccaagcttttccccaagtcagactccaaagcccttgacctgctggaccggatgttaacctttaaccccaataaacggatcacagtggaggaagcgctggctcacccctacctggagcagtactatgacccgacggatgagccagtggccgaggagcccttcaccttcgccatggagctggatgacctacctaaggagcggctgaaggagctcatcttccaggagacagcacgcttccagcccggagtgctggaggccccctagcccagacagacatctctgcaccctggggcctggacctgcctcctgcctgcccctctcccgccagactgttagaaaatggacactgtgcccagcccggaccttggcagcccaggccggggtggagcatgggcctggccacctctctcctttgctgaggcctccagcttcaggcaggccaaggccttctcctccccacccgccctccccacggggcctcgggacctcaggtggccccagttcaatctcccgctgctgctgctgcgcccttaccttccccagcgtcccagtctctggcagttctggaatggaagggttctggctgccccaacctgctgaagggcagaggtggagggtggggggcgctgagtagggactcagggccatgcctgcccccctcatctcattcaaaccccaccctagtttccctgaaggaacattccttagtctcaagggctagcatccctgaggagccaggccgggccgaatcccctccctgtcaaagctgtcacttcgcgtgccctcgctgcttctgtgtgtggtgagcagaagtggagctggggggcgtggagagcccggcgcccctgccacctccctgacccgtctaatatataaatatagagatgtgtctatggctga

SEQ ID NO: 296731 - DNA, 1310 bp, Homo sapiens
  misc_feature (9)..(9): n is a, c, g, or t
  misc_feature (15)..(15): n is a, c, g, or t
  misc_feature (1115)..(1115): n is a, c, g, or t
tctttcatnaagccncggtttatggtacgaggcctgggtggggaggagtggagatggcggcggcggcggctcaggggggcgggggcggggagccccgtagaaccgagggggtcggcccgggggtcccgggggaggtggagatggtgaaggggcagccgttcgacgtgggcccgcgctacacgcagttgcagtacatcggcgagggcgcgtacggcatggtcagctcggcctatgaccacgtgcgcaagactcgcgtggccatcaagaagatcagccccttcgaacatcagacctactgccagcgcacgctccgggagatccagatcctgctgcgcttccgccatgagaatgtcatcggcatccgagacattctgcgggcgtccaccctggaagccatgagagatgtctacattgtgcaggacctgatggagactgacctgtacaagttgctgaaaagccagcagctgagcaatgaccatatctgctacttcctctaccagatcctgcggggcctcaagtacatccactccgccaacgtgctccaccgagatctaaagccctccaacctgctcatcaacaccacctgcgaccttaagatttgtgatttcggcctggcccggattgccgatcctgagcatgaccacaccggcttcctgacggagtatgtggctacgcgctggtaccgggccccagagatcatgctgaactccaagggctataccaagtccatcgacatctggtctgtgggctgcattctggctgagatgctctctaaccggcccatcttccctggcaagcactacctggatcagctcaaccacattctgggcatcctgggctccccatcccaggaggacctgaattgtatcatcaacatgaaggcccgaaactacctacagtctctgccctccaagaccaaggtggcttgggccaagcttttccccaagtcagactccaaagcccttgacctgctggaccggatgttaacctttaaccccaataaacggatcacagtggaggaagcgctggctcacccctacctggagcagtactatgacccgacggatgagccagtggcgaggagccttcacttcgcatggagtggatgactactnagagggtgaggaatccacttcagggacagccgttcaggcggatggtggaggggctagacaaaaattttcgggccggggcaggtcgtcgggctctccgattgaataggtggccccgtcggacgcggagggcggcgtcatagccgagggacacacgatagaaacgattacgtttattgaggcggtgcgccgccccac

SEQ ID NO: 296732 - DNA, 1637 bp, Homo sapiens
acgccctggccgcttcgccatcgaggggaggctcggcctatgaccacgtgcgcaagactcgcgtggccatcaagaagatcagccccttcgaacatcagacctactgccagcgcacgctccgggagatccagatcctgctgcgcttccgccatgagaatgtcatcggcatccgagacattctgcgggcgtccaccctggaagccatgagagatgtctacattgtgcaggacctgatggagactgacctgtacaagttgctgaaaagccagcagctgagcaatgaccatatctgctacttcctctaccagatcctgcggggcctcaagtacatccactccgccaacgtgctccaccgagatctaaagccctccaacctgctcatcaacaccacctgcgaccttaagatttgtgatttcggcctggcccggattgccgatcctgagcatgaccacaccggcttcctgacggagtatgtggctacgcgctggtaccgggccccagagatcatgctgaactccaagggctataccaagtccatcgacatctggtctgtgggctgcattctggctgagatgctctctaaccggcccatcttccctggcaagcactacctggatcagctcaaccacattctgggcatcctgggctccccatcccaggaggacctgaattgtatcatcaacatgaaggcccgaaactacctacagtctctgccctccaagaccaaggtggcttgggccaagcttttccccaagtcagactccaaagcccttgacctgctggaccggatgttaacctttaaccccaataaacggatcacagtggaggaagcgctggctcacccctacctggagcagtactatgacccgacggatgagccagtggccgaggagcccttcaccttcgccatggagctggatgacctacctaaggagcggctgaaggagctcatcttccaggagacagcacgcttccagcccggagtgctggaggccccctagcccagacagacatctctgcaccctggggcctggacctgcctcctgcctgcccctctcccgccagactgttagaaaatggacactgtgcccagcccggaccttggcagcccaggccggggtggagcatgggcctggccacctctctcctttgctgaggcctccagcttcaggcaggccaaggccttctcctccccacccgccctccccacggggcctcgggacctcaggtggccccagttcaatctcccgctgctgctgctgcgcccttaccttccccagcgtcccagtctctggcagttctggaatggaagggttctggctgccccaacctgctgaagggcagaggtggagggtggggggcgctgagtagggactcagggccatgcctgcccccctcatctcattcaaaccccaccctagtttccctgaaggaacattccttagtctcaagggctagcatccctgaggagccaggccgggccgaatcccctccctgtcaaagctgtcacttcgcgtgccctcgctgcttctgtgtgtggtgagcagaagtggagctggggggcgtggagagcccggcgcccctgccacctccctgacccgtctaatatataaatatagagatgtgtctatggctga

SEQ ID NO: 296733 - DNA, 1633 bp, Homo sapiens
gataccagtgtcctcagatgtctgcagattaacacctgcatgatcactgttatctgtgttgggctgcaataacatcagccccttcgaacatcagacctactgccagcgcacgctccgggagatccagatcctgctgcgcttccgccatgagaatgtcatcggcatccgagacattctgcgggcgtccaccctggaagccatgagagatgtctacattgtgcaggacctgatggagactgacctgtacaagttgctgaaaagccagcagctgagcaatgaccatatctgctacttcctctaccagatcctgcggggcctcaagtacatccactccgccaacgtgctccaccgagatctaaagccctccaacctgctcatcaacaccacctgcgaccttaagatttgtgatttcggcctggcccggattgccgatcctgagcatgaccacaccggcttcctgacggagtatgtggctacgcgctggtaccgggccccagagatcatgctgaactccaagggctataccaagtccatcgacatctggtctgtgggctgcattctggctgagatgctctctaaccggcccatcttccctggcaagcactacctggatcagctcaaccacattctgggcatcctgggctccccatcccaggaggacctgaattgtatcatcaacatgaaggcccgaaactacctacagtctctgccctccaagaccaaggtggcttgggccaagcttttccccaagtcagactccaaagcccttgacctgctggaccggatgttaacctttaaccccaataaacggatcacagtggaggaagcgctggctcacccctacctggagcagtactatgacccgacggatgagccagtggccgaggagcccttcaccttcgccatggagctggatgacctacctaaggagcggctgaaggagctcatcttccaggagacagcacgcttccagcccggagtgctggaggccccctagcccagacagacatctctgcaccctggggcctggacctgcctcctgcctgcccctctcccgccagactgttagaaaatggacactgtgcccagcccggaccttggcagcccaggccggggtggagcatgggcctggccacctctctcctttgctgaggcctccagcttcaggcaggccaaggccttctcctccccacccgccctccccacggggcctcgggacctcaggtggccccagttcaatctcccgctgctgctgctgcgcccttaccttccccagcgtcccagtctctggcagttctggaatggaagggttctggctgccccaacctgctgaagggcagaggtggagggtggggggcgctgagtagggactcagggccatgcctgcccccctcatctcattcaaaccccaccctagtttccctgaaggaacattccttagtctcaagggctagcatccctgaggagccaggccgggccgaatcccctccctgtcaaagctgtcacttcgcgtgccctcgctgcttctgtgtgtggtgagcagaagtggagctggggggcgtggagagcccggcgcccctgccacctccctgacccgtctaatatataaatatagagatgtgtctatggctga

SEQ ID NO: 296734 - DNA, 1405 bp, Homo sapiens
ggaaggcaatacaaaatgtggcgagttgaaaagccagcagctgagcaatgaccatatctgctacttcctctaccagatcctgcggggcctcaagtacatccactccgccaacgtgctccaccgagatctaaagccctccaacctgctcatcaacaccacctgcgaccttaagatttgtgatttcggcctggcccggattgccgatcctgagcatgaccacaccggcttcctgacggagtatgtggctacgcgctggtaccgggccccagagatcatgctgaactccaagggctataccaagtccatcgacatctggtctgtgggctgcattctggctgagatgctctctaaccggcccatcttccctggcaagcactacctggatcagctcaaccacattctgggcatcctgggctccccatcccaggaggacctgaattgtatcatcaacatgaaggcccgaaactacctacagtctctgccctccaagaccaaggtggcttgggccaagcttttccccaagtcagactccaaagcccttgacctgctggaccggatgttaacctttaaccccaataaacggatcacagtggaggaagcgctggctcacccctacctggagcagtactatgacccgacggatgagccagtggccgaggagcccttcaccttcgccatggagctggatgacctacctaaggagcggctgaaggagctcatcttccaggagacagcacgcttccagcccggagtgctggaggccccctagcccagacagacatctctgcaccctggggcctggacctgcctcctgcctgcccctctcccgccagactgttagaaaatggacactgtgcccagcccggaccttggcagcccaggccggggtggagcatgggcctggccacctctctcctttgctgaggcctccagcttcaggcaggccaaggccttctcctccccacccgccctccccacggggcctcgggacctcaggtggccccagttcaatctcccgctgctgctgctgcgcccttaccttccccagcgtcccagtctctggcagttctggaatggaagggttctggctgccccaacctgctgaagggcagaggtggagggtggggggcgctgagtagggactcagggccatgcctgcccccctcatctcattcaaaccccaccctagtttccctgaaggaacattccttagtctcaagggctagcatccctgaggagccaggccgggccgaatcccctccctgtcaaagctgtcacttcgcgtgccctcgctgcttctgtgtgtggtgagcagaagtggagctggggggcgtggagagcccggcgcccctgccacctccctgacccgtctaatatataaatatagagatgtgtctatggctga

SEQ ID NO: 296735 - DNA, 1878 bp, Homo sapiens
  misc_feature (9)..(9): n is a, c, g, or t
  misc_feature (15)..(15): n is a, c, g, or t
  misc_feature (630)..(630): n is a, c, g, or t
tctttcatnaagccncggtttatggtacgaggcctgggtggggaggagtggagatggcggcggcggcggctcaggggggcgggggcggggagccccgtagaaccgagggggtcggcccgggggtcccgggggaggtggagatggtgaaggggcagccgttcgacgtgggcccgcgctacacgcagttgcagtacatcggcgagggcgcgtacggcatggtcagctcggcctatgaccacgtgcgcaagactcgcgtggccatcaagaagatcagccccttcgaacatcagacctactgccagcgcacgctccgggagatccagatcctgctgcgcttccgccatgagaatgtcatcggcatccgagacattctgcgggcgtccaccctggaagccatgagagatgtctacattgtgcaggacctgatggagactgacctgtacaagttgctgaaaagccagcagctgagcaatgaccatatctgctacttcctctaccagatcctgcggggcctcaagtacatccactccgccaacgtgctccaccgagatctaaagccctccaacctgctcatcaacaccacctgcgaccttaagatttgtgatttcggcctggccccggatttgccgnatccttgagcatgagccaacaccggggcctttttttcccccctggaaacgggggaggtttattgggtggggcttaaccggccggcctggggtacccgggggcccccatgagatcagtgctgaacgtccaagtggctataccaagtccatcgacatctggtctgtgggctgcattctggctgagatgctctctaaccggcccatcttccctggcaagcactacctggatcagctcaaccacattctgggcatcctgggctccccatcccaggaggacctgaattgtatcatcaacatgaaggcccgaaactacctacagtctctgccctccaagaccaaggtggcttgggccaagcttttccccaagtcagactccaaagcccttgacctgctggaccggatgttaacctttaaccccaataaacggatcacagtggaggaagcgctggctcacccctacctggagcagtactatgacccgacggatgagccagtggccgaggagcccttcaccttcgccatggagctggatgacctacctaaggagcggctgaaggagctcatcttccaggagacagcacgcttccagcccggagtgctggaggccccctagcccagacagacatctctgcaccctggggcctggacctgcctcctgcctgcccctctcccgccagactgttagaaaatggacactgtgcccagcccggaccttggcagcccaggccggggtggagcatgggcctggccacctctctcctttgctgaggcctccagcttcaggcaggccaaggccttctcctccccacccgccctccccacggggcctcgggacctcaggtggccccagttcaatctcccgctgctgctgctgcgcccttaccttccccagcgtcccagtctctggcagttctggaatggaagggttctggctgccccaacctgctgaagggcagaggtggagggtggggggcgctgagtagggactcagggccatgcctgcccccctcatctcattcaaaccccaccctagtttccctgaaggaacattccttagtctcaagggctagcatccctgaggagccaggccgggccgaatcccctccctgtcaaagctgtcacttcgcgtgccctcgctgcttctgtgtgtggtgagcagaagtggagctggggggcgtggagagcccggcgcccctgccacctccctgacccgtctaatatataaatatagagatgtgtctatggctga

SEQ ID NO: 296736 - DNA, 1712 bp, Homo sapiens
  misc_feature (9)..(9): n is a, c, g, or t
  misc_feature (15)..(15): n is a, c, g, or t
tctttcatnaagccncggtttatggtacgaggcctgggtggggaggagtggagatggcggcggcggcggctcaggggggcgggggcggggagccccgtagaaccgagggggtcggcccgggggtcccgggggaggtggagatggtgaaggggcagccgttcgacgtgggcccgcgctacacgcagttgcagtacatcggcgagggcgcgtacggcatggtcagctcggcctatgaccacgtgcgcaagactcgcgtggccatcaagaagatcagccccttcgaacatcagacctactgccagcgcacgctccgggagatccagatcctgctgcgcttccgccatgagaatgtcatcggcatccgagacattctgcgggcgtccaccctggaagccatgagagatgtctacattgtgcaggacctgatggagactgacctgtacaagttgctgaaaagccagcagctgagcaatgaccatatctgctacttcctctaccagatcctgcggggcctcaagtacatccactccgccaacgtgctccaccgagatctaaagccctccaacctgctcatcaacaccacctgcgaccttaagggctataccaagtccatcgacatctggtctgtgggctgcattctggctgagatgctctctaaccggcccatcttccctggcaagcactacctggatcagctcaaccacattctgggcatcctgggctccccatcccaggaggacctgaattgtatcatcaacatgaaggcccgaaactacctacagtctctgccctccaagaccaaggtggcttgggccaagcttttccccaagtcagactccaaagcccttgacctgctggaccggatgttaacctttaaccccaataaacggatcacagtggaggaagcgctggctcacccctacctggagcagtactatgacccgacggatgagccagtggccgaggagcccttcaccttcgccatggagctggatgacctacctaaggagcggctgaaggagctcatcttccaggagacagcacgcttccagcccggagtgctggaggccccctagcccagacagacatctctgcaccctggggcctggacctgcctcctgcctgcccctctcccgccagactgttagaaaatggacactgtgcccagcccggaccttggcagcccaggccggggtggagcatgggcctggccacctctctcctttgctgaggcctccagcttcaggcaggccaaggccttctcctccccacccgccctccccacggggcctcgggacctcaggtggccccagttcaatctcccgctgctgctgctgcgcccttaccttccccagcgtcccagtctctggcagttctggaatggaagggttctggctgccccaacctgctgaagggcagaggtggagggtggggggcgctgagtagggactcagggccatgcctgcccccctcatctcattcaaaccccaccctagtttccctgaaggaacattccttagtctcaagggctagcatccctgaggagccaggccgggccgaatcccctccctgtcaaagctgtcacttcgcgtgccctcgctgcttctgtgtgtggtgagcagaagtggagctggggggcgtggagagcccggcgcccctgccacctccctgacccgtctaatatataaatatagagatgtgtctatggctga

SEQ ID NO: 296737 - DNA, 1579 bp, Homo sapiens
gaccgggtactatggaaacatacgggaatagcccctgatttggattgggcctggagtggtgacctttgagctgagccatgaaggacaaatgggagttgggcagatggaaaggaaaggcatggtgttagggagtggcagagaggatgttaatgggcagaaagaccagtatgtgcagcgacatatagcaggtgagaaagggatgggcatgttcagaaaggtgcagggtagggcatagcacctgaggcggagcagttccacttagcctaagtggaactgctccgccaacgtgctccaccgagatctaaagccctccaacctgctcatcaacaccacctgcgaccttaagatttgtgatttcggcctggcccggattgccgatcctgagcatgaccacaccggcttcctgacggagtatgtggctacgcgctggtaccgggccccagagatcatgctgaactccaagggctataccaagtccatcgacatctggtctgtgggctgcattctggctgagatgctctctaaccggcccatcttccctggcaagcactacctggatcagctcaaccacattctgggcatcctgggctccccatcccaggaggacctgaattgtatcatcaacatgaaggcccgaaactacctacagtctctgccctccaagaccaaggtggcttgggccaagcttttccccaagtcagactccaaagcccttgacctgctggaccggatgttaacctttaaccccaataaacggatcacagtggaggaagcgctggctcacccctacctggagcagtactatgacccgacggatgagccagtggccgaggagcccttcaccttcgccatggagctggatgacctacctaaggagcggctgaaggagctcatcttccaggagacagcacgcttccagcccggagtgctggaggccccctagcccagacagacatctctgcaccctggggcctggacctgcctcctgcctgcccctctcccgccagactgttagaaaatggacactgtgcccagcccggaccttggcagcccaggccggggtggagcatgggcctggccacctctctcctttgctgaggcctccagcttcaggcaggccaaggccttctcctccccacccgccctccccacggggcctcgggacctcaggtggccccagttcaatctcccgctgctgctgctgcgcccttaccttccccagcgtcccagtctctggcagttctggaatggaagggttctggctgccccaacctgctgaagggcagaggtggagggtggggggcgctgagtagggactcagggccatgcctgcccccctcatctcattcaaaccccaccctagtttccctgaaggaacattccttagtctcaagggctagcatccctgaggagccaggccgggccgaatcccctccctgtcaaagctgtcacttcgcgtgccctcgctgcttctgtgtgtggtgagcagaagtggagctggggggcgtggagagcccggcgcccctgccacctccctgacccgtctaatatataaatatagagatgtgtctatggctga

SEQ ID NO: 296738 - DNA, 1697 bp, Homo sapiens
  misc_feature (9)..(9): n is a, c, g, or t
  misc_feature (15)..(15): n is a, c, g, or t
tctttcatnaagccncggtttatggtacgaggcctgggtggggaggagtggagatggcggcggcggcggctcaggggggcgggggcggggagccccgtagaaccgagggggtcggcccgggggtcccgggggaggtggagatggtgaaggggcagccgttcgacgtgggcccgcgctacacgcagttgcagtacatcggcgagggcgcgtacggcatggtcagctcggcctatgaccacgtgcgcaagactcgcgtggccatcaagaagatcagccccttcgaacatcagacctactgccagcgcacgctccgggagatccagatcctgctgcgcttccgccatgagaatgtcatcggcatccgagacattctgcgggcgtccaccctggaagccatgagagatgtctacattgtgcaggacctgatggagactgacctgtacaagttgctgaaaagccagcagctgagcaatgaccatatctgctacttcctctaccagatcctgcggggcctcaagtacatccactccgccaacgtgctccaccgagatctaaagccctccaacctgctcatcaacaccacctgcgaccttaagatttgtgatttcggcctggcccggattgccgatcctgagcatgaccacaccggcttcctgacggagtatgtggctacgcgctggtaccgggccccagagatcatgctgaactccaagggctataccaagtccatcgacatctggtctgtgggctgcattctggctgagatgctctctaaccggcccatcttccctggcaagcactacctggatcagctcaaccacattctggcccttgacctgctggaccggatgttaacctttaaccccaataaacggatcacagtggaggaagcgctggctcacccctacctggagcagtactatgacccgacggatgagccagtggccgaggagcccttcaccttcgccatggagctggatgacctacctaaggagcggctgaaggagctcatcttccaggagacagcacgcttccagcccggagtgctggaggccccctagcccagacagacatctctgcaccctggggcctggacctgcctcctgcctgcccctctcccgccagactgttagaaaatggacactgtgcccagcccggaccttggcagcccaggccggggtggagcatgggcctggccacctctctcctttgctgaggcctccagcttcaggcaggccaaggccttctcctccccacccgccctccccacggggcctcgggacctcaggtggccccagttcaatctcccgctgctgctgctgcgcccttaccttccccagcgtcccagtctctggcagttctggaatggaagggttctggctgccccaacctgctgaagggcagaggtggagggtggggggcgctgagtagggactcagggccatgcctgcccccctcatctcattcaaaccccaccctagtttccctgaaggaacattccttagtctcaagggctagcatccctgaggagccaggccgggccgaatcccctccctgtcaaagctgtcacttcgcgtgccctcgctgcttctgtgtgtggtgagcagaagtggagctggggggcgtggagagcccggcgcccctgccacctccctgacccgtctaatatataaatatagagatgtgtctatggctga

SEQ ID NO: 296739 - DNA, 1159 bp, Homo sapiens
tgcggcgacctagaggatcccctcgcgaaacgtgatatcccaaggctataccaagtccatcgacatctggtctgtgggctgcattctggctgagatgctctctaaccggcccatcttccctggcaagcactacctggatcagctcaaccacattctgggcatcctgggctccccatcccaggaggacctgaattgtatcatcaacatgaaggcccgaaactacctacagtctctgccctccaagaccaaggtggcttgggccaagcttttccccaagtcagactccaaagcccttgacctgctggaccggatgttaacctttaaccccaataaacggatcacagtggaggaagcgctggctcacccctacctggagcagtactatgacccgacggatgagccagtggccgaggagcccttcaccttcgccatggagctggatgacctacctaaggagcggctgaaggagctcatcttccaggagacagcacgcttccagcccggagtgctggaggccccctagcccagacagacatctctgcaccctggggcctggacctgcctcctgcctgcccctctcccgccagactgttagaaaatggacactgtgcccagcccggaccttggcagcccaggccggggtggagcatgggcctggccacctctctcctttgctgaggcctccagcttcaggcaggccaaggccttctcctccccacccgccctccccacggggcctcgggacctcaggtggccccagttcaatctcccgctgctgctgctgcgcccttaccttccccagcgtcccagtctctggcagttctggaatggaagggttctggctgccccaacctgctgaagggcagaggtggagggtggggggcgctgagtagggactcagggccatgcctgcccccctcatctcattcaaaccccaccctagtttccctgaaggaacattccttagtctcaagggctagcatccctgaggagccaggccgggccgaatcccctccctgtcaaagctgtcacttcgcgtgccctcgctgcttctgtgtgtggtgagcagaagtggagctggggggcgtggagagcccggcgcccctgccacctccctgacccgtctaatatataaatatagagatgtgtctatggctga

SEQ ID NO: 296740 - DNA, 903 bp, Homo sapiens
ttccctgtgacccctgactcctgcccttccatagcccttgacctgctggaccggatgttaacctttaaccccaataaacggatcacagtggaggaagcgctggctcacccctacctggagcagtactatgacccgacggatgagccagtggccgaggagcccttcaccttcgccatggagctggatgacctacctaaggagcggctgaaggagctcatcttccaggagacagcacgcttccagcccggagtgctggaggccccctagcccagacagacatctctgcaccctggggcctggacctgcctcctgcctgcccctctcccgccagactgttagaaaatggacactgtgcccagcccggaccttggcagcccaggccggggtggagcatgggcctggccacctctctcctttgctgaggcctccagcttcaggcaggccaaggccttctcctccccacccgccctccccacggggcctcgggacctcaggtggccccagttcaatctcccgctgctgctgctgcgcccttaccttccccagcgtcccagtctctggcagttctggaatggaagggttctggctgccccaacctgctgaagggcagaggtggagggtggggggcgctgagtagggactcagggccatgcctgcccccctcatctcattcaaaccccaccctagtttccctgaaggaacattccttagtctcaagggctagcatccctgaggagccaggccgggccgaatcccctccctgtcaaagctgtcacttcgcgtgccctcgctgcttctgtgtgtggtgagcagaagtggagctggggggcgtggagagcccggcgcccctgccacctccctgacccgtctaatatataaatatagagatgtgtctatggctga

SEQ ID NO: 296741 - DNA, 832 bp, Homo sapiens
  misc_feature (9)..(9): n is a, c, g, or t
  misc_feature (15)..(15): n is a, c, g, or t
tctttcatnaagccncggtttatggtacgaggcctgggtggggaggagtggagatggcggcggcggcggctcaggggggcgggggcggggagccccgtagaaccgagggggtcggcccgggggtcccgggggaggtggagatggtgaaggggcagccgttcgacgtgggcccgcgctacacgcagttgcagtacatcggcgagggcgcgtacggcatggtcagctcggcctatgaccacgtgcgcaagactcgcgtggccatcaagaagatcagccccttcgaacatcagacctactgccagcgcacgctccgggagatccagatcctgctgcgcttccgccatgagaatgtcatcggcatccgagacattctgcgggcgtccaccctggaagccatgagagatgtctacattgtgcaggacctgatggagactgacctgtacaagttgctgaaaagccagcagctgagcaatgaccatatctgctacttcctctaccagatcctgcggggcctcaagtacatccactccgccaacgtgctccaccgagatctaaagccctccaacctgctcatcaacaccacctgcgaccttaagatttgtgatttcggcctggcccggattgccgatcctgagcatgaccacaccggcttcctgacggagtatgtggctacgcgctggtaccgggccccagagatcatgctgaactccaagggctataccaagtccatcgacatctggtctgtgggctgcattctggctgagatgctcatcttaacgacctagtgttctcggatcaacgcatgaccaggttactcaagaatacactgagc

SEQ ID NO: 296742 - DNA, 919 bp, Homo sapiens
cgttcctcggcgccgccggggccccagagggcagcggcagcaacagcagcagcagcagcagcgggggaggagtggagatggcggcggcggcggctcaggggggcgggggcggggagccccgtagaaccgagggggtcggcccgggggtcccgggggaggtggagatggtgaaggggcagccgttcgacgtgggcccgcgctacacgcagttgcagtacatcggcgagggcgcgtacggcatggtcaggccacagcagcagcctctctccggtcccctcagctcggcctatgaccacgtgcgcaagactcgcgtggccatcaagaagatcagccccttcgaacatcagacctactgccagcgcacgctccgggagatccagatcctgctgcgcttccgccatgagaatgtcatcggcatccgagacattctgcgggcgtccaccctggaagccatgagagatgtctacattgtgcaggacctgatggagactgacctgtacaagttgctgaaaagccagcagctgagcaatgaccatatctgctacttcctctaccagatcctgcggggcctcaagtacatccactccgccaacgtgctccaccgagatctaaagccctccaacctgctcatcaacaccacctgcgaccttaagatttgtgatttcggcctggcccggattgccgatcctgagcatgaccacaccggcttcctgacggagtatgtggctacgcgctggtaccgggccccagagatcatgctgaactccaaggtaggaggggctgcccactcctgaaaggaacggaccagttcccaggaagccctggagctacctctgagccagacactgacccccatgacacaggaattctaccctctgggccttgggctctgcaaggaagctgagcattgagccctcca

SEQ ID NO: 296743 - DNA, 390 bp, Homo sapiens
tggatcacaaggtcaagagttgagaccagcctggccaacatggtgaaacccggtctctactgtaaagaatacaaaaatgagctgggtgtggtggcacatgcctataatcccagctactcaggaggctgaggcaggagaattgcttgaacccaggaggcagaggttgcagtgagccgagatcgcaccactgcactccagcctggactacagagcaagactccatctcaaaaaaaaaaaaaaaaatgcccaaggctgcccagactggtggcccaccgagtcctccagccccaaatgtctctgcctgtcaacaccttgcatcctccagccccacaagccattctaatctccttctaggaacagaactggcaaagaggcaagaggtcactgagg

SEQ ID NO: 296744 - DNA, 217 bp, Homo sapiens
gccttgagcgccgagcttagcagctaggtctgattccagatttgtgatttcggcctggcccggattgccgatcctgagcatgaccacaccggcttcctgacggagtatgtggctacgcgctggtaccgggccccagagatcatgctgaactccaaggtaggaggggctgcccactcctgaaaggaacggaccagttcccaggaagccctggagctac

SEQ ID NO: 296745 - DNA, 1619 bp, Homo sapiens
ggcgcggagcgaggaagcgggtggcgctgggacgcatgctctgggggagatgagtataatgacccgcgtttgtccgccgcccgtgccccgctcaatccccgcatcaatcccgtgaggccgtttctcccgttggctccactgtaccgggggctgaggcccagggaggtctcgcggctccctaggttatccagctagtaagaggcgaagctggaattctcactgtgggcccattccatggcttttgccagagcgccagggacacactcagttcaccttctagcagggaagacccaaagatgcgcgcccctggcagccagggcgtcggaccaggcaattcctactgtccagcatcacctcctccaggcctctcggatgcctctgttgggacagctaagttcctcttcaaagactcaatttcctggtcataagctgtaaacagattctactcccgctttttcttctttgtcgcacgtctaccctatttgggaaagtttaaaccttagccaatcgggatcagctcagattgtgcggtccaaccccccagccaatggggaaaggacacagaaacaggaactgcgttagggttaaaaaccacttccctcctttgttggcgggtgctcttgggattgcaaccagcgcaagcagcacccttctgcagaagtaaagatgccttgctgggaagtcttctgtctcagtgctggtttttcttgactacactgagcacttgttttcaacaaatttgagggtcttctgggatcccattctcctttgggaggggtagcgattacttttcctcgtgagacacgtcccactgccttgttgcagtggcccaaggagcggaggatcgggtccacccaaagtgaggaataaatccggactttcagcaacgtgggcaggaaggagccttaaaattcccaggcaagtgggtaactctgtgcacagaccaagccgccgacgggaccatcacaaaagctttacaaggccttaccaccctggcaaatgaattagccgaaaattctggactagataacccttttatgggtctcatggaaaagtggtttggaaaatggaaaggactcctggcttcaatctttacctctcttgcaattgtaacaagtgtacttatccttgtgggctgccgcatcataccttgtattcgtgggttaactcaaaggctcatagaaacagccctcactaaagccttcctctcttctctccctccatacttggacaagctcttgctcctggataatcaagaagaacaacgaagccaaatcctgttaaaattttttgcagaggaagaagtatcaaatagaagagaggaaattgttgggacagctaagctcttcaaagactcaacttcctggtcataaacttctccccgtttttcttctttttcgccagtctaccctgtttgggaaagtttaaaccttagccagtcgggatcagctcagattgtgcagtccatccccagtcaatggggaaaggacacagaaacaggaactgcgttagggttaaaaagcccttctctcctttgtttggggtgctcttgcgattacaagtgcgcaagtagcaccgttctgaagtaaagatgccttgctgggaaatctgtctcagtg

SEQ ID NO: 296746 - DNA, 1332 bp, Homo sapiens
ggcgcggagcgaggaagcgggtggcgctgggacgcatgctctgggggagatgagtataatgacccgcgtttgtccgccgcccgtgccccgctcaatccccgcatcaatcccgtgaggccgtttctcccgttggctccactgtaccgggggctgaggcccagggaggtctcgcggctccctaggttatccagctagtaagaggcgaagctggaattctcactgtgggcccattccatggcttttgccagagcgccagggacacactcagttcaccttctagcagggaagacccaaagatgcgcgcccctggcagccagggcgtcggaccaggcaattcctactgtccagcatcacctcctccaggcctctcggatgcctctgttgggacagctaagttcctcttcaaagactcaatttcctggtcataagctgtaaacagattctactcccgctttttcttctttgtcgcacgtctaccctatttgggaaagtttaaaccttagccaatcgggatcagctcagattgtgcggtccaaccccccagccaatggggaaaggacacagaaacaggaactgcgttagggttaaaaaccacttccctcctttgttggcgggtgctcttgggattgcaaccagcgcaagcagcacccttctgcagaagtaaagatgccttgctgggaagtcttctgtctcagtgctggtttttcttgactacactgagcacttgttttcaacaaatttgagggtcttctgggatcccattctcctttgggaggggtagcgattacttttcctcgtgagacacgtcccactgccttgttgcagtggcccaaggagcggaggatcgggtccacccaaagtgaggaataaatccggactttcagcaacgtgggcaggaaggagccttaaaattcccaggcaagtgggtaactctgtgcacagaccaagctcttgctcctggataatcaagaagaacaacgaagccaaatcctgttaaaattttttgcagaggaagaagtatcaaatagaagagaggaaattgttgggacagctaagctcttcaaagactcaacttcctggtcataaacttctccccgtttttcttctttttcgccagtctaccctgtttgggaaagtttaaaccttagccagtcgggatcagctcagattgtgcagtccatccccagtcaatggggaaaggacacagaaacaggaactgcgttagggttaaaaagcccttctctcctttgtttggggtgctcttgcgattacaagtgcgcaagtagcaccgttctgaagtaaagatgccttgctgggaaatctgtctcagtg

SEQ ID NO: 296747 - DNA, 852 bp, Homo sapiens
  misc_feature (25)..(25): n is a, c, g, or t
  misc_feature (29)..(29): n is a, c, g, or t
  misc_feature (38)..(38): n is a, c, g, or t
ttcggagctggaaccacttgtgaanacanagtgcccanaaaaaaagtccagacattttattgcttttgcttctttattcttcatcctggtttcaattacaactttttgcctggaaacacatgaagctttcaatattgttaaaaacaagacagaaccagtcatcaatggcacaagtgttgttctacagtatgaaattgaaacggatcctgccttgacgtatgtagaaggagtgtgtgtggtgtggtttacttttgaatttttagtccgtattgttttttcacccaataaacttgaattcatcaaaaatctcttgaatatcattgactttgtggccatcctacctttctacttagaggtgggactcagtgggctgtcatccaaagctgctaaagatgtgcttggcttcctcagggtggtaaggtttgtgaggatcctgagaattttcaagctcacccgccattttgtaggtctgagggtgcttggacatactcttcgagctagtactaatgaatttttgctgctgataattttcctggctctaggagttttgatatttgctaccatgatctactatgccgagagagtgggagctcaacctaacgacccttcagctagtgagcacacacagttcaaaaacattcccattgggttctggtgggctgtagtgaccatgactaccctgggttatggggatatgtacccccaaacatggtcaggcatgctggtgggagccctgtgtgctctggctggagtgctgacaatagccatgccagtgcctgtcattgtcaataattttggaatgtactactccttggcaatggcaaagcagaaacttccaaggaaaagaaagaa

SEQ ID NO: 296748 - DNA, 301 bp, Homo sapiens
  misc_feature (25)..(25): n is a, c, g, or t
  misc_feature (29)..(29): n is a, c, g, or t
  misc_feature (38)..(38): n is a, c, g, or t
ttcggagctggaaccacttgtgaanacanagtgcccanaaaaaaagtccagacattttattgcttttgcttctttattcttcatcctggtttcaattacaactttttgcctggaaacacatgaagctttcaatattgttaaaaacaagacagaaccagtcatcaatggcacaagtgttgttctacagtatgaaattgaaacggatcctgccttgacgtatgtagaaggagtgtgtgtggtgtggtttacttttgaatttttagtccgtattgttttttcacccaataaacttgaattcatc

SEQ ID NO: 296749 - DNA, 1683 bp, Homo sapiens
tctcccccaccccagcgcccagggaagcggctcaaccacctgaatccggaaaacgccaacaagtagtttctcgtcggagaagggcggctcacctgggcgccaagactcagtcccgctgcccagagaacctcgtccactcggaaaccaaagcagaaccacttttctctcggtctcgttaagtcatgtctgagtcacagagatgggcaagatcgagaacaacgagagggtgatcctcaatgtcgggggcacccggcacgaaacctaccgcagcaccctcaagaccctgcctggaacacgcctggcccttcttgcctcctccgagcccccaggcgactgcttgaccacggcgggcgacaagctgcagccgtcgccgcctccactgtcgccgccgccgagagcgcccccgctgtcccccgggccaggcggctgcttcgagggcggcgcgggcaactgcagttcccgcggcggcagggccagcgaccatcccggtggcggccgcgagttcttcttcgaccggcacccgggcgtcttcgcctatgtgctcaattactaccgcaccggcaagctgcactgccccgcagacgtgtgcgggccgctcttcgaggaggagctggccttctggggcatcgacgagaccgacgtggagccctgctgctggatgacctaccggcagcaccgcgacgccgaggaggcgctggacatcttcgagacccccgacctcattggcggcgaccccggcgacgacgaggacctggcggccaagaggctgggcatcgaggacgcggcggggctcgggggccccgacggcaaatctggccgctggaggaggctgcagccccgcatgtgggccctcttcgaagacccctactcgtccagagccgccaggtttattgcttttgcttctttattcttcatcctggtttcaattacaactttttgcctggaaacacatgaagctttcaatattgttaaaaacaagacagaaccagtcatcaatggcacaagtgttgttctacagtatgaaattgaaacggatcctgccttgacgtatgtagaaggagtgtgtgtggtgtggtttacttttgaatttttagtccgtattgttttttcacccaataaacttgaattcatcaaaaatctcttgaatatcattgactttgtggccatcctacctttctacttagaggtgggactcagtgggctgtcatccaaagctgctaaagatgtgcttggcttcctcagggtggtaaggtttgtgaggatcctgagaattttcaagctcacccgccattttgtaggtctgagggtgcttggacatactcttcgagctagtactaatgaatttttgctgctgataattttcctggctctaggagttttgatatttgctaccatgatctactatgccgagagagtgggagctcaacctaacgacccttcagctagtgagcacacacagttcaaaaacattcccattgggttctggtgggctgtagtgaccatgactaccctgggttatggggatatgtacccccaaacatggtcaggcatgctggtgggagccctgtgtgctctggctggagtgctgacaatagccatgccagtgcctgtcattgtcaataattttggaatgtactactccttggcaatggcaaagcagaaacttccaaggaaaagaaagaa

SEQ ID NO: 296750 - DNA, 1132 bp, Homo sapiens
tctcccccaccccagcgcccagggaagcggctcaaccacctgaatccggaaaacgccaacaagtagtttctcgtcggagaagggcggctcacctgggcgccaagactcagtcccgctgcccagagaacctcgtccactcggaaaccaaagcagaaccacttttctctcggtctcgttaagtcatgtctgagtcacagagatgggcaagatcgagaacaacgagagggtgatcctcaatgtcgggggcacccggcacgaaacctaccgcagcaccctcaagaccctgcctggaacacgcctggcccttcttgcctcctccgagcccccaggcgactgcttgaccacggcgggcgacaagctgcagccgtcgccgcctccactgtcgccgccgccgagagcgcccccgctgtcccccgggccaggcggctgcttcgagggcggcgcgggcaactgcagttcccgcggcggcagggccagcgaccatcccggtggcggccgcgagttcttcttcgaccggcacccgggcgtcttcgcctatgtgctcaattactaccgcaccggcaagctgcactgccccgcagacgtgtgcgggccgctcttcgaggaggagctggccttctggggcatcgacgagaccgacgtggagccctgctgctggatgacctaccggcagcaccgcgacgccgaggaggcgctggacatcttcgagacccccgacctcattggcggcgaccccggcgacgacgaggacctggcggccaagaggctgggcatcgaggacgcggcggggctcgggggccccgacggcaaatctggccgctggaggaggctgcagccccgcatgtgggccctcttcgaagacccctactcgtccagagccgccaggtttattgcttttgcttctttattcttcatcctggtttcaattacaactttttgcctggaaacacatgaagctttcaatattgttaaaaacaagacagaaccagtcatcaatggcacaagtgttgttctacagtatgaaattgaaacggatcctgccttgacgtatgtagaaggagtgtgtgtggtgtggtttacttttgaatttttagtccgtattgttttttcacccaataaacttgaattcatc

SEQ ID NO: 296751 - DNA, 1091 bp, Homo sapiens
cgtaggctggagaagctatgtgaagaacagaagtgcccagaaaaaaaagtccagacattagagacggggtttcaccgtgttagccaagatggtctcgatctcctgacctcgtgatccacccgcctcgacctcccaaagtgctgggattacaggcgtgagccaccgcgcccggccgataaattcttattaagggaaagcaagtggcttcagcacatacagaaccaaaccctgaacacagaagatcaagtttcatgcaggaagatttgaacgctttgaccttttttaagaaatgtgtttattgcttttgcttctttattcttcatcctggtttcaattacaactttttgcctggaaacacatgaagctttcaatattgttaaaaacaagacagaaccagtcatcaatggcacaagtgttgttctacagtatgaaattgaaacggatcctgccttgacgtatgtagaaggagtgtgtgtggtgtggtttacttttgaatttttagtccgtattgttttttcacccaataaacttgaattcatcaaaaatctcttgaatatcattgactttgtggccatcctacctttctacttagaggtgggactcagtgggctgtcatccaaagctgctaaagatgtgcttggcttcctcagggtggtaaggtttgtgaggatcctgagaattttcaagctcacccgccattttgtaggtctgagggtgcttggacatactcttcgagctagtactaatgaatttttgctgctgataattttcctggctctaggagttttgatatttgctaccatgatctactatgccgagagagtgggagctcaacctaacgacccttcagctagtgagcacacacagttcaaaaacattcccattgggttctggtgggctgtagtgaccatgactaccctgggttatggggatatgtacccccaaacatggtcaggcatgctggtgggagccctgtgtgctctggctggagtgctgacaatagccatgccagtgcctgtcattgtcaataattttggaatgtactactccttggcaatggcaaagcagaaacttccaaggaaaagaaagaa

SEQ ID NO: 296752 - DNA, 540 bp, Homo sapiens
cgtaggctggagaagctatgtgaagaacagaagtgcccagaaaaaaaagtccagacattagagacggggtttcaccgtgttagccaagatggtctcgatctcctgacctcgtgatccacccgcctcgacctcccaaagtgctgggattacaggcgtgagccaccgcgcccggccgataaattcttattaagggaaagcaagtggcttcagcacatacagaaccaaaccctgaacacagaagatcaagtttcatgcaggaagatttgaacgctttgaccttttttaagaaatgtgtttattgcttttgcttctttattcttcatcctggtttcaattacaactttttgcctggaaacacatgaagctttcaatattgttaaaaacaagacagaaccagtcatcaatggcacaagtgttgttctacagtatgaaattgaaacggatcctgccttgacgtatgtagaaggagtgtgtgtggtgtggtttacttttgaatttttagtccgtattgttttttcacccaataaacttgaattcatc

SEQ ID NO: 296753 - DNA, 4964 bp, Homo sapiens
cgccccgccgccccgaggcaccctctggcagactcggcggcggcgacagcctgggcggacagtgcgccgtgcgcaggcgcggagctagacctcgctgcagcccccatcgcctcggggagtctcacccaccgagtccgcccgctggcccgtcagtgctctccccgtcgtttgccctctccagttcccccagtgcctgccctacgcaccccgatggcggagctgcggcctagcggcgcccccggccccaccgcgcccccggcccctggcccgactgcccccccggccttcgcttcgctctttcccccgggactgcacgccatctacggagagtgccgccgcctttaccctgaccagccgaacccgctccaggttaccgctatcgtcaagtactggttgggtggcccagaccccttggactatgttagcatgtacaggaatgtggggagcccttctgctaacatccccgagcactggcactacatcagcttcggcctgagtgatctctatggtgacaacagagtccatgagtttacaggaacagatggacctagtggttttggctttgagttgacctttcgtctgaagagagaaactggggagtctgccccaccaacatggcccgcagagttaatgcagggcttggcacgatacgtgttccagtcagagaacaccttctgcagtggggaccatgtgtcctggcacagccctttggataacagtgagtcaagaattcagcacatgctgctgacagaggacccacagatgcagcccgtgcagacaccctttggggtagttaccttcctccagatcgttggtgtctgcactgaagagctacactcagcccagcagtggaacgggcagggcatcctggagctgctgcggacagtgcctattgctggcggcccctggctgataactgacatgcggaggggagagaccatatttgagatcgatccacacctgcaagagagagttgacaaaggcatcgagacagatggctccaacctgagtggtgtcagtgccaagtgtgcctgggatgacctgagccggccccccgaggatgacgaggacagccggagcatctgcatcggcacacagccccggcgactctctggcaaagacacagagcagatccgggagaccctgaggagaggactcgagatcaacagcaaacctgtccttccaccaatcaaccctcagcggcagaatggcctcgcccacgaccgggccccgagccgcaaagacagcctggaaagtgacagctccacggccatcattccccatgagctgattcgcacgcggcagcttgagagcgtacatctgaaattcaaccaggagtccggagccctcattcctctctgcctaaggggcaggctcctgcatggacggcactttacatataaaagtatcacaggtgacatggccatcacgtttgtctccacgggagtggaaggcgcctttgccactgaggagcatccttacgcggctcatggaccctggttacaaattctgttgaccgaagagtttgtagagaaaatgttggaggatttagaagatttgacttctccagaggaattcaaacttcccaaagagtacagctggcctgaaaagaagctgaaggtctccatcctgcctgacgtggtgttcgacagtccgctacactagcctgggctgggccctgcaggggccagcagggagcccagctgctccccagtgacttccagtgtaacagttgtgtcaacgagatctccacaaataaaaggacaagtgtgaggaagactgcgcagtgccaccccgcagcccagtggggtgccatgcacaggccacaggccctccacctcacctccagctcaggggccgcaccccgccgctggctaagccttgtgacccatcaggccagtgagtgggcaaatgcggaccctccctgcctgcagcctgcacagattctggtttgaggtttgactctggaccctggctgtgcccctaggtggagacagccctctttctcacctaccccctgccgcacagcccagcaggagggaggcggacagccagatgcagagcgagtggatgcacttcccagctcatctctggaagcctttgctactcaagctcctctggccgcggaacaattcctctgatcatgtttggttttcttcttccttattttattttgtagaaaccgggtggtattttattgctctgcaaagatgtccagaagccatgtatataatgttttttaaacagaacttcattccccgttgaactttcgcattctctgacagaggcctagggctgtatctctccctgggctgccaccagagaaggtgcttggtgttcgcctgccagcccagagccctggaggagccggctgcacagagaggcttttcttcccagctgggcctggtggagcccggggcagggggagagtagagacactcccttgtgcagctttgagcctagtttagctggggccagggaggggtgctactgttttccaagtgaatgggtctcaaagacttggtgaccccagcctcatcttctaggccttttccacccaaccaggcctacctgggagagggtgaggttcagcacatcacacaccatccccactgtcattcagggcctgggtctccagctctgtaaccagtcctgtcccatttcctcagtccctgggcctcccagccttcaggctgtagggctgccttactaaaattgaaaaatccacctcttaacatctctttcactttggttttgctaacactgctctctgctgccctcccatcctccctgtatccattcatgccctatctttcattctccactcctaatccctctcctttctggcatcctggcctctcgtggtcctcagcccctcacccccagtactgcagatctcacagtttgccttccagaagccagcctatctctagcccatggttttggagttcctctcgggttatctcccacgcctgacctggaaccagcaagcccctttcctgccttcttacccccaactctagggatgggactgttacaatacttcaagatcactctttacacctcttcaaagcaaagtcatgacaatgcagggctcctcattgctcccatctgcctctgctgcacacacaggcaccagcagggatgccacaggagtgcccacagggtgcaggactccactgatgagagatccagccaaagagctgcccccaggggtatgagggcaccagctgggttctccagggagcaggagttggacctccatggagccactaggcctggcctcctctacacatccccagggctatctggttaattccatcaagctcagagttaaaaggcatatcagcctggagtatttgggagagactggctgcagatccccgccagccaagatgcaagccactcgggacctgatgtcggcagctgtgcctctactgccctgaggacttaccagagggagccctactggccttcccccaccacagcagccctgcctgtgaagctcttgtttctgacatttcacaggcagagaggtgccatcagttcgcctccattccttgccaccatgaccagcctctccctgaactctctcttgctcgggacctgcctgagggctccctgctgcagttcgccgtacttccatctgctgggtgcctccatcgttggttgggtggggatggggcattttctgagctaagctttgtcattagtttgtgaagcacctggtcagcaacctgccccagacctggagggtctttgtggactgaaggtagacaccagccagcatggtggccctgttctgggggagcagggtaaggcaggaggaagtgggtgagctccgagatgatgagcacatgaagcctgtggccccttcgtacctgcaatatgtcaggagcctcacgctcacccaagatcctgcaggggccaggctccatctcactggctctgagggcaggacagggtatcacacatttctcaccaggcctcctttcctatgggcattggtgcctcccagaggtttcttgggctgctggctggtgagagaggacccttaaagaagatcaagccaagctgaccttggaccctgtccagcacagcttctggcacaggatgcttggtgaatgtaccctttctttccctccctgcagctctgagggagcccctgaccttgtagtgggtggaggaggtaaggggcctccctccctaaatctgcctcttctgcaagctacttggagacttgcctagttgtacccacccctccaggtccctggtgctagagcttctgagaagggcctttccctttcctctttgcctgctatataaggcaggctcctgtggctctgctggctcagtgtgggctgcaggaggactgcagactcagctgcaattctgaggggggtttgggaggcttgtgcgaggtctcaggcctgtgtggggagctggtgcctcttcctgcccgtatctttctcttccaagggcagtgctccaaggcagggactggagaagccaaggggagagtctaaaagggctagagcatttttaaaaatagacacagggtcttgggactggggtttcggattgagttgcaagcagggagaaaacctgaaggtcggtgcccctatggggctgaccagtagagaatttcctttactgtatttttgtgtctggtcttccctttctggcttctaggacatccatgccaggtgaggtgcctgggtccctgttacaagtcaggagccctgtagggagacccctccttttgtacaagtacctgaatgctgcgacaagcagatttttgtaaaattttatattagtttttaatgtcagtggcgactcggttcctggggctgcagccagcctgggacttttgtaagaatttttgggtgactcacttagatgtcgtttccttcttgccccctcttcctctctgtaatctaagtgcattaaacatctttgcagaa

SEQ ID NO: 296754 - DNA, 2737 bp, Homo sapiens
  misc_feature (2083)..(2083): n is a, c, g, or t
  misc_feature (2455)..(2455): n is a, c, g, or t
cgccccgccgccccgaggcaccctctggcagactcggcggcggcgacagcctgggcggacagtgcgccgtgcgcaggcgcggagctagacctcgctgcagcccccatcgcctcggggagtctcacccaccgagtccgcccgctggcccgtcagtgctctccccgtcgtttgccctctccagttcccccagtgcctgccctacgcaccccgatggcggagctgcggcctagcggcgcccccggccccaccgcgcccccggcccctggcccgactgcccccccggccttcgcttcgctctttcccccgggactgcacgccatctacggagagtgccgccgcctttaccctgaccagccgaacccgctccaggttaccgctatcgtcaagtactggttgggtggcccagaccccttggactatgttagcatgtacaggaatgtggggagcccttctgctaacatccccgagcactggcactacatcagcttcggcctgagtgatctctatggtgacaacagagtccatgagtttacaggaacagatggacctagtggttttggctttgagttgacctttcgtctgaagagagaaactggggagtctgccccaccaacatggcccgcagagttaatgcagggcttggcacgatacgtgttccagtcagagaacaccttctgcagtggggaccatgtgtcctggcacagccctttggataacagtgagtcaagaattcagcacatgctgctgacagaggacccacagatgcagcccgtgcagacaccctttggggtagttaccttcctccagatcgttggtgtctgcactgaagagctacactcagcccagcagtggaacgggcagggcatcctggagctgctgcggacagtgcctattgctggcggcccctggctgataactgacatgcggaggggagagaccatatttgagatcgatccacacctgcaagagagagttgacaaaggcatcgagacagatggctccaacctgagtggtgtcagtgccaagtgtgcctgggatgacctgagccggccccccgaggatgacgaggacagccggagcatctgcatcggcacacagccccggcgactctctggcaaagacacagagcagatccgggagaccctgaggagaggactcgagatcaacagcaaacctgtccttccaccaatcaaccctcagcggcagaatggcctcgcccacgaccgggccccgagccgcaaagacagcctggaaagtgacagctccacggccatcattccccatgagctgattcgcacgcggcagcttgagagcgtacatctgaaattcaaccaggagtccggagccctcattcctctctgcctaaggggcaggctcctgcatggacggcactttacatataaaagtatcacaggtgacatggccatcacgtttgtctccacgggagtggaaggcgcctttgccactgaggagcatccttacgcggctcatggaccctggttacaagtgagaaggccctttttcttctccctccttcctttcatagacttccttgcccacccctcctcttctcccttggcagctcttgatggcaccccttcctggggggctggtcatgaatgcctcatggattcagggcctggggcctgtgtgtaggtatggagtgtggatgctgctacccactccagcagcttaggagcacttcctgaccttctccccctgtcacctgagacacaagtgttaactctccaggccctggctcttggtaattctggttccccgtggaaatccaggttggagggatataagactttctgcaccttgggtaaaccaaggtacaagaactcaaggatgaagcaagatgggaggatgtgtggaggccactctccaatggctacatggaaatcccaccagaattcagacagtggcatgtgtgcctggaccagggctgggcaggcctcagtgggaagagcctccccttcttagcctacccccatctgacagccctcccgttcctcctgagtttgtgtgaccagagacctgctggcttatccggagcactttgtccttcctttgctcttcnggctggagcgagcttcagagctgttgccaagcagggtaccagggcctcagagccataggcctccttccagtccccaccccgtcccgggtctctaacaggtgctcaacctactccaccacactcccgagtgtcttggagggacagcatccttttttggcatttgtttgttgcgggtggggagaggattgaacccttaacctcacctcgctcgcaagtatcaagaaagggaacctgaccctaaacctaaaggtggccatacctggtttgtgaatgtattggagaggcatgcagcattacagtagaggggaagagaatgatgctaggtttgtgagtttcacccagtctggggagtctgtgaagcatatgtagtcnatacagacacactttttgtccctgcatgtctacagaatttctcctccttcaggccaggcccctcttctcccgccaccaccaaaatacaacccttaattaaaacaaacagcaaacaaaggacaccaaccacactccccagactaagccgagatagaaatggaagctagtgctttagggatattgtgttccataaattatcttgcctttttccactgttgttattatatcgtttcataacaaaattactttgaaccataaagttataaatacattttaaaagtc

SEQ ID NO: 296755 - DNA, 1902 bp, Homo sapiens
cgccccgccgccccgaggcaccctctggcagactcggcggcggcgacagcctgggcggacagtgcgccgtgcgcaggcgcggagctagacctcgctgcagcccccatcgcctcggggagtctcacccaccgagtccgcccgctggcccgtcagtgctctccccgtcgtttgccctctccagttcccccagtgcctgccctacgcaccccgatggcggagctgcggcctagcggcgcccccggccccaccgcgcccccggcccctggcccgactgcccccccggccttcgcttcgctctttcccccgggactgcacgccatctacggagagtgccgccgcctttaccctgaccagccgaacccgctccaggttaccgctatcgtcaagtactggttgggtggcccagaccccttggactatgttagcatgtacaggaatgtggggagcccttctgctaacatccccgagcactggcactacatcagcttcggcctgagtgatctctatggtgacaacagagtccatgagtttacaggaacagatggacctagtggttttggctttgagttgacctttcgtctgaagagagaaactggggagtctgccccaccaacatggcccgcagagttaatgcagggcttggcacgatacgtgttccagtcagagaacaccttctgcagtggggaccatgtgtcctggcacagccctttggataacagtgagtcaagaattcagcacatgctgctgacagaggacccacagatgcagcccgtgcagacaccctttggggtagttaccttcctccagatcgttggtgtctgcactgaagagctacactcagcccagcagtggaacgggcagggcatcctggagctgctgcggacagtgcctattgctggcggcccctggctgataactgacatgcggaggggagagaccatatttgagatcgatccacacctgcaagagagagttgacaaaggcatcgagacagatggctccaacctgagtggtgtcagtgccaagtgtgcctgggatgacctgagccggccccccgaggatgacgaggacagccggagcatctgcatcggcacacagccccggcgactctctggcaaagacacagagcagatccgggagaccctgaggagaggactcgagatcaacagcaaacctgtccttccaccaatcaaccctcagcggcagaatggcctcgcccacgaccgggccccgagccgcaaagacagcctggaaagtgacagctccacggccatcattccccatgagctgattcgcacgcggcagcttgagagcgtacatctgaaattcaaccaggagtccggagccctcattcctctctgcctaaggggcaggctcctgcatggacggcactttacatataaaagtatcacaggtgacatggccatcacgtttgtctccacgggagtggaaggcgcctttgccactgaggagcatccttacgcggctcatggaccctggttacaactctgaacctatcctcggagctctgccctcccgtcctggaacgtctttctgccctgaggagagggtagtcagcatctccaattttcagcagctcaagaaccttggcccccacaggacttcgcagatgtcacattgcccctcagtcccctgaatgcccttcggacccaaccccaattccccaagcccctgaccccctagctgccggggttcccactcccagtgccacaaccccctcacctccctggcagcccctcagcgagcctgaggcccagcacccgctggctccccagcacatggtcccctcccatgggctgttgcccagggaaccggggcgcggtgggaacgagctgctggcctcggcatgtttcaataaagttgctgtgctgggagctactc

SEQ ID NO: 296756 - DNA, 387 bp, Homo sapiens
cgccccgccgccccgaggcaccctctggcagactcggcggcggcgacagcctgggcggacagtgcgccgtgcgcaggcgcggagctagacctcgctgcagcccccatcgcctcggggagtctcacccaccgagtccgcccgctggcccgtcagtgctctccccgtcgtttgccctctccagttcccccagtgcctgccctacgcaccccgatggcggagctgcggcctagcggcgccccgggacaacgctgggtacgcgtaacgcttgggcgccgtcgacagggatactctagcagcgggcgccctcggtcagtgatagtcacggacgttaagagggagaggagaaaggcagcccacaaacagtgcacctacgaagacaccagaagg

SEQ ID NO: 296757 - DNA, 5045 bp, Homo sapiens
cgccccgccgccccgaggcaccctctggcagactcggcggcggcgacagcctgggcggacagtgcgccgtgcgcaggcgcggagctagacctcgctgcagcccccatcgcctcggggagtctcacccaccgagtccgcccgctggcccgtcagtgctctccccgtcgtttgccctctccagttcccccagtgcctgccctacgcaccccgatggcggagctgcggcctagcggcgcccccggccccaccgcgcccccggcccctggcccgactgcccccccggccttcgcttcgctctttcccccgggactgcacgccatctacggagagtgccgccgcctttaccctgaccagccgaacccgctccaggttaccgctatcgtcaagtactggttgggtggcccagaccccttggactatgttagcatgtacaggaatgtggggagcccttctgctaacatccccgagcactggcactacatcagcttcggcctgagtgatctctatggtgacaacagagtccatgagtttacaggaacagatggacctagtggttttggctttgagttgacctttcgtctgaagagagaaactggggagtctgccccaccaacatggcccgcagagttaatgcagggcttggcacgatacgtgttccagtcagagaacaccttctgcagtggggaccatgtgtcctggcacagccctttggataacagtgagtcaagaattcagcacatgctgctgacagaggacccacagatgcagcccgtgcagacaccctttggggtagttaccttcctccagatcgttggtgtctgcactgaagagctacactcagcccagcagtggaacgggcagggcatcctggagctgctgcggacagtgcctattgctggcggcccctggctgataactgacatgcggaggggagagaccatatttgagatcgatccacacctgcaagagagagttgacaaaggcatcgagacagatggctccaacctgagtggtgtcagtgccaagtgtgcctgggatgacctgagccggccccccgaggatgacgaggacagccggagcatctgcatcggcacacagccccggcgactctctggcaaagacacagagcagatccgggagaccctgaggagaggactcgagatcaacagcaaacctgtccttccaccaatcaaccctcagcggcagaatggcctcgcccacgaccgggccccgagccgcaaagacagcctggaaagtgacagctccacggccatcattccccatgagctgattcgcacgcggcagcttgagagcgtacatctgaaattcaaccaggagtccggagccctcattcctctctgcctaaggggcaggctcctgcatggacggcactttacatataaaagtatcacaggtgacatggccatcacgtttgtctccacgggagtggaaggcgcctttgccactgaggagcatccttacgcggctcatggaccctggttacaaattctgttgaccgaagagtttgtagagaaaatgttggaggatttagaagatttgacttctccagaggaattcaaacttcccaaagagtacagctggcctgaaaagaagctgaaggtctccatcctgcctgacgtggtgttcgacagtccgctacactagcctgggctgggccctgcaggggccagcagggagcccagctgctccccagtgacttccagtgtaacagttgtgtcaacgagatctccacaaataaaaggacaagtgtgaggaagactgcgcagtgccaccccgcagcccagtggggtgccatgcacaggccacaggccctccacctcacctccagctcaggggccgcaccccgccgctggctaagccttgtgacccatcaggccagtgagtgggcaaatgcggaccctccctgcctgcagcctgcacagattctggtttgaggtttgactctggaccctggctgtgcccctaggtggagacagccctctttctcacctaccccctgccgcacagcccagcaggagggaggcggacagccagatgcagagcgagtggatgcacttcccagctcatctctggaagcctttgctactcaagctcctctggccgcggaacaattcctctgatcatgtttggttttcttcttccttattttattttgtagaaaccgggtggtattttattgctctgcaaagatgtccagaagccatgtatataatgttttttaaacagaacttcattccccgttgaactttcgcattctctgacagaggcctagggctgtatctctccctgggctgccaccagagaaggtgcttggtgttcgcctgccagcccagagccctggaggagccggctgcacagagaggcttttcttcccagctgggcctggtggagcccggggcagggggagagtagagacactcccttgtgcagctttgagcctagtttagctggggccagggaggggtgctactgttttccaagtgaatgggtctcaaagacttggtgaccccagcctcatcttctaggccttttccacccaaccaggcctacctgggagagggtgaggttcagcacatcacacaccatccccactgtcattcagggcctgggtctccagctctgtaaccagtcctgtcccatttcctcagtccctgggcctcccagccttcaggctgtagggctgccttactaaaattgaaaaatccacctcttaacatctctttcactttggttttgctaacactgctctctgctgccctcccatcctccctgtatccattcatgccctatctttcattctccactcctaatccctctcctttctggcatcctggcctctcgtggtcctcagcccctcacccccagtactgcagatctcacagtttgccttccagaagccagcctatctctagcccatggttttggagttcctctcgggttatctcccacgcctgacctggaaccagcaagcccctttcctgccttcttacccccaactctagggatgggactgttacaatacttcaagatcactctttacacctcttcaaagcaaagtcatgacaatgcagggctcctcattgctcccatctgcctctgctgcacacacaggcaccagcagggatgccacaggagtgcccacagggtgcaggactccactgatgagagatccagccaaagagctgcccccaggggtatgagggcaccagctgggttctccagggagcaggagttggacctccatggagccactaggcctggcctcctctacacatccccagggctatctggttaattccatcaagctcagagttaaaaggcatatcagcctggagtatttgggagagactggctgcagatccccgccagccaagatgcaagccactcgggacctgatgtcggcagctgtgcctctactgccctgaggacttaccagagggagccctactggccttcccccaccacagcagccctgcctgtgaagctcttgtttctgacatttcacaggcagagaggtgccatcagttcgcctccattccttgccaccatgaccagcctctccctgaactctctcttgctcgggacctgcctgagggctccctgctgcagttcgccgtacttccatctgctgggtgcctccatcgttggttgggtggggatggggcattttctgagctaagctttgtcattagtttgtgaagcacctggtcagcaacctgccccagacctggagggtctttgtggactgaaggtagacaccagccagcatggtggccctgttctgggggagcagggtaaggcaggaggaagtgggtgagctccgagatgatgagcacatgaagcctgtggccccttcgtacctgcaatatgtcaggagcctcacgctcacccaagatcctgcaggggccaggctccatctcactggctctgagggcaggacagggtatcacacatttctcaccaggcctcctttcctatgggcattggtgcctcccagaggtttcttgggctgctggctggtgagagaggacccttaaagaagatcaagccaagctgaccttggaccctgtccagcacagcttctggcacaggatgcttggtgaatgtaccctttctttccctccctgcagctctgagggagcccctgaccttgtagtgggtggaggaggtaaggggcctccctccctaaatctgcctcttctgcaagctacttggagacttgcctagttgtacccacccctccaggtccctggtgctagagcttctgagaagggcctttccctttcctctttgcctgctatataaggcaggctcctgtggctctgctggctcagtgtgggctgcaggaggactgcagactcagctgcaattctgaggggggtttgggaggcttgtgcgaggtctcaggcctgtgtggggagctggtgcctcttcctgcccgtatctttctcttccaagggcagtgctccaaggcagggactggagaagccaaggggagagtctaaaagggctagagcatttttaaaaatagacacagggtcttgggactggggtttcggattgagttgcaagcagggagaaaacctgaaggtcggtgcccctatggggctgaccagtagagaatttcctttactgtatttttgtgtctggtcttccctttctggcttctaggacatccatgccaggtgaggtgcctgggtccctgttacaagtcaggagccctgtagggagacccctccttttgtacaagtacctgaatgctgcgacaagcagatttttgtaaaattttatattagtttttaatgtcagtggcgactcggttcctggggctgcagccagcctgggacttttgtaagaatttttgggtgactcacttagatgtcgtttccttcttgccccctcttcctctctgtaatctaagtgcattaaacatctttgcagaagtgcctgggttgtgtgctcatttctggctgcctgaagtagtggagccggaagcccggggccctggcagagggagtgggttg

SEQ ID NO: 296758 - DNA, 4916 bp, Homo sapiens
cgccccgccgccccgaggcaccctctggcagactcggcggcggcgacagcctgggcggacagtgcgccgtgcgcaggcgcggagctagacctcgctgcagcccccatcgcctcggggagtctcacccaccgagtccgcccgctggcccgtcagtgctctccccgtcgtttgccctctccagttcccccagtgcctgccctacgcaccccgatggcggagctgcggcctagcggcgcccccggccccaccgcgcccccggcccctggcccgactgcccccccggccttcgcttcgctctttcccccgggactgcacgccatctacggagagtgccgccgcctttaccctgaccagccgaacccgctccaggttaccgctatcgtcaagtactggttgggtggcccagaccccttggactatgttagcatgtacaggaatgtggggagcccttctgctaacatccccgagcactggcactacatcagcttcggcctgagtgatctctatggtgacaacagagtccatgagtttacaggaacagatggacctagtggttttggctttgagttgacctttcgtctgaagagagaaactggggagtctgccccaccaacatggcccgcagagttaatgcagggcttggcacgatacgtgttccagtcagagaacaccttctgcagtggggaccatgtgtcctggcacagccctttggataacagtgagtcaagaattcagcacatgctgctgacagaggacccacagatgcagcccgtgcagacaccctttggggtagttaccttcctccagatcgttggtgtctgcactgaagagctacactcagcccagcagtggaacgggcagggcatcctggagctgctgcggacagtgcctattgctggcggcccctggctgataactgacatgcggaggggagagaccatatttgagatcgatccacacctgcaagagagagttgacaaaggcatcgagacagatggctccaacctgagtggtgtcagtgccaagtgtgcctgggatgacctgagccggccccccgaggatgacgaggacaacacagagcagatccgggagaccctgaggagaggactcgagatcaacagcaaacctgtccttccaccaatcaaccctcagcggcagaatggcctcgcccacgaccgggccccgagccgcaaagacagcctggaaagtgacagctccacggccatcattccccatgagctgattcgcacgcggcagcttgagagcgtacatctgaaattcaaccaggagtccggagccctcattcctctctgcctaaggggcaggctcctgcatggacggcactttacatataaaagtatcacaggtgacatggccatcacgtttgtctccacgggagtggaaggcgcctttgccactgaggagcatccttacgcggctcatggaccctggttacaaattctgttgaccgaagagtttgtagagaaaatgttggaggatttagaagatttgacttctccagaggaattcaaacttcccaaagagtacagctggcctgaaaagaagctgaaggtctccatcctgcctgacgtggtgttcgacagtccgctacactagcctgggctgggccctgcaggggccagcagggagcccagctgctccccagtgacttccagtgtaacagttgtgtcaacgagatctccacaaataaaaggacaagtgtgaggaagactgcgcagtgccaccccgcagcccagtggggtgccatgcacaggccacaggccctccacctcacctccagctcaggggccgcaccccgccgctggctaagccttgtgacccatcaggccagtgagtgggcaaatgcggaccctccctgcctgcagcctgcacagattctggtttgaggtttgactctggaccctggctgtgcccctaggtggagacagccctctttctcacctaccccctgccgcacagcccagcaggagggaggcggacagccagatgcagagcgagtggatgcacttcccagctcatctctggaagcctttgctactcaagctcctctggccgcggaacaattcctctgatcatgtttggttttcttcttccttattttattttgtagaaaccgggtggtattttattgctctgcaaagatgtccagaagccatgtatataatgttttttaaacagaacttcattccccgttgaactttcgcattctctgacagaggcctagggctgtatctctccctgggctgccaccagagaaggtgcttggtgttcgcctgccagcccagagccctggaggagccggctgcacagagaggcttttcttcccagctgggcctggtggagcccggggcagggggagagtagagacactcccttgtgcagctttgagcctagtttagctggggccagggaggggtgctactgttttccaagtgaatgggtctcaaagacttggtgaccccagcctcatcttctaggccttttccacccaaccaggcctacctgggagagggtgaggttcagcacatcacacaccatccccactgtcattcagggcctgggtctccagctctgtaaccagtcctgtcccatttcctcagtccctgggcctcccagccttcaggctgtagggctgccttactaaaattgaaaaatccacctcttaacatctctttcactttggttttgctaacactgctctctgctgccctcccatcctccctgtatccattcatgccctatctttcattctccactcctaatccctctcctttctggcatcctggcctctcgtggtcctcagcccctcacccccagtactgcagatctcacagtttgccttccagaagccagcctatctctagcccatggttttggagttcctctcgggttatctcccacgcctgacctggaaccagcaagcccctttcctgccttcttacccccaactctagggatgggactgttacaatacttcaagatcactctttacacctcttcaaagcaaagtcatgacaatgcagggctcctcattgctcccatctgcctctgctgcacacacaggcaccagcagggatgccacaggagtgcccacagggtgcaggactccactgatgagagatccagccaaagagctgcccccaggggtatgagggcaccagctgggttctccagggagcaggagttggacctccatggagccactaggcctggcctcctctacacatccccagggctatctggttaattccatcaagctcagagttaaaaggcatatcagcctggagtatttgggagagactggctgcagatccccgccagccaagatgcaagccactcgggacctgatgtcggcagctgtgcctctactgccctgaggacttaccagagggagccctactggccttcccccaccacagcagccctgcctgtgaagctcttgtttctgacatttcacaggcagagaggtgccatcagttcgcctccattccttgccaccatgaccagcctctccctgaactctctcttgctcgggacctgcctgagggctccctgctgcagttcgccgtacttccatctgctgggtgcctccatcgttggttgggtggggatggggcattttctgagctaagctttgtcattagtttgtgaagcacctggtcagcaacctgccccagacctggagggtctttgtggactgaaggtagacaccagccagcatggtggccctgttctgggggagcagggtaaggcaggaggaagtgggtgagctccgagatgatgagcacatgaagcctgtggccccttcgtacctgcaatatgtcaggagcctcacgctcacccaagatcctgcaggggccaggctccatctcactggctctgagggcaggacagggtatcacacatttctcaccaggcctcctttcctatgggcattggtgcctcccagaggtttcttgggctgctggctggtgagagaggacccttaaagaagatcaagccaagctgaccttggaccctgtccagcacagcttctggcacaggatgcttggtgaatgtaccctttctttccctccctgcagctctgagggagcccctgaccttgtagtgggtggaggaggtaaggggcctccctccctaaatctgcctcttctgcaagctacttggagacttgcctagttgtacccacccctccaggtccctggtgctagagcttctgagaagggcctttccctttcctctttgcctgctatataaggcaggctcctgtggctctgctggctcagtgtgggctgcaggaggactgcagactcagctgcaattctgaggggggtttgggaggcttgtgcgaggtctcaggcctgtgtggggagctggtgcctcttcctgcccgtatctttctcttccaagggcagtgctccaaggcagggactggagaagccaaggggagagtctaaaagggctagagcatttttaaaaatagacacagggtcttgggactggggtttcggattgagttgcaagcagggagaaaacctgaaggtcggtgcccctatggggctgaccagtagagaatttcctttactgtatttttgtgtctggtcttccctttctggcttctaggacatccatgccaggtgaggtgcctgggtccctgttacaagtcaggagccctgtagggagacccctccttttgtacaagtacctgaatgctgcgacaagcagatttttgtaaaattttatattagtttttaatgtcagtggcgactcggttcctggggctgcagccagcctgggacttttgtaagaatttttgggtgactcacttagatgtcgtttccttcttgccccctcttcctctctgtaatctaagtgcattaaacatctttgcagaa

SEQ ID NO: 296759 - DNA, 4555 bp, Homo sapiens
tgcattgtttcttgcttgcagaacatgcaggttgcttgtagaaacacacttacgtaaaaggagagagattctgggaagagtgggcctagcaggaatttggaaatttaggggtttctagttggctctacctgaagctgtgccttctcctctcccctgtattatcacatctcagatgaagcagtcttccttctcctgcctgaatgaacactattgaggttaggaccaataactgaagccgtatcttggatggaaaagagaacaccttctgcagtggggaccatgtgtcctggcacagccctttggataacagtgagtcaagaattcagcacatgctgctgacagaggacccacagatgcagcccgtgcagacaccctttggggtagttaccttcctccagatcgttggtgtctgcactgaagagctacactcagcccagcagtggaacgggcagggcatcctggagctgctgcggacagtgcctattgctggcggcccctggctgataactgacatgcggaggggagagaccatatttgagatcgatccacacctgcaagagagagttgacaaaggcatcgagacagatggctccaacctgagtggtgtcagtgccaagtgtgcctgggatgacctgagccggccccccgaggatgacgaggacagccggagcatctgcatcggcacacagccccggcgactctctggcaaagacacagagcagatccgggagaccctgaggagaggactcgagatcaacagcaaacctgtccttccaccaatcaaccctcagcggcagaatggcctcgcccacgaccgggccccgagccgcaaagacagcctggaaagtgacagctccacggccatcattccccatgagctgattcgcacgcggcagcttgagagcgtacatctgaaattcaaccaggagtccggagccctcattcctctctgcctaaggggcaggctcctgcatggacggcactttacatataaaagtatcacaggtgacatggccatcacgtttgtctccacgggagtggaaggcgcctttgccactgaggagcatccttacgcggctcatggaccctggttacaaattctgttgaccgaagagtttgtagagaaaatgttggaggatttagaagatttgacttctccagaggaattcaaacttcccaaagagtacagctggcctgaaaagaagctgaaggtctccatcctgcctgacgtggtgttcgacagtccgctacactagcctgggctgggccctgcaggggccagcagggagcccagctgctccccagtgacttccagtgtaacagttgtgtcaacgagatctccacaaataaaaggacaagtgtgaggaagactgcgcagtgccaccccgcagcccagtggggtgccatgcacaggccacaggccctccacctcacctccagctcaggggccgcaccccgccgctggctaagccttgtgacccatcaggccagtgagtgggcaaatgcggaccctccctgcctgcagcctgcacagattctggtttgaggtttgactctggaccctggctgtgcccctaggtggagacagccctctttctcacctaccccctgccgcacagcccagcaggagggaggcggacagccagatgcagagcgagtggatgcacttcccagctcatctctggaagcctttgctactcaagctcctctggccgcggaacaattcctctgatcatgtttggttttcttcttccttattttattttgtagaaaccgggtggtattttattgctctgcaaagatgtccagaagccatgtatataatgttttttaaacagaacttcattccccgttgaactttcgcattctctgacagaggcctagggctgtatctctccctgggctgccaccagagaaggtgcttggtgttcgcctgccagcccagagccctggaggagccggctgcacagagaggcttttcttcccagctgggcctggtggagcccggggcagggggagagtagagacactcccttgtgcagctttgagcctagtttagctggggccagggaggggtgctactgttttccaagtgaatgggtctcaaagacttggtgaccccagcctcatcttctaggccttttccacccaaccaggcctacctgggagagggtgaggttcagcacatcacacaccatccccactgtcattcagggcctgggtctccagctctgtaaccagtcctgtcccatttcctcagtccctgggcctcccagccttcaggctgtagggctgccttactaaaattgaaaaatccacctcttaacatctctttcactttggttttgctaacactgctctctgctgccctcccatcctccctgtatccattcatgccctatctttcattctccactcctaatccctctcctttctggcatcctggcctctcgtggtcctcagcccctcacccccagtactgcagatctcacagtttgccttccagaagccagcctatctctagcccatggttttggagttcctctcgggttatctcccacgcctgacctggaaccagcaagcccctttcctgccttcttacccccaactctagggatgggactgttacaatacttcaagatcactctttacacctcttcaaagcaaagtcatgacaatgcagggctcctcattgctcccatctgcctctgctgcacacacaggcaccagcagggatgccacaggagtgcccacagggtgcaggactccactgatgagagatccagccaaagagctgcccccaggggtatgagggcaccagctgggttctccagggagcaggagttggacctccatggagccactaggcctggcctcctctacacatccccagggctatctggttaattccatcaagctcagagttaaaaggcatatcagcctggagtatttgggagagactggctgcagatccccgccagccaagatgcaagccactcgggacctgatgtcggcagctgtgcctctactgccctgaggacttaccagagggagccctactggccttcccccaccacagcagccctgcctgtgaagctcttgtttctgacatttcacaggcagagaggtgccatcagttcgcctccattccttgccaccatgaccagcctctccctgaactctctcttgctcgggacctgcctgagggctccctgctgcagttcgccgtacttccatctgctgggtgcctccatcgttggttgggtggggatggggcattttctgagctaagctttgtcattagtttgtgaagcacctggtcagcaacctgccccagacctggagggtctttgtggactgaaggtagacaccagccagcatggtggccctgttctgggggagcagggtaaggcaggaggaagtgggtgagctccgagatgatgagcacatgaagcctgtggccccttcgtacctgcaatatgtcaggagcctcacgctcacccaagatcctgcaggggccaggctccatctcactggctctgagggcaggacagggtatcacacatttctcaccaggcctcctttcctatgggcattggtgcctcccagaggtttcttgggctgctggctggtgagagaggacccttaaagaagatcaagccaagctgaccttggaccctgtccagcacagcttctggcacaggatgcttggtgaatgtaccctttctttccctccctgcagctctgagggagcccctgaccttgtagtgggtggaggaggtaaggggcctccctccctaaatctgcctcttctgcaagctacttggagacttgcctagttgtacccacccctccaggtccctggtgctagagcttctgagaagggcctttccctttcctctttgcctgctatataaggcaggctcctgtggctctgctggctcagtgtgggctgcaggaggactgcagactcagctgcaattctgaggggggtttgggaggcttgtgcgaggtctcaggcctgtgtggggagctggtgcctcttcctgcccgtatctttctcttccaagggcagtgctccaaggcagggactggagaagccaaggggagagtctaaaagggctagagcatttttaaaaatagacacagggtcttgggactggggtttcggattgagttgcaagcagggagaaaacctgaaggtcggtgcccctatggggctgaccagtagagaatttcctttactgtatttttgtgtctggtcttccctttctggcttctaggacatccatgccaggtgaggtgcctgggtccctgttacaagtcaggagccctgtagggagacccctccttttgtacaagtacctgaatgctgcgacaagcagatttttgtaaaattttatattagtttttaatgtcagtggcgactcggttcctggggctgcagccagcctgggacttttgtaagaatttttgggtgactcacttagatgtcgtttccttcttgccccctcttcctctctgtaatctaagtgcattaaacatctttgcagaa

SEQ ID NO: 296760 - DNA, 2754 bp, Homo sapiens
cgccccgccgccccgaggcaccctctggcagactcggcggcggcgacagcctgggcggacagtgcgccgtgcgcaggcgcggagctagacctcgctgcagcccccatcgcctcggggagtctcacccaccgagtccgcccgctggcccgtcagtgctctccccgtcgtttgccctctccagttcccccagtgcctgccctacgcaccccgatggcggagctgcggcctagcggcgcccccggccccaccgcgcccccggcccctggcccgactgcccccccggccttcgcttcgctctttcccccgggactgcacgccatctacggagagtgccgccgcctttaccctgaccagccgaacccgctccaggttaccgctatcgtcaagtactggttgggtggcccagaccccttggactatgttagcatgtacaggaatgtggggagcccttctgctaacatccccgagcactggcactacatcagcttcggcctgagtgatctctatggtgacaacagagtccatgagtttacaggaacagatggacctagtggttttggctttgagttgacctttcgtctgaagagagaaactggggagtctgccccaccaacatggcccgcagagttaatgcagggcttggcacgatacgtgttccagtcagagaacaccttctgcagtggggaccatgtgtcctggcacagccctttggataacagtgagtcaagaattcagcacatgctgctgacagaggacccacagatgcagcccgtgcagacaccctttggggtagttaccttcctccagatcgttggtgtctgcactgaagagctacactcagcccagcagtggaacgggcagggcatcctggagctgctgcggacagtgcctattgctggcggcccctggctgataactgacatgcggaggggagagaccatatttgagatcgatccacacctgcaagagagagttgacaaaggcatcgagacagatggctccaacctgagtggtgtcagtgccaagtgtgcctgggatgacctgagccggccccccgaggatgacgaggacagccggagcatctgcatcggcacacagccccggcgactctctggcaaagacacagagcagatccgggagaccctgaggagaggactcgagatcaacagcaaacctgtccttccaccaatcaaccctcagcggcagaatggcctcgcccacgaccgggccccgagccgcaaagacagcctggaaagtgacagctccacggccatcattccccatgagctgattcgcacgcggcagcttgagagcgtacatctgaaattcaaccaggagtccggagccctcattcctctctgcctaaggggcaggctcctgcatggacggcactttacatataaaagtatcacaggtgacatggccatcacgtttgtctccacgggagtggaaggcgcctttgccactgaggagcatccttacgcggctcatggaccctggttacaaattctgttgaccgaagagtttgtagagaaaatgttggaggatttagaagatttgacttctccagaggaattcaaacttcccaaagagtacagctggcctgaaaagaagctgaaggtctccatcctgcctgacgtggtgttcgacagtccgctacactagcctgggctgggccctgcaggggccagcagggagcccagctgctccccagtgacttccagtgtaacagttgtgtcaacgagatctccacaaataaaaggacaagtgtgaggaagactgcgcagtgccaccccgcagcccagtggggtgccatgcacaggccacaggccctccacctcacctccagctcaggggccgcaccccgccgctggctaagccttgtgacccatcaggccagtgagtgggcaaatgcggaccctccctgcctgcagcctgcacagattctggtttgaggtttgactctggaccctggctgtgcccctaggtggagacagccctctttctcacctaccccctgccgcacagcccagcaggagggaggcggacagccagatgcagagcgagtggatgcacttcccagctcatctctggaagcctttgctactcaagctcctctggccgcggaacaattcctctgatcatgtttggttttcttcttccttattttattttgtagaaaccgggtggtattttattgctctgcaaagatgtccagaagccatgtatataatgttttttaaacagaacttcattccccgttgaactttcgcattctctgacagaggcctagggctgtatctctccctgggctgccaccagagaaggtgcttggtgttcgcctgccagcccagagccctggaggagccggctgcacagagaggcttttcttcccagctgggcctggtggagcccggggcagggggagagtagagacactcccttgtgcagctttgagcctagtttagctggggccagggaggggtgctactgttttccaagtgaatgggtccctgttacaagtcaggagccctgtagggagacccctccttttgtacaagtacctgaatgctgcgacaagcagatttttgtaaaattttatattagtttttaatgtcagtggcgactcggttcctggggctgcagccagcctgggacttttgtaagaatttttgggtgactcacttagatgtcgtttccttcttgccccctcttcctctctgtaatctaagtgcattaaacatctttgcagaa

SEQ ID NO: 296761 - DNA, 2841 bp, Homo sapiens
  misc_feature (2768)..(2768): n is a, c, g, or t
  misc_feature (2774)..(2774): n is a, c, g, or t
cgccccgccgccccgaggcaccctctggcagactcggcggcggcgacagcctgggcggacagtgcgccgtgcgcaggcgcggagctagacctcgctgcagcccccatcgcctcggggagtctcacccaccgagtccgcccgctggcccgtcagtgctctccccgtcgtttgccctctccagttcccccagtgcctgccctacgcaccccgatggcggagctgcggcctagcggcgcccccggccccaccgcgcccccggcccctggcccgactgcccccccggccttcgcttcgctctttcccccgggactgcacgccatctacggagagtgccgccgcctttaccctgaccagccgaacccgctccaggttaccgctatcgtcaagtactggttgggtggcccagaccccttggactatgttagcatgtacaggaatgtggggagcccttctgctaacatccccgagcactggcactacatcagcttcggcctgagtgatctctatggtgacaacagagtccatgagtttacaggaacagatggacctagtggttttggctttgagttgacctttcgtctgaagagagaaactggggagtctgccccaccaacatggcccgcagagttaatgcagggcttggcacgatacgtgttccagtcagagaacaccttctgcagtggggaccatgtgtcctggcacagccctttggataacagtgagtcaagaattcagcacatgctgctgacagaggacccacagatgcagcccgtgcagacaccctttggggtagttaccttcctccagatcgttggtgtctgcactgaagagctacactcagcccagcagtggaacgggcagggcatcctggagctgctgcggacagtgcctattgctggcggcccctggctgataactgacatgcggaggggagagaccatatttgagatcgatccacacctgcaagagagagttgacaaaggcatcgagacagatggctccaacctgagtggtgtcagtgccaagtgtgcctgggatgacctgagccggccccccgaggatgacgaggacagccggagcatctgcatcggcacacagccccggcgactctctggcaaagacacagagcagatccgggagaccctgaggagaggactcgagatcaacagcaaacctgtccttccaccaatcaaccctcagcggcagaatggcctcgcccacgaccgggccccgagccgcaaagacagcctggaaagtgacagctccacggccatcattccccatgagctgattcgcacgcggcagcttgagagcgtacatctgaaattcaaccaggagtccggagccctcattcctctctgcctaaggggcaggctcctgcatggacggcactttacatataaaagtatcacaggtgacatggccatcacgtttgtctccacgggagtggaaggcgcctttgccactgaggagcatccttacgcggctcatggaccctggttacaaattctgttgaccgaagagtttgtagagaaaatgttggaggatttagaagatttgacttctccagaggaattcaaacttcccaaagagtacagctggcctgaaaagaagctgaaggtctccatcctgcctgacgtggtgttcgacagtccgctacactagcctgggctgggccctgcaggggccagcagggagcccagctgctccccagtgacttccagtgtaacagttgtgtcaacgagatctccacaaataaaaggacaagtgtgaggaagactgcgcagtgccaccccgcagcccagtggggtgccatgcacaggccacaggccctccacctcacctccagctcaggggccgcaccccgccgctggctaagccttgtgacccatcaggccagtgagtgggcaaatgcggaccctccctgcctgcagcctgcacagattctggtttgaggtttgactctggaccctggctgtgcccctaggtggagacagccctctttctcacctaccccctgccgcacagcccagcaggagggaggcggacagccagatgcagagcgagtggatgcacttcccagctcatctctggaagcctttgctactcaagctcctctggccgcggaacaattcctctgatcatgtttggttttcttcttccttattttattttgtagaaaccgggtggtattttattgctctgcaaagatgtccagaagccatgtatataatgttttttaaacagaacttcattccccgttgaactttcgcattctctgacagaggcctagggctgtatctctccctgggctgccaccagagaaggtgcttggtgttcgcctgccagcccagagccctggaggagccggctgcacagagaggcttttcttcccagctgggcctggtggagcccggggcagggggagagtagagacactcccttgtgcagctttgagcctagtttagctggggccagggaggggtgctactgttttccaagtgaatgggtctcaaagacttggtgaccccagcctcatcttctaggccttttccacccaaccaggcctacctgggagagggtgaggttcagcacatcacacaccatccccactgtcattcagggcctgggtctccagctctgtaaccagtcctgtcccatttcctcagtccctgggcctcccagccttcaggctgtagggctgccttactaaaattgaaaaatccacctcttaacatctctttcactttggttttgctaacactagnctgggntgggccctgcaggggcagcagggagcccagctgctccccagtgacttccagtgtaacagttgtgtca

SEQ ID NO: 296762 - DNA, 154 bp, Homo sapiens
aaataataataaaagcctgccttgtgccttcacagattctgttgaccgaagagtttgtagagaaaatgttggaggatttagaagatttgacttctccagaggaagtaagcttgtttgacttttcctgacaacaggtcccgtctctgggaccatg

SEQ ID NO: 296763 - DNA, 2135 bp, Homo sapiens
  misc_feature (1537)..(1537): n is a, c, g, or t
  misc_feature (1898)..(1898): n is a, c, g, or t
  misc_feature (2027)..(2027): n is a, c, g, or t
  misc_feature (2051)..(2051): n is a, c, g, or t
  misc_feature (2083)..(2083): n is a, c, g, or t
  misc_feature (2089)..(2089): n is a, c, g, or t
  misc_feature (2108)..(2108): n is a, c, g, or t
ggctcgagagttatacgtgaacggagacctgaggctgcagcagaagcagccgctgagctgtggtggcctagatgcccgatacaacatatccgtgatcaacgggaccagcccctttgcctatgactacgacctcacccatattgttgctgcctaccaggagaggaacgaaagctcccagtgaggaactggtcttctggagactctgtgtggcatagagtgattcaaccaccttaagaagacctctggctttcctggaacacagatgtcgagacatctcccatggatttgtgatcagcgttgcagctctcccagcagccctggacggtggcccccagccgcccgcatgtggctgccacggttctccagcaagacagtgacagtgctcctcctggcacagaccacctgcctcctgctcttcatcatctcccggccagggccctcatccccagccggcggcgaggatcgtgtgcacgtgctggtgctgtcctcgtggcgctcgggctcatccttcttgggccagctcttcagccagcaccccgacgtcttctacctgatggagcccgcgtggcatgtgtggaccaccctgtcgcagggcagcgcggcaacgctgcacatggccgtgcgcgacctgatgcgctctatctttttgtgcgacatggacgtgtttgatgcctacatgccacagagccgaaacctgtccgcctttttcaactgggcaacgagccgcgcgctgtgctcgccgcccgcctgcagcgcctttccccgaggcaccatcagcaagcaggacgtatgcaagacactgtgcacgcggcagccattcagcctggcccgggaggcctgccgctcctacagccacgtggtgctcaaggaggtgcgcttcttcaacctgcaggtgctctacccgctgctcagcgaccccgcgctcaacctgcgcatcgtgcacctggtgcgcgacccgcgggccgtgctgcgctcccgggaggcggcgggcccgatactggcacgcgacaacggcatcgtgctgggcaccaacggcaagtgggtggaggccgaccctcacctgcgcctgattcgcgaggtgtgccgcagccacgtgcgcatcgccgaggccgccacactcaagccgccacccttcctgcgcggccgctaccgcctggtgcgcttcgaggacctggcgcgggagccgctggcagagatccgcgcactctacgccttcaccggcctgaccctcacgccacagctcgaggcctggatccacaacatcacccacgggtcggggatcggcaagccaatcgaggccttccatacttcgtctaggaatgcgcgcaacgtctcccaggcctggcgccacgcgttgcccttcactaagatcctgcgcgtgcaggaggtgtgcgccggcgcgctgcagctgctgggctaccggcctgtgtactctgcggaccagcagcgtgacctcaccctggatctggtgctgccacgaggcccagaccacttcagctgggcatcgcctgactgagaactctgggccttagagcangccccgaactgtggtcgccaggcccaggaggcgactgcatggtggagagggagctggggcgcatggggaagcaggtccctactatcaaccgggagtttggggtcctcccctgaagtaggcaaggactgcacgtttctttctctcctgattctcggttttcctttgagtcttctggagctgccttctcatcaggtgcactcttcatggaaagcaactcttgcccctacctcttctgggcgcagggagtaagttactgctaaattaaattaaatgtgtgccaggccgggtgcggtggctcatgcctgtaatcccagcattttgagaggctgaggcgggtggatcacctgaggtcaggagttcnaaaccagcctggccaacatagtgaaaccccctctctactaaaaatgcaaaaattagtccggcgtggtggcacactcctgtaatcccagctacttaggaggctgaggtgggagaatcacttggactccanaggtggaggttgcagtaagctganatcatgccactgcaccctagcttgggtggcanagcaanactctatcaaaaaaataantaataaatttgttcaaaagtcctgccg

SEQ ID NO: 296764 - DNA, 3249 bp, Homo sapiens
  misc_feature (18)..(18): n is a, c, g, or t
  misc_feature (272)..(272): n is a, c, g, or t
  misc_feature (378)..(378): n is a, c, g, or t
  misc_feature (397)..(397): n is a, c, g, or t
  misc_feature (725)..(725): n is a, c, g, or t
  misc_feature (2651)..(2651): n is a, c, g, or t
  misc_feature (3012)..(3012): n is a, c, g, or t
  misc_feature (3141)..(3141): n is a, c, g, or t
  misc_feature (3165)..(3165): n is a, c, g, or t
  misc_feature (3197)..(3197): n is a, c, g, or t
  misc_feature (3203)..(3203): n is a, c, g, or t
  misc_feature (3222)..(3222): n is a, c, g, or t
ctctggctgctgctccanctctggcagacacgccaagctttgagaaagctcccagtgaggaactggtcttctggagactctgtgtggcatagagtgattcaaccaccttaagaagacctctggctttcctggaacacagatgtcgagacatctcccatggatttgtgatcagcgttgcagctctcccagcagccctggacggtggtgagtcccctcagctggccaggacagtactctgctctcacctctctgcttcttgggctccatcccanctccccatcaactgatcttcttgcaaacccacagggctccaggacaccctccttctggagcccatgctgcctacagcacttcactccccaccagtgatgacaacanttgctgttctttgtccacnttatttacttgtttatctttaatgacaaaagttttttttttgttgttttttttttttttttgaaacggagtctcactcttcactcaggctgcagtgcagtggcgcaatctcagctcactgccacctctgcctcccaggttcacgccattctcctgcctcagcctcccgagtagctgggactacaggcgcccaccatcacgcctggctaattttttgtatttttagtagagatggggtctcactgtgttagccaggatggtctcgatctcctgacctcgtgatccgcccgcctcggcctcccataatgctgggattacaggcgtgagcnaccgcgcctggctgacaaaagttttatacctgcctgttaaaaaaattatataatacagaagcacaccttgtaaaaggtgcaatcctcagttatgggcatgactgcgtgttcccttcccccatcttcattataataaccccccaatccccccagatcctgtgagccaggtaccggaattatccctctttcacacacgggtaaagtgatccgtcacagagagatttaagtgatcttcataagcaagatcataggctaggaagtggcagagccaggattcaacctcggcgagcctggtggtgctctgacatccaccgaagcccccatcaagcccttttagctccacaacctaaaagggtctctctaagaggtatcctgaagcaaaagacaggagttctctttgaaacatagtatttctctctacagatagatagcctgtaggtatgtaagtaggtgggtgggtgggtaggtagacagtttgatgatatcccacattattctgcaactggacttctgctgtgagcacagactatattctggcctatgtcttgactccgtattcctgggaaagtgctcgactgagaccttgggagtcttgggaagtccaatgggtagggtagccgaatctgagggctgatccctgagggcactgggcagtaattggggcatgggatgggcatgagggcccgggtccctaaagttgcccactccacccgaaggcccccagccgcccgcatgtggctgccacggttctccagcaagacagtgacagtgctcctcctggcacagaccacctgcctcctgctcttcatcatctcccggccagggccctcatccccagccggcggcgaggatcgtgtgcacgtgctggtgctgtcctcgtggcgctcgggctcatccttcttgggccagctcttcagccagcaccccgacgtcttctacctgatggagcccgcgtggcatgtgtggaccaccctgtcgcagggcagcgcggcaacgctgcacatggccgtgcgcgacctgatgcgctctatctttttgtgcgacatggacgtgtttgatgcctacatgccacagagccgaaacctgtccgcctttttcaactgggcaacgagccgcgcgctgtgctcgccgcccgcctgcagcgcctttccccgaggcaccatcagcaagcaggacgtatgcaagacactgtgcacgcggcagccattcagcctggcccgggaggcctgccgctcctacagccacgtggtgctcaaggaggtgcgcttcttcaacctgcaggtgctctacccgctgctcagcgaccccgcgctcaacctgcgcatcgtgcacctggtgcgcgacccgcgggccgtgctgcgctcccgggaggcggcgggcccgatactggcacgcgacaacggcatcgtgctgggcaccaacggcaagtgggtggaggccgaccctcacctgcgcctgattcgcgaggtgtgccgcagccacgtgcgcatcgccgaggccgccacactcaagccgccacccttcctgcgcggccgctaccgcctggtgcgcttcgaggacctggcgcgggagccgctggcagagatccgcgcactctacgccttcaccggcctgaccctcacgccacagctcgaggcctggatccacaacatcacccacgggtcggggatcggcaagccaatcgaggccttccatacttcgtctaggaatgcgcgcaacgtctcccaggcctggcgccacgcgttgcccttcactaagatcctgcgcgtgcaggaggtgtgcgccggcgcgctgcagctgctgggctaccggcctgtgtactctgcggaccagcagcgtgacctcaccctggatctggtgctgccacgaggcccagaccacttcagctgggcatcgcctgactgagaactctgggccttagagcangccccgaactgtggtcgccaggcccaggaggcgactgcatggtggagagggagctggggcgcatggggaagcaggtccctactatcaaccgggagtttggggtcctcccctgaagtaggcaaggactgcacgtttctttctctcctgattctcggttttcctttgagtcttctggagctgccttctcatcaggtgcactcttcatggaaagcaactcttgcccctacctcttctgggcgcagggagtaagttactgctaaattaaattaaatgtgtgccaggccgggtgcggtggctcatgcctgtaatcccagcattttgagaggctgaggcgggtggatcacctgaggtcaggagttcnaaaccagcctggccaacatagtgaaaccccctctctactaaaaatgcaaaaattagtccggcgtggtggcacactcctgtaatcccagctacttaggaggctgaggtgggagaatcacttggactccanaggtggaggttgcagtaagctganatcatgccactgcaccctagcttgggtggcanagcaanactctatcaaaaaaataantaataaatttgttcaaaagtcctgccg

SEQ ID NO: 296765 - DNA, 380 bp, Homo sapiens
agtttgatgagtgtaacaaacaaatagagccctgagatacagagtaacactcggggcccacttccagagggtagcagggaaagacagtcagcaatcttcagcggaggcctgaagtctgagaaggccagtcccatgaagagtattccaggcaaaaaaaaaagacatatgtgaggcctgaaggtggttccctgctaagccaagtggccaaagtttgagttctttcatcatcatagtcatggaccaacatctcagcagtggggtcaaaatcatgatcctcagaagacaaagacccaactggaataaaacaaactgaatcactttacacatttacaaggctattaacaaaagaaaataaaaatttgtgttcttctgccaaaacc

SEQ ID NO: 296766 - DNA, 755 bp, Homo sapiens
ccactgcccggtggcagaacatccaggcatccgagtcagtggggagtgggaaaacggaggggtggagtagaagagagggaggaggttggggaaagaggggacccagtggtcttccgcggaggggaggggagctcttcccagccgagtcccctcctccttgctcttatcaggcaaacccacgttcctaggcgcggaagcaactttccttcaccttgaccaggctgaagccgtcgcatctaattgggactcttggcagaagcacggacctcctggcatcctctcctttgtcagtctttcctccctctctcgttcttttccctcccccaccctccctcttataagggtatatctgcagagtcttcagtgagccagggtacctagacgagaggatttttatacgaaaagccagggtagatttgccgactgctttgcctcactctgaaatccttaggcagtgcatgcaaaggtcggtgaatttcggagtggggtgaaggggcatggggcggtagggagggtggcggctccaactttaaagctctgctagagcgcttggctttcaggtaagcagggactaacagtccttacaagaactctcctgtggtccctgggcagggggctgaccgcatgccagaggagattaggagagcgggagcagagagggagtgtgagagccagggaggccggtacgcagctcagccgtactcgcgactcaactgcacactgcgagcccctggagagggtttgtgcagaacaat

SEQ ID NO: 296767 - DNA, 1130 bp, Homo sapiens
ccactgcccggtggcagaacatccaggcatccgagtcagtggggagtgggaaaacggaggggtggagtagaagagagggaggaggttggggaaagaggggacccagtggtcttccgcggaggggaggggagctcttcccagccgagtcccctcctccttgctcttatcaggcaaacccacgttcctaggcgcggaagcaactttccttcaccttgaccaggctgaagccgtcgcatctaattgggactcttggcagaagcacggacctcctggcatcctctcctttgtcagtctttcctccctctctcgttcttttccctcccccaccctccctcttataagggtatatctgcagagtcttcagtgagccagggtacctagacgagaggatttttatacgaaaagccagggtagatttgccgactgctttgcctcactctgaaatccttaggcagtgcatgcaaaggtcggtgaatttcggagtggggtgaaggggcatggggcggtagggagggtggcggctccaactttaaagctctgctagagcgcttggctttcagttacggaggctgggaagtacaagatcaagttgctggcagatctggtgtctgtagtaacaaattggaagcacttatgttagaactgaagagaaaatatggaaaaacttaaacatgcctccgctggtgataaccaggaaaacagggtctggagtagacctccagcaaactccaacagacctgcagctgagggacctgactgttagaaggaaaactaacaaacagaaagtaatagcatcaacatcaacaaaaaggacatccacaccaaaaccctatctgtaggtcaccatcatcaaagaccaaaggcagataaaaccacaaaggtggggagaaaccagagcagaaaagctgaaaattctgaaaaccagagtgccccttctcccctaaaggatcacagctcctcgccagcaacggaacaaagcaggacagagaatgactttgacgagctgacagaagtaggcttcagaaagtcggtaataacaaacttctctgagctaaaggaggatgtacaaacccattgcaaggaagttaaaaaccttgaaaaaagattagatgaatggctaactggaataa

SEQ ID NO: 296768 - DNA, 1812 bp, Homo sapiens
  misc_feature (856)..(856): n is a, c, g, or t
  misc_feature (879)..(879): n is a, c, g, or t
gaactggttgaggctgctcctttgattttatgtcgtgtaaagtctttgttccccagccccacccctgcctcctcccatcgggaaaccccccatgggagtcatcagtgggcgggagtcggtgcctgctccagtccagccctgccttgggagatgctggaggaccctgtcgccctgaaggcctgtttgctgcacatctgcctgcagagccaaacctcagggcccggtgcagtgtccagcctggtatctggcatcccagtagcttccatgttctgtgtatgtgtgtggtgtgccccttcctcccactgtttgaattcactgaaaacccccatgtctctccaactggctccccacagaccacttctgaagggctcacctgttgtcactccctcctgctccctcagtcccgtgtcatgagaatggacggtgtccagggcttccggtggggtctcaggagatgcccatgctggccctgcccgagctggctttctcggcctgggttcacagttcagctccatctctacgctgggcgaggagcagacagcagtgggactccatggttctggatacctttcctggggtccctgtggaggcaaccaggattttcaggagcagccagtcagcagctcagccagggatgacagaaccatccctgcttactcacctctgtagtgtgagggtctgtgggtggtgatggaggagggactcagggagaggccggtgaatacaggggctgacgctcttccctcgtgcatcctcctgcagtctgacagaaagcagcccaatagcggggcaacctcagggctaccagcgatcccctgagagtggggtgggcaggttcagctgtgagagaggctcnggcagagcaggtgtggactaagncccctgaccttcacacctgctccccagagaagccccagccagttgcaccaagtagcagaggtgagtagaggggcctgggggcttccaaggccccaggtcatcctgttgaactgagagggacaggtagcccccctgcctgcgcccctggcccatgggcacctgagggcagtactgcatgggaagagcccaggatgcctcaggcctggcaactgtgacaagtatgaggaaggagagagaacgggaggggaatcaggcagggcgcattcgaggaggccagaggtggcgaggcaggcttgccctgcacaaaccacaacagaagttgcacacagaagtcccagggacctttgtgctgggaactgaaagagtggggaaggtggaggggaccatttcagagcaggctggaatcaggtgcttggaccagtgaagacatgtcttgcttcctccagctctctctggggccctcccactctccacacccacagcagagacaaattgaggcaagagttgagagagcatctgtctggtgaggtgatgggagcagtgtgcatggggcaccaggagttcctccatcccacctgccttagcgatcaggactttaggggggcctcttcaaagatagtgacccttctgccctgactcctgcccatctaaggacttgatttgctgctttctgaaaaccctggggctgaaaacttcaaaatcagggcctggcagagcctagcttcgccaaggtcagcccaccaggagccctgccttcgtctccataggaaggacacatgtacagcccttgcccccggccctctcattcccacttctgcttggcaatgctctccatctcccttatgtggactcttgttcttgtctgatctcttgtcaaattgttattttgtaatgaactgcgtctccttattaaagaaatgagctgaaagaaaa

SEQ ID NO: 296769 - DNA, 438 bp, Homo sapiens
aactggttgaggctgctcctttgattttatgtcgtgtaaagtctttgttccccagccccacccctgcctcctcccatcgggaaaccccccatgggagtcatcagtgggcgggagtcggtgcctgctccagtccagccctgccttgggagatgctggaggaccctgtcgccctgaaggcctgtttgctgcacatctgcctgcagagccaaacctcagggcccggtgcagtgtccagcctggtatctggcatcccagtagcttccatgttctgtgtatgtgtgtggtgtgccccttcctcccactgtttgaattcactgaaaagccataaagggggcctcctgctggagatttggcctcccttggctcctcccaggagcccccatgtctctccaactggctccccacagaccacttctgaagggctcacctgttgtcact

SEQ ID NO: 296770 - DNA, 444 bp, Homo sapiens
aaattgaggcaagagttgagagagcatctgtctggtgaggtgatgggagcagtgtgcatggggcaccaggagttcctccatcccacctgccttagcgatcaggactttaggggggcctcttcaaagatagtgacccttctgccctgactcctgcccatctaaggacttgatttgctgctttctgaaaaccctggggctgaaaacttcaaaatcagggcctggcagagcctagcttcgccaaggtcagcccaccaggagccctgccttcgtctccataggaaggacacatgtacagcccttgcccccggccctctcattcccacttctgcttggcaatgctctccatctcccttatgtggactcttgttcttgtctgatctcttgtcaaattgttattttgtaatgaactgcgtctccttattaaagaaatgagctgaaagaaaa

SEQ ID NO: 296771 - DNA, 2094 bp, Homo sapiens
  misc_feature (268)..(268): n is a, c, g, or t
  misc_feature (286)..(286): n is a, c, g, or t
  misc_feature (745)..(745): n is a, c, g, or t
  misc_feature (775)..(775): n is a, c, g, or t
  misc_feature (817)..(817): n is a, c, g, or t
  misc_feature (1556)..(1556): n is a, c, g, or t
gacccgcccgcccgcccctatgaccaacatgagctggagcttcctgacgcggctgctggaggagatccacaaccactccaccttcgtgggcaaggtgtggctcacggtgctggtggtcttccgcatcgtgctgacggctgtgggcggcgaggccatctactcggacgagcaggccaagttcacttgcaacacgcggcagccaggctgcgacaacgtctgctatgacgccttcgcgcccctgtcgcacgtgcgcttctgggtcttccanattgtggtcatctccacnccctcggtcatgtacctgggctacgccgtgcaccgcctggcccgtgcgtctgagcaggagcggcgccgcgccctccgccgccgcccggggccacgccgcgcgccccgagcgcacctgccgcccccgcacgccggctggcctgagcccgccgacctgggcgaggaggagcccatgctgggcctgggcgaggaggaggaggaggaggagacgggggcagccgagggcgccggcgaggaagcggaggaggcaggcgcggaggaggcgtgcactaaggcggtcggcgctgacggcaaggcggcagggaccccgggcccgaccgggcaacacgatgggcggaggcgcatccagcgggagggcctgatgcgcgtgtacgtggcccagctggtggccagggcagctttcgaggtggccttcctggtgggccagtacctgctgtacggcttcgaggtgcgaccgttntttccctgcagccgccagccctgcccgcangtggtggactgcttcgtgtcgcgccctactgaaaagacggtnttcctgctggttatgtacgtggtcagctgcctgtgcctgctgctcaacctctgtgagatggcccacctgggcttgggcagcgcgcaggacgcggtgcgcggccgccgcggccccccggcctccgcccccgcccccgcgccgcggcccccgccctgcgccttccctgcggcggccgctggcttggcctgcccgcccgactacagcctggtggtgcgggcggccgagcgcgctcgggcgcatgaccagaacctggcaaacctggccctgcaggcgctgcgcgacggggcagcggctggggaccgcgaccgggacagttcgccgtgcgtcggcctccctgcggcctcccgggggccccccagagcaggcgcccccgcgtcccggacgggcagtgctacctctgcgggcactgtcggggagcagggccggcccggcacccacgagcggccaggagccaagcccagggctggctccgagaagggcagtgccagcagcagggacgggaagaccaccgtgtggatctgagggcgctggcttgcgagctgggccagggaggaggagggttggggggctccggtggaaacctgcgaccccttctcctcagccttctccttagccggtggcctcaggcagactctgcccagaggggcagccaggctgctcagggaaggggctgaaagcggcagaggagtgccctggcttggtcaccactggggccaaggtggggtggagagaggcctangagccagaaagggccctctgctgtggtctgaaccccagggggagtggggcattgactccacccctgtcctgagctggaataggtcctctgggatgccagctctcccctttgtgcttccctgcagcaacccatggagggcccagggtgcctggtatgggcatcagttggtgggggtgcgggggtgcgtgtccccattccctgcaacagcaaatggggctccttcttcagccctccccttcccagccccaaactgagacagactgggagctgggagcctggggtggacaggaccataccctctttgagcttctgcgatgccggccttccgttcctctgggaggcttgaagttctgcagagatgttgatatgccttgcagcttggacccaatgggtggtggtcagggcctgggggcttggccatgctgggggaatggggctctgggttcctgcctgtggcctgtctgtcctcctccctaattcagacccagcctcaagaggaaagggagtaaaataaaactaacttgtttataaccttgtg

SEQ ID NO: 296772 - DNA, 544 bp, Homo sapiens
actttaaaccccgccaggattgattttggtaccctatgaaggctttgacgtccattcacgcgtcggtaacttggatctctaagagcgccggcctactactactaaattgcggccgcgtcgacgcaaagccattgtcatgagagtaaatgcctgccagttgttgaagataagatagatctcctcatttgatccacccccaaagcctgagatgcacgcattctggttctcctttaccagacaagcaaccgaggcctcagttcatgcatggccatcctgagatttgagagcccaggggctggatcatctgacttttcactgtatggtctgtcctggagcatattggtaaagggatgttgcctcccagctgcccacttcctcttggatgccctggtagccacacccttctctcacattagtaccacgttggaccagcctaatttgaagttttagtcttccagttcaaaataggaggcttagcgttaaggatttggcagacctctctgaagaagaggaatctgtcctgttctggtgacattgcgagccc

SEQ ID NO: 296773 - DNA, 715 bp, Homo sapiens
agcggggtcgttcgccctataggtaccaatatggcggaggcttcttttggaagttcgagcccagttgggtctttgtcttctgaggatcatgattttgaccccactgctgagatgttggtccatgactatgatgatgaaagaactcttgaagaagaggaaatgatggatgagggtaaaaacttcagttcagaaattgaagacttagaaaaggaaggaaccatgcctctagaagatttactggcattctatggctatgaacctacaattccagcagttgcaaattccagtgcaaatagttccccaagtgaactggcagatgaactaccagacatgacactagacaaagtaagtgtgagcatttgaaagaaaaattcagggtctgttaccattgactgcttttacttccatttaaagtattatttaataattcttaaatgtaaacttcttgttgacccattgtgcttattttggtggctgatttaaactttgtttggctttgatcaccctatgttaagagtagtattaatagcagcttcatggtactttgcatgcctgaatattctcccataatgttttcatctttcctgtgtagacacattgtatctaaacttagattttgccttaacttcttttgatcctataaacacataaaagccttgattaataaatcccccagaagccttcaaaccaagctggcttaggcgtggagtggttg

SEQ ID NO: 296774 - DNA, 624 bp, Homo sapiens
agcggggtcgttcgccctataggtaccaatatggcggaggcttcttttggaagttcgagcccagttgggtctttgtcttctgaggatcatgattttgaccccactgctgagatgttggtccatgactatgatgatgaaagaactcttgaagaagaggaaatgatggatgagggtaaaaacttcagttcagaaattgaagacttagaaaaggaaggaaccatgcctctagaagatttactggcattctatggctatgaacctacaattccagcagttgcaaattccagtgcaaatagttccccaagtgaactggcagatgaactaccagacatgacactagacaaagaggaaatagcaaaagacctgttgtcaggtgatgacgaggaaactcagtcttctgcggatgatctgacgccatctgtgacttcccatgaaacttctgatttcttccctaggcctttacgatcaaatactgcatgtgatggtgataaggaatcagaggttgaagatgttgaaacagacagtggtaattcacctgaagatttgaggaaggaaataatgattggtttacaatatcaggcagagattcccccttatcttggagagtacgatggtaatgagaaa

SEQ ID NO: 296775 - DNA, 357 bp, Homo sapiens
cctccaacacacacacacacacacacacacacacacacacacacacacactcacatctatcccttctgcaggttggtaacattggagctttgtaatttacctgccaagggactttgggaatttattccttggttcattcaaaataagtcaatttgactgagtgcatgccatatgcaaggctctggggaaactaagctgcttatgacctgagcttagagtccagtgaggaagcctggagtatgcatttgtcatggtggtaaaatcgtgcagtggcagcatggatgttgctatggaagcagaggaaggaatctcaataaggccaagggtgtcatggtcactgacaaattattgcataga

SEQ ID NO: 296776 - DNA, 783 bp, Homo sapiens
tgccaggctgggaggggctgccggcccctcggtgacttgcaccgggcccgcagtcaggctggggaggtgctgctggccccaccgctgagccgcctccctcaccgcacctctgctgcccctccaaaccagccaagatcagaccttgatctcacctgattaagcgcttgcttagtacagggcagaccctcgagacttatgctcaggtgatggccctaatggacgccttgatggacacgtccgggacccagggacccggagaccaggaatctgcaggtctcagggagccgcagaacctgaaacccaaaaataccaggcttgatcgcctgctcttcggtagtttaagaaccaggctttctttggcattgtatacctgccatgtgccaggctgtgtcgtgctctggggattcagtctctgtgcaaactatgactccatacagatgaagtccaagaacaggcaaaacgcatcacagaaggagcccctggagcccctggccgaacacatctgaaagcacggagccagacctctgcagcgccctccagcgggcaggttctgcgggcagccatctcctcgcaggccagaacacgccacgtcactccaggacggttcgccacctttgagaagagaggactccagtgtctgttcgctctggaaatgtgggcatgttcccattccaaaggtgataggatctgaggggaggatccttcccattttcaaagccttcctaaaatcccactgattagtggggaggagtgcaagtctaccctttccccgaaccacccaca

SEQ ID NO: 296777 - DNA, 392 bp, Homo sapiens
cagtgacagggatcatctataatgtaaatttttagacaagaagtgttggatttggttgttttaactagatactaccaaaagctatgtattaatctcaaagcactactgtctaaagcggggataaatgggtgataaaagggcttaagttgataggaagtaaccagtgatacaaatgcgcaggtagctaagagttgagaaaaaagatgtagctttctgtgggtggatcatcatgcatctgcttttttgggagaggtgggcagaatacctgtactgatgacagctaatctctgaatctttttcctccaggatgttccttcaggaggaagcagcactaaaagcactctgagtcaagatgagtgggaaaccatctcaataaacacattttggataaa

SEQ ID NO: 296778 - DNA, 380 bp, Homo sapiens
  misc_feature (3)..(3): n is a, c, g, or t
cgngccgcgcgacacggcgagaagacgacagaaggggtccggcggtgacgacctacgcacacgagaacatgcctctcgcaaaggatctccttcatccctctccagaagaggagaagaggaaacacaagaagaaacgcctggtgcagagccccaattcctacttcatggatgtgaaatgcccaggatgctataaaatcaccacggtctttagccatgcacaaacggtagttttgtgtgttggctgctccactgtcctctgccagcctacaggaggaaaagcaaggcttacagaaggatgttccttcaggaggaagcagcactaaaagcactctgagtcaagatgagtgggaaaccatctcaataaacacattttggataaa

SEQ ID NO: 296779 - DNA, 439 bp, Homo sapiens
  misc_feature (3)..(3): n is a, c, g, or t
cgngccgcgcgacacggcgagaagacgacagaaggggtccggcggtgacgacctacgcacacgagaacatgcctctcgcaaaggatctccttcatccctctccagaagaggagaagaggaaacacaagaagaaacgcctggtgcagagccccaattcctacttcatggatgtgaaatgcccaggatgctataaaatcaccacggtctttagccatgcacaaacggtagttttgtgtgttggctgctccactgtcctctgccagcctacaggaggaaaagcaaggcttacagaaggatgttccttcaggaggaagcagcactaaaagcactctgagtcaagatgagtgggaaaccatctcaataaacacattttggataaatctaaaaaaaacaaatatgtttataaaaaacatggcggcccgctggggccaatcgaatt

SEQ ID NO: 296780 - DNA, 226 bp, Homo sapiens
gcggccgcctactactactactactgctcgaattcaagcttctaacgatgtacggggacatgcacaaacggtagttttgtgtgttggctgctccactgtcctctgccagcctacaggaggaaaagcaaggcttacagaaggatgttccttcaggaggaagcagcactaaaagcactctgagtcaagatgagtgggaaaccatctcaataaacacattttggataaa

SEQ ID NO: 296781 - DNA, 366 bp, Homo sapiens
gcaggatttccgctttcgccctttccggcggtgacgacctacgcacacgagaacatgcctctcgcaaaggatctccttcatccctctccagaagaggagaagaggaaacacaagaagaaacgcctggtgcagagccccaattcctacttcatggatgtgaaatgcccaggatgctataaaatcaccacggtctttagccatgcacaaacggtagttttgtgtgttggctgctccactgtcctctgccagcctacaggaggaaaagcaaggcttacagaaggatgttccttcaggaggaagcagcactaaaagcactctgagtcaagatgagtgggaaaccatctcaataaacacattttggataaa

SEQ ID NO: 296782 - DNA, 599 bp, Homo sapiens
gcaggatttccgctttcgccctttccggcggtgacgacctacgcacacgagaacatgccttgtgagtgctttggtccaggtttcggcggagatctcgctgttctgtccgaactctcccctcacgctgatttcggatcgtagagggtcctcatttaccctctgcacttcttaggacattaactccagggaccgcagcggcccacgggccacccgcatagacgggagcggagaggagataagatggcggcccagctgcgcagacaccaggggcggcgaggggcgagctctccccgctcgcaaaggatctccttcatccctctccagaagaggagaagaggaaacacaagaagaaacgcctggtgcagagccccaattcctacttcatggatgtgaaatgcccaggatgctataaaatcaccacggtctttagccatgcacaaacggtagttttgtgtgttggctgctccactgtcctctgccagcctacaggaggaaaagcaaggcttacagaaggatgttccttcaggaggaagcagcactaaaagcactctgagtcaagatgagtgggaaaccatctcaataaacacattttggataaa

SEQ ID NO: 296783 - DNA, 484 bp, Homo sapiens
gcaggatttccgctttcgccctttccggcggtgacgacctacgcacacgagaacatgcctctcgcaaaggatctccttcatccctctccagaagaggagaagaggaaacacaagaagaaacgcctggtgcagagccccaattcctacttcatggatgtgaaatgcccaggatgctataaaatcaccacggtctttagccatgcacaaacggtagttttgtgtgttggctgctccactgtcctctgccagcctacaggaggaaaagcaaggcttacagaaggatgttccttcaggaggaagcagcactaaaagcactctgagtcaagatgagtgggaaaccatctcaataaacacattttggataaagactcaacaaaaaaaaacaacaaaaaaaaaaaaaaaaacttgtgttgggcgccgcccgtgggccccccggaaaaagttttttacaaaccacttccgttgggggcccgggggcccccca

SEQ ID NO: 296784 - DNA, 723 bp, Homo sapiens
gcaggatttccgctttcgccctttccggcggtgacgacctacgcacacgagaacatgcctctcgcaaaggatctccttcatccctctccagaagaggagaagaggaaacacaagaagaaacgcctggtgcagagccccaattcctacttcatggatgtgaaatgcccaggatgctataaaatcaccacggtctttagccatgcacaaacggtagttttgtgtgttggctgctccactgtcctctgccagcctacaggaggaaaagcaaggcttacagaaggatgttccttcaggaggaagcagcactaaaagcactctgagtcaagatgagtgggaaaccatctcaataaacacattttggataaaaaaaaaaaaaaaaaaaaaaaaaaaaaaaaaaaaaaaaaaaaaaaaaaaaaaaaaaaaaaaaaaaactaaaaaaaacaaacaatattaaaaactaatttttacaaacaacatttataattaaattgatcaaaattcacctaacttctttatacaacaattaaactgccaaaactctccctctacctaacttaattcaacttcccattacccaacttattccctttaactcaatcctatcttcccacaacctttaccttttcaaccccttctcaatccacatttccaatcaacacccctttccaaactttaatcccaactttaccctaaataattcttaaaaacccttatttttttccc

SEQ ID NO: 296785 - DNA, 1098 bp, Homo sapiens
gcaggatttccgctttcgccctttccggcggtgacgacctacgcacacgagaacatgcctctcgcaaaggatctccttcatccctctccagaagaggagaagaggaaacacaagaagaaacgcctggtgcagagccccaattcctacttcatggatgtgaaatgcccaggatgctataaaatcaccacggtctttagccatgcacaaacggtagttttgtgtgttggctgctccactgtcctctgccagcctacaggaggaaaagcaaggcttacagaaggatgttccttcaggaggaagcagcactaaaagcactctgagtcaagatgagtgggaaaccatctcaataaacacattttggataaaaaaaaaaaaaaaaaaaaaaaaaaaaaaaaaaaaaaaaaaaaaaaaaaacccggggggctttttgggggggggggaaaaaggggctacgaaaggggcccaagggccaaacggtgttccctggacccagttttttggtccaaggggggaaatcggggggaccccctatagggagcgggatataactttccgagaaaagcccggggtaacccggggtttatgacttggcgtgaaaatactacccacaaccacacaaccaccgcgcgacccaccacacactcacccaacagagaacaaaacacatacaaaaacacaaaaaccacacaacacacaaaaacacaaaataaccaaaaataacactacaaaccacaacatactctaccacaccaacaaactaaatacaaaacaaaaacaaatttacttctttctatttattccatatccacaagaacagaggggggggagctcgtgtaagcaggcgagaggccgcagcgacgcgcaacggcgaggagcaggaggcggaggggtagaggagacgaaagcgacgcgagagcaggggagcagaagggcgggaagagaaagggagcgaggaaccggaaagagaaggcgcgagaggagggaaacgacggagggcagagaacgcgccgggaaggaggagggagaggggaagatgagggaaaagaagaagacgaagcacagaacgagacaaacggagggaggggaggagagggggtt

SEQ ID NO: 296786 - DNA, 487 bp, Homo sapiens
gcaggatttccgctttcgccctttccggcggtgacgacctacgcacacgagaacatgcctgacattaactccagggaccgcagcggcccacgggccacccgcatagacgggagcggagaggagataagatggcggcccagctgcgcagacaccaggggcggcgaggggcgagctctccccgctcgcaaaggatctccttcatccctctccagaagaggagaagaggaaacacaagaagaaacgcctggtgcagagccccaattcctacttcatggatgtgaaatgcccaggatgctataaaatcaccacggtctttagccatgcacaaacggtagttttgtgtgttggctgctccactgtcctctgccagcctacaggaggaaaagcaaggcttacagaaggatgttccttcaggaggaagcagcactaaaagcactctgagtcaagatgagtgggaaaccatctcaataaacacattttggataaa

SEQ ID NO: 296787 - DNA, 720 bp, Homo sapiens
gcaggatttccgctttcgccctttccggcggtgacgacctacgcacacgagaacatgcctctcgcaaaggatctccttcatccctctccagaagaggagaagaggaaacacaagaagaaacgcctggtgcagagccccaattcctacttcatggatgtgaaatgcccaggatgctataaaatcaccacggtctttagccatgcacaaacggtagttttgtgtgttggctgctccactgtcctctgccagcctacaggaggaaaagcaaggcttacagaaggatgttccttcaggaggaagcagcactaaaagcactctgagtcaagatgagtgggaaaccatctcaataaacacattttggataaaaaaaaaaaaaaaaaaaaaaaaaaaaaaaaaaaaaaaaaaaaaaaaaaacaaaaaaggaaaaaggaaaaaaaaaaaaaaaaaaaaaaaaccgaaaaaaaaaaaaaaaaaaaaaaaaaaaaaccttgtgggccgcttgggccaagtcgattttagatttgagcaagtttttgattggggccgaaaattgggctcattgggcaaattccccctatagggagtcgtttaacaattaatgggccggggtttaaacacgttgtgacttgggaaaaccttggggttaccaaaattaaaaggctttgaagatcccctttttcccaggttgcgtaataccaagcccccccgatggccttttcc

SEQ ID NO: 296788 - DNA, 886 bp, Homo sapiens
  misc_feature (370)..(370): n is a, c, g, or t
  misc_feature (375)..(375): n is a, c, g, or t
gcaggatttccgctttcgccctttccggcggtgacgacctacgcacacgagaacatgcctctcgcaaaggatctccttcatccctctccagaagaggagaagaggaaacacaagaagaaacgcctggtgcagagccccaattcctacttcatggatgtgaaatgcccaggatgctataaaatcaccacggtctttagccatgcacaaacggtagttttgtgtgttggctgctccactgtcctctgccagcctacaggaggaaaagcaaggcttacagaaggatgttccttcaggaggaagcagcactaaaagcactctgagtcaagatgagtgggaaaccatctcaataaacacattttggataaaacanacacnaaataaagaagaacaaaaaaaaatgaagaacaaagaacaatcaaaaaacacataataaaagaaagaagaaaaagaacatagactaacgaacaaccagcatgcgcatcacaaacaaaactagaagaaaaaaacagagtggtgcggccccacagcacatgatgacacgacgcttccatccatagtagaagcggacaaggccgaccacatcagaaatgacatagcggaacgaaagatatgaacgaaccgacacggagaatccaggtggaaagaagagagggggtggactatcaaccaaagacagaaacacacggggcacagagatggggctccccgacaccaaacggacggcccgacggaaggaagactcaaaggggatcaacacgcaataacagggaccgaggcgatgttggatataaacaacaacccccggcggggtgggggagaaggcgcagaaacaaatcagacagccagatcagcaaactgactaggaaaacaaccaaataatgcgggc

SEQ ID NO: 296789 - DNA, 679 bp, Homo sapiens
gcaggatttccgctttcgccctttccggcggtgacgacctacgcacacgagaacatgccttgtgagtgctttggtccaggtttcggcggagatctcgctgttctgtccgaactctcccctcacgctgatttcggatcgtagagggtcctcatttaccctctgcacttcttaggacattaactccagggaccgcagcggcccacgggccacccgcatagacgggagcggagaggagataagatggcggcccagctgcgcagacaccaggggcggcgaggggcgagctctccccggtgtgtgacagtgggggctattttcgaccatcccattttcgctgttggtttctaaatctctgcatttctgtccctcttagctcgcaaaggatctccttcatccctctccagaagaggagaagaggaaacacaagaagaaacgcctggtgcagagccccaattcctacttcatggatgtgaaatgcccaggatgctataaaatcaccacggtctttagccatgcacaaacggtagttttgtgtgttggctgctccactgtcctctgccagcctacaggaggaaaagcaaggcttacagaaggatgttccttcaggaggaagcagcactaaaagcactctgagtcaagatgagtgggaaaccatctcaataaacacattttggataaa

SEQ ID NO: 296790 - DNA, 1119 bp, Homo sapiens
  misc_feature (603)..(603): n is a, c, g, or t
  misc_feature (608)..(608): n is a, c, g, or t
gcaggatttccgctttcgccctttccggcggtgacgacctacgcacacgagaacatgccttgtgagtgctttggtccaggtttcggcggagatctcgctgttctgtccgaactctcccctcacgctgatttcggatcgtagagggtcctcatttaccctctgcacttcttaggacattaactccagggaccgcagcggcccacgggccacccgcatagacgggagcggagaggagataagatggcggcccagctgcgcagacaccaggggcggcgaggggcgagctctccccgctcgcaaaggatctccttcatccctctccagaagaggagaagaggaaacacaagaagaaacgcctggtgcagagccccaattcctacttcatggatgtgaaatgcccaggatgctataaaatcaccacggtctttagccatgcacaaacggtagttttgtgtgttggctgctccactgtcctctgccagcctacaggaggaaaagcaaggcttacagaaggatgttccttcaggaggaagcagcactaaaagcactctgagtcaagatgagtgggaaaccatctcaataaacacattttggataaaacanacacnaaataaagaagaacaaaaaaaaatgaagaacaaagaacaatcaaaaaacacataataaaagaaagaagaaaaagaacatagactaacgaacaaccagcatgcgcatcacaaacaaaactagaagaaaaaaacagagtggtgcggccccacagcacatgatgacacgacgcttccatccatagtagaagcggacaaggccgaccacatcagaaatgacatagcggaacgaaagatatgaacgaaccgacacggagaatccaggtggaaagaagagagggggtggactatcaaccaaagacagaaacacacggggcacagagatggggctccccgacaccaaacggacggcccgacggaaggaagactcaaaggggatcaacacgcaataacagggaccgaggcgatgttggatataaacaacaacccccggcggggtgggggagaaggcgcagaaacaaatcagacagccagatcagcaaactgactaggaaaacaaccaaataatgcgggc

SEQ ID NO: 296791 - DNA, 779 bp, Homo sapiens
gcaggatttccgctttcgccctttccggcggtgacgacctacgcacacgagaacatgcctgacattaactccagggaccgcagcggcccacgggccacccgcatagacgggagcggagaggagataagatggcggcccagctgcgcagacaccaggggcggcgaggggcgagctctccccgctcgcaaaggatctccttcatccctctccagaagaggagaagaggaaacacaagaagaaacgcctggtgcagagccccaattcctacttcatggatgtgaaatgcccaggatgctataaaatcaccacggtctttagccatgcacaaacggtagttttgtgtgttggctgctccactgtcctctgccagcctacaggaggaaaagcaaggcttacagaaggatgttccttcaggaggaagcagcactaaaagcactctgagtcaagatgagtgggaaaccatctcaataaacacattttggataaaaaggaagaaagacagaagatggaggagcaaaacctcgcgcgggcggagcaggctcgctggaagaagcttgtgtagaaccgatgatcggtggggcgggcggagggacccaggggacagtggtagacattgtgccagaggtgggccacgagggagattgcgggcccagaccgacgcggagggtacctcccagataaaaaaagcccgcgggtaacccgacggtcttgaccacatcaataggggccgagggccaagaggctagaacgagcccaaggagcgatacaatccccaccgg

SEQ ID NO: 296792 - DNA, 714 bp, Homo sapiens
  misc_feature (714)..(714): n is a, c, g, or t
gcaggatttccgctttcgccctttccggcggtgacgacctacgcacacgagaacatgccttgtgagtgctttggtccaggtttcggcggagatctcgctgttctgtccgaactctcccctcacgctgatttcggatcgtagagggtcctcatttaccctctgcacttcttaggacattaactccagggaccgcagcggcccacgggccacccgcatagacgggagcggagaggagataagatggcggcccagctgcgcagacaccaggggcggcgaggggcgagctctccccggtgtgtgacagtgggggctattttcgaccatcccattttcgctgttggtttctaaatctctgcatttctgtccctcttagctcgcaaaggatctccttcatccctctccagaagaggagaagaggaaacacaagaagaaacgcctggtgcagagccccaattcctacttcatggatgtgaaatgcccaggtgaggagacggcttgctgtagtggggaaagcactggacctcaacagttggaaaatgttgtagtgttagctgtctcgtatccttgaagctgtgcagcagcttcagtttcttcgcctgtggaaaatattttccctgatactctttaccgtgaatctttaataccatttacatccaactcctacggttcttgtgttgggaaccagttatggtggatgagtgggcctaaggcacn

SEQ ID NO: 296793 - DNA, 374 bp, Homo sapiens
gcaggatttccgctttcgccctttccggcggtgacgacctacgcacacgagaacatgcctctcgcaaaggatctccttcatccctctccagaagaggagaagaggaaacacaagaagaaacgcctggtgcagagccccaattcctacttcatggatgtgaaatgcccaggatgctataaaatcaccacggtctttagccatgcactctgagtcaagatgagtgggaaaccatctcaataaacacattttggataaagactcaacaaaaaaaaacaacaaaaaaaaaaaaaaaaacttgtgttgggcgccgcccgtgggccccccggaaaaagttttttacaaaccacttccgttgggggcccgggggcccccca

SEQ ID NO: 296794 - DNA, 256 bp, Homo sapiens
gcaggatttccgctttcgccctttccggcggtgacgacctacgcacacgagaacatgcctctcgcaaaggatctccttcatccctctccagaagaggagaagaggaaacacaagaagaaacgcctggtgcagagccccaattcctacttcatggatgtgaaatgcccaggatgctataaaatcaccacggtctttagccatgcactctgagtcaagatgagtgggaaaccatctcaataaacacattttggataaa

SEQ ID NO: 296795 - DNA, 837 bp, Homo sapiens
cctttccggcggtgacgacctacgcacacgagaacatgccttgtgagtgctttggtccaggtttcggcggagatctcgctgttctgtccgaactctcccctcacgctgatttcggatcgtagagggtcctcatttaccctctgcacttcttaggacattaactccagggaccgcagcggcccacgggccacccgcatagacgggagcggagaggagataagatggcggcccagctgcgcagacaccaggggcggcgaggggcgagctctccccggtgtgtgacagtgggggctattttcgaccatcccattttcgctgttggtttctaaatctctgcatttctgtccctcttagctcgcaaaggatctccttcatccctctccagaagaggagaagaggaaacacaagaagaaacgcctggtgcagagccccaattcctacttcatggatgtgaaatgcccaggtgaggagacggcttgctgtagtggggaaagcactggacctcaacagttggaaaatgttgtagtgttagctgtctcgtatccttgaagctgtgcagcagcttcagtttcttcgcctgtggaaaatattttccctgatactcttaaaatttgaatgtatgagactggcaaagttttgcatcttaggaggagtgattcatttcaccgtgatctctcatcacatttcacatacaacccctacgtttttttgtgttgggaaacaatgtaatggatgatgagttgggcataagtgcaggaaagacgggtgtaatagaggaaaaaaatgttatctgcttttctttcaggatgctataaaatcaccacggtctttagccat

SEQ ID NO: 296796 - DNA, 2997 bp, Homo sapiens
  misc_feature (494)..(494): n is a, c, g, or t
ttttgctgggattcattgaagggtctcctttcctcttcaattacatcagaatctaaagcagcaacagggtccccataaaaacttgctcttcgattgtcccagttcttgttgagtgctgctgtgaaaagtgacaggtttcagccatgggtcagcatttctttttaagacacctgatgatgctggtggaaatggatcagtgggtaacattgtgctgttctgtaaagggtgcagacctaagtcctccacttgcattctcaccttgtttggaaagccaatgatgttactaggtcaatggtttcattaaggtactcacccccatgaaggagcagcagtgtggtcccctgtcaatatttataaggcaccatgtcttaaaaatgtctgtttttagtatgaattagctttcattttccctattcagttctgcttttgggaacttgacagggcccatccatgagaatgggcttcacaaaatatggcaaatgtatgtaccaaantccttcgggaccactaaataaaggtgaaatgggcaatgtacaacaaatgttagtgtcacttctcagatatatattacacaatgattagtttgtttcttctccttggtcttttgtctttattagtggtgggtgatactttaataaaacctcatcacttgctggaaatagctgtaacttatcattctcatcctgtgcattagtggctagacataaacaagagggcccatttcagctgggagttttcatgtttcattgatgcgttttgctgacctatggatgaaacagagccatcactgagaagaaaaagcatggctgatagtgtccagtttttattaattaaatctttacagtagtcctcattgtctttggaatactattaattggcagctgcggctgtattgttatttgaaattggtcatcaaatttggattccacgttggaatctctagatatttctcgttagaaaattcttttgaagtagctgactctgcttcataactcacgcgctctgtaatggtgaaaagggagctgtgctgttttccaacatgatggcagtcatttcaaatggtttctaccaagtctttttttttttttttaattttgttgtttgttggaagttactaaccatgttgtaaacctgcccagttgctgcaaacttttacatttctctgctttacttaaaataatcgagctgtcagtcctttgttagaagtggtaaccatgcaagttcaactgtttaaattctgtaatgaattaagtgtccccccacctgttgcccttcccacccttccattttgtaatgaaaattccacttacagctgaaagagcagagaaatataaatgaagctcttggcttcaccaaattgcctgagattaacatgaagttttgcttctctgctcttttctccactgtaggtggttttttcattgacagcccctattgccagcctctgagcgtcgcaccatttattattcacttgggccctcaagatttcttctctgacttctagaaccatcaggttgtctggcttgaaatggcaatttctatgtcttggtcttaagagcaatgtgacaccctgaggctatccagctttcagacactccactctgacaccctctttttgaaagcaatgactgatcattttaaagaagagcaatactttgttcaaagccacggtgtctgttttaaaacttttcctttggaaacctagcaatatctgtacttaacccctttttagcatagtttcttgtcagggagtttacaggtcagtgtagagcttaaaattagcgtgtgagctgtgctatgttctgacagttttttacactttttagcacataaatagttacattcctgactgcgtcagttagcgttactataatttctcagagataggggtcctccttgaagccatatcctctgcacggggactggcccctagccagggatgtggcttgcagcttgtgtttcttcaggctgcaggagtaccccatctcttgtgcaaggtaattggtccagtagatttccaacatacctcatgctgactagatgaagtgcatgggtggtgaagtaaggagttgagtttatatagttctgaagtcgtttgtagtctctctcaaattgttagcctggggaacaaaccactgagagattttgctggtattggccttttcttttttttttttttttaattttgggtgaatgtttgaaaatcatgaatcagccaccattattaattgaagagctgggaatacctcgttaatgtatttttaaaactggtgttggaccctctgtgtatttcaggttaatacttttaagcagttttcagcacgtttatctcactttattctcgttctcctcggaccttcgtagccatatcacttgtataaaataggctgagatatagtgactgtaagctgtgatctcagtatacaaaggtaagctcttttattttctgattaaagagaaaaatagtcaattaagacaacatgcatatatgacaatcatatatgatgtatttgatctcttaggtcatatgtcatcgcattacctttaaaaattgtatggtctaaatgtaaaatagttatttttcaacatttgttttaatacccttgtaactgctttttactcaagacagacatttcacttacactaagtgtgtgtgtgtgtgtgtgtgtagaaacttaggatataacacgtatgtaaattacacacacatacctgtttaaatgtaagaattcagtgataggaacagttcatctaagaagattttaatgacagggcactcttttggccaaagcagtggaatttcctaagcagcaaggttggtaatagtgctggtaggatctgtatgtgtaagctgttacacaagctgaggatcaaagtgccaatttctcaaggagaaaaacttctccgagaaatgaaagtctctgatctgtgttgtatgccctaatacaacaacagcaagaagccatagaaaaaagcaatagaaaatgaaaaaaaaaa

SEQ ID NO: 296797 - DNA, 857 bp, Homo sapiens
  misc_feature (857)..(857): n is a, c, g, or t
gtatgcggcaacgactctcttaattaccaccgctcaggcaaagggcgttgtgaatacagctgtgtctgcagcagtccaagctgttcggggcagaggaagaggaactctaacaaggggagcttttgttggggcgacagctgctcctggctacatagctccaggctatggaacaccatatggttacagcacagctgcccctgcctatggtttacccaagagaatggttctgttacccgttatgaaatttccaacatatcctgttccccactactcattcttttagcaaatgacagaagctaattcctattgaacaacaatacagtacaacacagaatgttagagaaaaagcctttttatcctgctttctttgaacacatacttgatcaaaattatttgtaaagaacatctttcctactttttgattttaacaaatgcaaatttagttctctaaaacttgaaaaaaaaaaaagaaaccagttctgtgaaaacggtacctcatttctggaaaataacttataccagcccttctgttctagggaaataaaagtctagcagttcaaagtttaagttttaagagacgtatcagattatgtaaaattaaatttgtgaaggatgtatagagtctcaaacactgatcacaaataaactgctttgttgtaacacagagtactgcctggttcctgatgcagtcactgattcttagttgattgatatgtatttgccccagggcactttaatttgggctgtagttattttttttaatacaatagagacttttcatttaactttaactttgtaaatattgaagtgtgtaataaagcccgagcggccgttcccttagaagggatattaatgan

SEQ ID NO: 296798 - DNA, 665 bp, Homo sapiens
gtatgcggcaacgactctcttaattaccaccgctcaggcaaagggcgttgtgaatacagctgtgtctgcagcagtccaagctgttcggggcagaggaagaggaactctaacaaggggagcttttgttggggcgacagctgctcctggctacatagctccaggctatggaacaccatatggttacagcacagctgcccctgcctatggtttacccaagagaatggttctgttacccgttatgaaatttccaacatatcctgttccccactactcattcttttagcaaatgacagaagctaattcctattgaacaacaatacagtacaacacagaatgttagagaaaaagcctttttatcctgctttctttgaacacatacttgatcaaaattatttgtaaagaacatctttcctactttttgattttaacaaatgcaaatttagttctctaaaacttgaaaaaaaaaaaagaaaccagttctgtgaaaacggtacctcatttctggaaaataacttataccagcccttctgttctagggaaataaaagtctagcagttcaaagtttaagttttaagagacgtatcagattatgtaaaattaaatttgtgaaggatgtatagagtctcaaacactgatcacaaataaactgctttgttgtaacacag

SEQ ID NO: 296799 - DNA, 594 bp, Homo sapiens
  misc_feature (1)..(1): n is a, c, g, or t
  misc_feature (12)..(12): n is a, c, g, or t
  misc_feature (14)..(14): n is a, c, g, or t
  misc_feature (41)..(41): n is a, c, g, or t
  misc_feature (52)..(52): n is a, c, g, or t
  misc_feature (77)..(77): n is a, c, g, or t
  misc_feature (86)..(86): n is a, c, g, or t
  misc_feature (121)..(121): n is a, c, g, or t
  misc_feature (127)..(127): n is a, c, g, or t
ntttgcaccatncnagttttggggcggggggggggaatttnaacaggggggnttttgtgggggacagttgttctggnaaatagttncagggtatggaaaacccatatggttacagcacagntgcccntgcttatggtttacccaagagaatggttctgttacccgttatgaaatttccaacatatcctgttccccactactcattcttttagcaaatgacagaagctaattcctattgaacaacaatacagtacaacacagaatgttagagaaaaagcctttttatcctgctttctttgaacacatacttgatcaaaattatttgtaaagaacatctttcctactttttgattttaacaaatgcaaatttagttctctaaaacttgaaaaaaaaaaaagaaaccagttctgtgaaaacggtacctcatttctggaaaataacttataccagcccttctgttctagggaaataaaagtctagcagttcaaagtttaagttttaagagacgtatcagattatgtaaaattaaatttgtgaaggatgtatagagtctcaaacactgatcacaaataaactgctttgttgtaacacag

SEQ ID NO: 296800 - DNA, 2748 bp, Homo sapiens
gtcacgtgctcgctgccgccgctgccgccgccgaagcggagaccggagccgcgagcgccaccagggcagcagccgccgcagccgccgccgctgggcagaggagccggagacgcgagcgggcgaggtggcggcggcggcggagcgggagcgggtaccgggcgcgggcagagcgcggcggcgcgggtgtgttccagagaacaagccttcagacatttgctatattgacgctgagctgtcaggggactcaggcttatgaggaggtattgttacacaaaacagtgtctagtgaagacgacaagaaagaggggaaaggatcggaaaaagaagctaaaatactatagaaaaccatgagatctattcgatcttttgctaatgatgatcgccatgttatggtgaaacattcaacaatctatccatctccggaggaacttgaagctgttcagaatatggtatctactgttgaatgtgctcttaaacatgtctcagattggttggatgaaacaaataaaggcacaaaaacagagggtgagacagaagtgaagaaagatgaggccggagaaaactattccaaggatcaaggtggtcggacattgtgtggtgtaatgaggattggcctggttgcaaaaggcttgctgattaaagatgatatggacttggagctggttttaatgtgcaaagacaaacccacagagaccctgttaaatacagtcaaagataatcttcctattcagattcagaaactcacagaagagaaatatcaagtggaacaatgtgtaaatgaggcatctattataattcggaatacaaaagagcccacgctaactttgaaggtgatacttacctcacctctaattagggacgaattggagaagaaggatggagaaaatgtttcgatgaaagatcctccggacttattggacaggcagaaatgcctgaacgccttggcgtctcttcgacatgccaaatggtttcaggcaagggcaaatggattaaaatcatgtgtaattgtcctccgcattctgcgtgatttgtgcaacagagtccccacatgggcaccattgaaaggatggccactagaacttatatgtgaaaagtctataggtacttgtaatagacctttgggcgctggggaggccttgagacgagtaatggagtgtttggcatctggaatactacttcctgggggtcctggtcttcatgatccttgtgagcgagacccaacagatgctctgagctatatgaccatccagcaaaaagaagatattacccacagtgcacagcatgcactcagactatcagcctttggtcagatttacaaagtgctggagatggacccccttccatctagtaagccttttcagaagtattcctggtcagttactgataaagaaggtgctgggtcttcagctctaaagaggccatttgaagatggattaggggatgataaagaccccaacaagaagatgaaacgaaacttaaggaaaattctggatagtaaagcaatagaccttatgaatgcactaatgaggctaaatcagatcaggcctgggcttcagtataagctcctatctcagtctggccccgttcatgccccagtcttcacaatgtctgtagatgtggatggcacaacatatgaagcctcaggaccatccaagaaaacagcaaaacttcacgtagcggtgaaggtattgcaggcaatgggatatccaacaggctttgatgcagatattgaatgtatgagttccgatgaaaaatcagataatgaaagtaaaaatgaaacagtgtcttcaaactcaagcaataatactggaaattctacaactgaaacctccagtaccttagaggtaagaactcagggccctatcctcacagcaagtggcaaaaaccctgtaatggagctcaatgaaaaaagaagaggtctcaagtatgaactcatctcagagactggtggaagccatgacaagcgctttgtaatggaggtagaagtagatggacagaaattcagaggcgcaggtccaaataagaaagtggcaaaggcgagtgcagctttagctgccttggagaaactgttttctggacccaatgcggcaaataataagaaaaagaagattatccctcaggcaaagggcgttgtgaatacagctgtgtctgcagcagtccaagctgttcggggcagaggaagaggaactctaacaaggggagcttttgttggggcgacagctgctcctggctacatagctccaggctatggaacaccatatggttacagcacagctgcccctgcctatggtttacccaagagaatggttctgttacccgttatgaaatttccaacatatcctgttccccactactcattcttttagcaaatgacagaagctaattcctattgaacaacaatacagtacaacacagaatgttagagaaaaagcctttttatcctgctttctttgaacacatacttgatcaaaattatttgtaaagaacatctttcctactttttgattttaacaaatgcaaatttagttctctaaaacttgaaaaaaaaaaaagaaaccagttctgtgaaaacggtacctcatttctggaaaataacttataccagcccttctgttctagggaaataaaagtctagcagttcaaagtttaagttttaagagacgtatcagattatgtaaaattaaatttgtgaaggatgtatagagtctcaaacactgatcacaaataaactgctttgttgtaacacag

SEQ ID NO: 296801 - DNA, 3362 bp, Homo sapiens
gtcacgtgctcgctgccgccgctgccgccgccgaagcggagaccggagccgcgagcgccaccagggcagcagccgccgcagccgccgccgctgggcagaggagccggagacgcgagcgggcgaggtggcggcggcggcggagcgggagcgggtaccgggcgcgggcagagcgcggcggcgcgggtgtgttccagagaacaagccttcagacatttgctatattgacgctgagctgtcaggggactcaggcttatgaggaggtattgttacacaaaacagtgtctagtgaagacgacaagaaagaggggaaaggatcggaaaaagaagctaaaatactatagaaaaccatgataaacaagaacaaaagaggcaagactgttcataaaaaattgagaatgttttagtttgcgatggacttcaaaacaaaatatttaccatgtactaacatataatttcatagatctattcgatcttttgctaatgatgatcgccatgttatggtgaaacattcaacaatctatccatctccggaggaacttgaagctgttcagaatatggtatctactgttgaatgtgctcttaaacatgtctcagattggttggatgaaacaaataaaggcacaaaaacagagggtgagacagaagtgaagaaagatgaggccggagaaaactattccaaggatcaaggtggtcggacattgtgtggtgtaatgaggattggcctggttgcaaaaggcttgctgattaaagatgatatggacttggagctggttttaatgtgcaaagacaaacccacagagaccctgttaaatacagtcaaagataatcttcctattcagattcagaaactcacagaagagaaatatcaagtggaacaatgtgtaaatgaggcatctattataattcggaatacaaaagagcccacgctaactttgaaggtgatacttacctcacctctaattagggacgaattggagaagaaggatggagaaaatgtttcgatgaaagatcctccggacttattggacaggcagaaatgcctgaacgccttggcgtctcttcgacatgccaaatggtttcaggcaagggcaaatggattaaaatcatgtgtaattgtcctccgcattctgcgtgatttgtgcaacagagtccccacatgggcaccattgaaaggatggccactagaacttatatgtgaaaagtctataggtacttgtaatagacctttgggcgctggggaggccttgagacgagtaatggagtgtttggcatctggaatactacttcctgggggtcctggtcttcatgatccttgtgagcgagacccaacagatgctctgagctatatgaccatccagcaaaaagaagatattacccacagtgcacagcatgcactcagactatcagcctttggtcagatttacaaagtgctggagatggacccccttccatctagtaagccttttcagaagtattcctggtcagttactgataaagaaggtgctgggtcttcagctctaaagaggccatttgaagatggattaggggatgataaagaccccaacaagaagatgaaacgaaacttaaggaaaattctggatagtaaagcaatagaccttatgaatgcactaatgaggctaaatcagatcaggcctgggcttcagtataagctcctatctcagtctggccccgttcatgccccagtcttcacaatgtctgtagatgtggatggcacaacatatgaagcctcaggaccatccaagaaaacagcaaaacttcacgtagcggtgaaggtattgcaggcaatgggatatccaacaggctttgatgcagatattgaatgtatgagttccgatgaaaaatcagataatgaaagtaaaaatgaaacagtgtcttcaaactcaagcaataatactggaaattctacaactgaaacctccagtaccttagaggtaagaactcagggccctatcctcacagcaagtggcaaaaaccctgtaatggagctcaatgaaaaaagaagaggtctcaagtatgaactcatctcagagactggtggaagccatgacaagcgctttgtaatggaggtagaagtagatggacagaaattcagaggcgcaggtccaaataagaaagtggcaaaggcgagtgcagctttagctgccttggagaaactgttttctggacccaatgcggcaaataataagaaaaagaagattatccctcaggcaaagggcgttgtgaatacagctgtgtctgcagcagtccaagctgttcggggcagaggaagaggaactctaacaaggggagcttttgttggggcgacagctgctcctggctacatagctccaggctatggaacaccatatggttacagcacagctgcccctgcctatggtttacccaagagaatggttctgttacccgttatgaaatttccaacatatcctgttccccactactcattcttttagcaaatgacagaagctaattcctattgaacaacaatacagtacaacacagaatgttagagaaaaagcctttttatcctgctttctttgaacacatacttgatcaaaattatttgtaaagaacatctttcctactttttgattttaacaaatgcaaatttagttctctaaaacttgaaaaaaaaaaaagaaaccagttctgtgaaaacggtacctcatttctggaaaataacttataccagcccttctgttctagggaaataaaagtctagcagttcaaagtttaagttttaagagacgtatcagattatgtaaaattaaatttgtgaaggatgtatagagtctcaaacactgatcacaaataaactgctttgttgtaacacagagtactgcctggttcctgatgcagtcactgattcttagttgattgatatgtatttgccccagggcactttaatttgggctgtagttattttttttaatacaatagagacttttcatttaactttaactttgtaaatattgaagtgtgtaataaagccaataaaatatgggtttgaatattgttttagcttattatttttgatatgttttggtatcaaattacaaggaattgaaaactaataacttagccctagaagcccattcacttgtaagcaaagtgctaaaacaaagcaaaggtgattgttagtttgagccagtctactcactttgtaagccctttgtactcctgttgtacaagggccatccccatgataaaggttccattctgttatttgagcattgcttattaaaatgatggcactacccagagatggggaaggagaatgtgattatcctagtttatgaatttccaagtttttaaaaataataaattaatcaatcaatcac

SEQ ID NO: 296802 - DNA, 2885 bp, Homo sapiens
gtcacgtgctcgctgccgccgctgccgccgccgaagcggagaccggagccgcgagcgccaccagggcagcagccgccgcagccgccgccgctgggcagaggagccggagacgcgagcgggcgaggtggcggcggcggcggagcgggagcgggtaccgggcgcgggcagagcgcggcggcgcggagacggggttttgccatgttgacctggctggtctcgaactcctgaacgcaagtgatccgcctgcctcagcctcccaaggtgctgggattacaggcacgagccactgtgcctggcctcaactgttgcttcttataaaggtgtgttccagagaacaagccttcagacatttgctatattgacgctgagctgtcaggggactcaggcttatgaggaggtattgttacacaaaacagtgtctagtgaagacgacaagaaagaggggaaaggatcggaaaaagaagctaaaatactatagaaaaccatgagatctattcgatcttttgctaatgatgatcgccatgttatggtgaaacattcaacaatctatccatctccggaggaacttgaagctgttcagaatatggtatctactgttgaatgtgctcttaaacatgtctcagattggttggatgaaacaaataaaggcacaaaaacagagggtgagacagaagtgaagaaagatgaggccggagaaaactattccaaggatcaaggtggtcggacattgtgtggtgtaatgaggattggcctggttgcaaaaggcttgctgattaaagatgatatggacttggagctggttttaatgtgcaaagacaaacccacagagaccctgttaaatacagtcaaagataatcttcctattcagattcagaaactcacagaagagaaatatcaagtggaacaatgtgtaaatgaggcatctattataattcggaatacaaaagagcccacgctaactttgaaggtgatacttacctcacctctaattagggacgaattggagaagaaggatggagaaaatgtttcgatgaaagatcctccggacttattggacaggcagaaatgcctgaacgccttggcgtctcttcgacatgccaaatggtttcaggcaagggcaaatggattaaaatcatgtgtaattgtcctccgcattctgcgtgatttgtgcaacagagtccccacatgggcaccattgaaaggatggccactagaacttatatgtgaaaagtctataggtacttgtaatagacctttgggcgctggggaggccttgagacgagtaatggagtgtttggcatctggaatactacttcctgggggtcctggtcttcatgatccttgtgagcgagacccaacagatgctctgagctatatgaccatccagcaaaaagaagatattacccacagtgcacagcatgcactcagactatcagcctttggtcagatttacaaagtgctggagatggacccccttccatctagtaagccttttcagaagtattcctggtcagttactgataaagaaggtgctgggtcttcagctctaaagaggccatttgaagatggattaggggatgataaagaccccaacaagaagatgaaacgaaacttaaggaaaattctggatagtaaagcaatagaccttatgaatgcactaatgaggctaaatcagatcaggcctgggcttcagtataagctcctatctcagtctggccccgttcatgccccagtcttcacaatgtctgtagatgtggatggcacaacatatgaagcctcaggaccatccaagaaaacagcaaaacttcacgtagcggtgaaggtattgcaggcaatgggatatccaacaggctttgatgcagatattgaatgtatgagttccgatgaaaaatcagataatgaaagtaaaaatgaaacagtgtcttcaaactcaagcaataatactggaaattctacaactgaaacctccagtaccttagaggtaagaactcagggccctatcctcacagcaagtggcaaaaaccctgtaatggagctcaatgaaaaaagaagaggtctcaagtatgaactcatctcagagactggtggaagccatgacaagcgctttgtaatggaggtagaagtagatggacagaaattcagaggcgcaggtccaaataagaaagtggcaaaggcgagtgcagctttagctgccttggagaaactgttttctggacccaatgcggcaaataataagaaaaagaagattatccctcaggcaaagggcgttgtgaatacagctgtgtctgcagcagtccaagctgttcggggcagaggaagaggaactctaacaaggggagcttttgttggggcgacagctgctcctggctacatagctccaggctatggaacaccatatggttacagcacagctgcccctgcctatggtttacccaagagaatggttctgttacccgttatgaaatttccaacatatcctgttccccactactcattcttttagcaaatgacagaagctaattcctattgaacaacaatacagtacaacacagaatgttagagaaaaagcctttttatcctgctttctttgaacacatacttgatcaaaattatttgtaaagaacatctttcctactttttgattttaacaaatgcaaatttagttctctaaaacttgaaaaaaaaaaaagaaaccagttctgtgaaaacggtacctcatttctggaaaataacttataccagcccttctgttctagggaaataaaagtctagcagttcaaagtttaagttttaagagacgtatcagattatgtaaaattaaatttgtgaaggatgtatagagtctcaaacactgatcacaaataaactgctttgttgtaacacag

SEQ ID NO: 296803 - DNA, 2763 bp, Homo sapiens
cgagtagctggaattacaggtgtgcgccaccacgcccagctaatttttgtatttttagtagagacggggttttgccatgttgacctggctggtctcgaactcctgaacgcaagtgatccgcctgcctcagcctcccaaggtgctgggattacaggcacgagccactgtgcctggcctcaactgttgcttcttataaaggtgtgttccagagaacaagccttcagacatttgctatattgacgctgagctgtcaggggactcaggcttatgaggaggtattgttacacaaaacagtgtctagtgaagacgacaagaaagaggggaaaggatcggaaaaagaagctaaaatactatagaaaaccatgagatctattcgatcttttgctaatgatgatcgccatgttatggtgaaacattcaacaatctatccatctccggaggaacttgaagctgttcagaatatggtatctactgttgaatgtgctcttaaacatgtctcagattggttggatgaaacaaataaaggcacaaaaacagagggtgagacagaagtgaagaaagatgaggccggagaaaactattccaaggatcaaggtggtcggacattgtgtggtgtaatgaggattggcctggttgcaaaaggcttgctgattaaagatgatatggacttggagctggttttaatgtgcaaagacaaacccacagagaccctgttaaatacagtcaaagataatcttcctattcagattcagaaactcacagaagagaaatatcaagtggaacaatgtgtaaatgaggcatctattataattcggaatacaaaagagcccacgctaactttgaaggtgatacttacctcacctctaattagggacgaattggagaagaaggatggagaaaatgtttcgatgaaagatcctccggacttattggacaggcagaaatgcctgaacgccttggcgtctcttcgacatgccaaatggtttcaggcaagggcaaatggattaaaatcatgtgtaattgtcctccgcattctgcgtgatttgtgcaacagagtccccacatgggcaccattgaaaggatggccactagaacttatatgtgaaaagtctataggtacttgtaatagacctttgggcgctggggaggccttgagacgagtaatggagtgtttggcatctggaatactacttcctgggggtcctggtcttcatgatccttgtgagcgagacccaacagatgctctgagctatatgaccatccagcaaaaagaagatattacccacagtgcacagcatgcactcagactatcagcctttggtcagatttacaaagtgctggagatggacccccttccatctagtaagccttttcagaagtattcctggtcagttactgataaagaaggtgctgggtcttcagctctaaagaggccatttgaagatggattaggggatgataaagaccccaacaagaagatgaaacgaaacttaaggaaaattctggatagtaaagcaatagaccttatgaatgcactaatgaggctaaatcagatcaggcctgggcttcagtataagctcctatctcagtctggccccgttcatgccccagtcttcacaatgtctgtagatgtggatggcacaacatatgaagcctcaggaccatccaagaaaacagcaaaacttcacgtagcggtgaaggtattgcaggcaatgggatatccaacaggctttgatgcagatattgaatgtatgagttccgatgaaaaatcagataatgaaagtaaaaatgaaacagtgtcttcaaactcaagcaataatactggaaattctacaactgaaacctccagtaccttagaggtaagaactcagggccctatcctcacagcaagtggcaaaaaccctgtaatggagctcaatgaaaaaagaagaggtctcaagtatgaactcatctcagagactggtggaagccatgacaagcgctttgtaatggaggtagaagtagatggacagaaattcagaggcgcaggtccaaataagaaagtggcaaaggcgagtgcagctttagctgccttggagaaactgttttctggacccaatgcggcaaataataagaaaaagaagattatccctcaggcaaagggcgttgtgaatacagctgtgtctgcagcagtccaagctgttcggggcagaggaagaggaactctaacaaggggagcttttgttggggcgacagctgctcctggctacatagctccaggctatggaacaccatatggttacagcacagctgcccctgcctatggtttacccaagagaatggttctgttacccgttatgaaatttccaacatatcctgttccccactactcattcttttagcaaatgacagaagctaattcctattgaacaacaatacagtacaacacagaatgttagagaaaaagcctttttatcctgctttctttgaacacatacttgatcaaaattatttgtaaagaacatctttcctactttttgattttaacaaatgcaaatttagttctctaaaacttgaaaaaaaaaaaagaaaccagttctgtgaaaacggtacctcatttctggaaaataacttataccagcccttctgttctagggaaataaaagtctagcagttcaaagtttaagttttaagagacgtatcagattatgtaaaattaaatttgtgaaggatgtatagagtctcaaacactgatcacaaataaactgctttgttgtaacacag

SEQ ID NO: 296804 - DNA, 3048 bp, Homo sapiens
  misc_feature (3048)..(3048): n is a, c, g, or t
gtcacgtgctcgctgccgccgctgccgccgccgaagcggagaccggagccgcgagcgccaccagggcagcagccgccgcagccgccgccgctgggcagaggagccggagacgcgagcgggcgaggtggcggcggcggcggagcgggagcgggtaccgggcgcgggcagagcgcggcggcgcgggtgtgttccagagaacaagccttcagacatttgctatattgacgctgagctgtcaggggactcaggcttatgaggaggtattgttacacaaaacagtgtctagtgaagacgacaagaaagaggggaaaggatcggaaaaagaagctaaaatactatagaaaaccatgataaacaagaacaaaagaggcaagactgttcataaaaaattgagaatgttttagtttgcgatggacttcaaaacaaaatatttaccatgtactaacatataatttcatagatctattcgatcttttgctaatgatgatcgccatgttatggtgaaacattcaacaatctatccatctccggaggaacttgaagctgttcagaatatggtatctactgttgaatgtgctcttaaacatgtctcagattggttggatgaaacaaataaaggcacaaaaacagagggtgagacagaagtgaagaaagatgaggccggagaaaactattccaaggatcaaggtggtcggacattgtgtggtgtaatgaggattggcctggttgcaaaaggcttgctgattaaagatgatatggacttggagctggttttaatgtgcaaagacaaacccacagagaccctgttaaatacagtcaaagataatcttcctattcagattcagaaactcacagaagagaaatatcaagtggaacaatgtgtaaatgaggcatctattataattcggaatacaaaagagcccacgctaactttgaaggtgatacttacctcacctctaattagggacgaattggagaagaaggatggagaaaatgtttcgatgaaagatcctccggacttattggacaggcagaaatgcctgaacgccttggcgtctcttcgacatgccaaatggtttcaggcaagggcaaatggattaaaatcatgtgtaattgtcctccgcattctgcgtgatttgtgcaacagagtccccacatgggcaccattgaaaggatggccactagaacttatatgtgaaaagtctataggtacttgtaatagacctttgggcgctggggaggccttgagacgagtaatggagtgtttggcatctggaatactacttcctgggggtcctggtcttcatgatccttgtgagcgagacccaacagatgctctgagctatatgaccatccagcaaaaagaagatattacccacagtgcacagcatgcactcagactatcagcctttggtcagatttacaaagtgctggagatggacccccttccatctagtaagccttttcagaagtattcctggtcagttactgataaagaaggtgctgggtcttcagctctaaagaggccatttgaagatggattaggggatgataaagaccccaacaagaagatgaaacgaaacttaaggaaaattctggatagtaaagcaatagaccttatgaatgcactaatgaggctaaatcagatcaggcctgggcttcagtataagctcctatctcagtctggccccgttcatgccccagtcttcacaatgtctgtagatgtggatggcacaacatatgaagcctcaggaccatccaagaaaacagcaaaacttcacgtagcggtgaaggtattgcaggcaatgggatatccaacaggctttgatgcagatattgaatgtatgagttccgatgaaaaatcagataatgaaagtaaaaatgaaacagtgtcttcaaactcaagcaataatactggaaattctacaactgaaacctccagtaccttagaggtaagaactcagggccctatcctcacagcaagtggcaaaaaccctgtaatggagctcaatgaaaaaagaagaggtctcaagtatgaactcatctcagagactggtggaagccatgacaagcgctttgtaatggaggtagaagtagatggacagaaattcagaggcgcaggtccaaataagaaagtggcaaaggcgagtgcagctttagctgccttggagaaactgttttctggacccaatgcggcaaataataagaaaaagaagattatccctcaggcaaagggcgttgtgaatacagctgtgtctgcagcagtccaagctgttcggggcagaggaagaggaactctaacaaggggagcttttgttggggcgacagctgctcctggctacatagctccaggctatggaacaccatatggttacagcacagctgcccctgcctatggtttacccaagagaatggttctgttacccgttatgaaatttccaacatatcctgttccccactactcattcttttagcaaatgacagaagctaattcctattgaacaacaatacagtacaacacagaatgttagagaaaaagcctttttatcctgctttctttgaacacatacttgatcaaaattatttgtaaagaacatctttcctactttttgattttaacaaatgcaaatttagttctctaaaacttgaaaaaaaaaaaagaaaccagttctgtgaaaacggtacctcatttctggaaaataacttataccagcccttctgttctagggaaataaaagtctagcagttcaaagtttaagttttaagagacgtatcagattatgtaaaattaaatttgtgaaggatgtatagagtctcaaacactgatcacaaataaactgctttgttgtaacacagagtactgcctggttcctgatgcagtcactgattcttagttgattgatatgtatttgccccagggcactttaatttgggctgtagttattttttttaatacaatagagacttttcatttaactttaactttgtaaatattgaagtgtgtaataaagcccgagcggccgttcccttagaagggatattaatgan

SEQ ID NO: 296805 - DNA, 3232 bp, Homo sapiens
gtcacgtgctcgctgccgccgctgccgccgccgaagcggagaccggagccgcgagcgccaccagggcagcagccgccgcagccgccgccgctgggcagaggagccggagacgcgagcgggcgaggtggcggcggcggcggagcgggagcgggtaccgggcgcgggcagagcgcggcggcgcggagacggggttttgccatgttgacctggctggtctcgaactcctgaacgcaagtgatccgcctgcctcagcctcccaaggtgctgggattacaggcacgagccactgtgcctggcctcaactgttgcttcttataaaggtgtgttccagagaacaagccttcagacatttgctatattgacgctgagctgtcaggggactcaggcttatgaggaggtattgttacacaaaacagtgtctagtgaagacgacaagaaagaggggaaaggatcggaaaaagaagctaaaatactatagaaaaccatgagatctattcgatcttttgctaatgatgatcgccatgttatggtgaaacattcaacaatctatccatctccggaggaacttgaagctgttcagaatatggtatctactgttgaatgtgctcttaaacatgtctcagattggttggatgaaacaaataaaggcacaaaaacagagggtgagacagaagtgaagaaagatgaggccggagaaaactattccaaggatcaaggtggtcggacattgtgtggtgtaatgaggattggcctggttgcaaaaggcttgctgattaaagatgatatggacttggagctggttttaatgtgcaaagacaaacccacagagaccctgttaaatacagtcaaagataatcttcctattcagattcagaaactcacagaagagaaatatcaagtggaacaatgtgtaaatgaggcatctattataattcggaatacaaaagagcccacgctaactttgaaggtgatacttacctcacctctaattagggacgaattggagaagaaggatggagaaaatgtttcgatgaaagatcctccggacttattggacaggcagaaatgcctgaacgccttggcgtctcttcgacatgccaaatggtttcaggcaagggcaaatggattaaaatcatgtgtaattgtcctccgcattctgcgtgatttgtgcaacagagtccccacatgggcaccattgaaaggatggccactagaacttatatgtgaaaagtctataggtacttgtaatagacctttgggcgctggggaggccttgagacgagtaatggagtgtttggcatctggaatactacttcctgggggtcctggtcttcatgatccttgtgagcgagacccaacagatgctctgagctatatgaccatccagcaaaaagaagatattacccacagtgcacagcatgcactcagactatcagcctttggtcagatttacaaagtgctggagatggacccccttccatctagtaagccttttcagaagtattcctggtcagttactgataaagaaggtgctgggtcttcagctctaaagaggccatttgaagatggattaggggatgataaagaccccaacaagaagatgaaacgaaacttaaggaaaattctggatagtaaagcaatagaccttatgaatgcactaatgaggctaaatcagatcaggcctgggcttcagtataagctcctatctcagtctggccccgttcatgccccagtcttcacaatgtctgtagatgtggatggcacaacatatgaagcctcaggaccatccaagaaaacagcaaaacttcacgtagcggtgaaggtaagaactcagggccctatcctcacagcaagtggcaaaaaccctgtaatggagctcaatgaaaaaagaagaggtctcaagtatgaactcatctcagagactggtggaagccatgacaagcgctttgtaatggaggtagaagtagatggacagaaattcagaggcgcaggtccaaataagaaagtggcaaaggcgagtgcagctttagctgccttggagaaactgttttctggacccaatgcggcaaataataagaaaaagaagattatccctcaggcaaagggcgttgtgaatacagctgtgtctgcagcagtccaagctgttcggggcagaggaagaggaactctaacaaggggagcttttgttggggcgacagctgctcctggctacatagctccaggctatggaacaccatatggttacagcacagctgcccctgcctatggtttacccaagagaatggttctgttacccgttatgaaatttccaacatatcctgttccccactactcattcttttagcaaatgacagaagctaattcctattgaacaacaatacagtacaacacagaatgttagagaaaaagcctttttatcctgctttctttgaacacatacttgatcaaaattatttgtaaagaacatctttcctactttttgattttaacaaatgcaaatttagttctctaaaacttgaaaaaaaaaaaagaaaccagttctgtgaaaacggtacctcatttctggaaaataacttataccagcccttctgttctagggaaataaaagtctagcagttcaaagtttaagttttaagagacgtatcagattatgtaaaattaaatttgtgaaggatgtatagagtctcaaacactgatcacaaataaactgctttgttgtaacacagagtactgcctggttcctgatgcagtcactgattcttagttgattgatatgtatttgccccagggcactttaatttgggctgtagttattttttttaatacaatagagacttttcatttaactttaactttgtaaatattgaagtgtgtaataaagccaataaaatatgggtttgaatattgttttagcttattatttttgatatgttttggtatcaaattacaaggaattgaaaactaataacttagccctagaagcccattcacttgtaagcaaagtgctaaaacaaagcaaaggtgattgttagtttgagccagtctactcactttgtaagccctttgtactcctgttgtacaagggccatccccatgataaaggttccattctgttatttgagcattgcttattaaaatgatggcactacccagagatggggaaggagaatgtgattatcctagtttatgaatttccaagtttttaaaaataataaattaatcaatcaatcac

SEQ ID NO: 296806 - DNA, 3346 bp, Homo sapiens
gtcacgtgctcgctgccgccgctgccgccgccgaagcggagaccggagccgcgagcgccaccagggcagcagccgccgcagccgccgccgctgggcagaggagccggagacgcgagcgggcgaggtggcggcggcggcggagcgggagcgggtaccgggcgcgggcagagcgcggcggcgcggagacggggttttgccatgttgacctggctggtctcgaactcctgaacgcaagtgatccgcctgcctcagcctcccaaggtgctgggattacaggcacgagccactgtgcctggcctcaactgttgcttcttataaaggtgtgttccagagaacaagccttcagacatttgctatattgacgctgagctgtcaggggactcaggcttatgaggaggtattgttacacaaaacagtgtctagtgaagacgacaagaaagaggggaaaggatcggaaaaagaagctaaaatactatagaaaaccatgagatctattcgatcttttgctaatgatgatcgccatgttatggtgaaacattcaacaatctatccatctccggaggaacttgaagctgttcagaatatggtatctactgttgaatgtgctcttaaacatgtctcagattggttggatgaaacaaataaaggcacaaaaacagagggtgagacagaagtgaagaaagatgaggccggagaaaactattccaaggatcaaggtggtcggacattgtgtggtgtaatgaggattggcctggttgcaaaaggcttgctgattaaagatgatatggacttggagctggttttaatgtgcaaagacaaacccacagagaccctgttaaatacagtcaaagataatcttcctattcagattcagaaactcacagaagagaaatatcaagtggaacaatgtgtaaatgaggcatctattataattcggaatacaaaagagcccacgctaactttgaaggtgatacttacctcacctctaattagggacgaattggagaagaaggatggagaaaatgtttcgatgaaagatcctccggacttattggacaggcagaaatgcctgaacgccttggcgtctcttcgacatgccaaatggtttcaggcaagggcaaatggattaaaatcatgtgtaattgtcctccgcattctgcgtgatttgtgcaacagagtccccacatgggcaccattgaaaggatggccactagaacttatatgtgaaaagtctataggtacttgtaatagacctttgggcgctggggaggccttgagacgagtaatggagtgtttggcatctggaatactacttcctgggggtcctggtcttcatgatccttgtgagcgagacccaacagatgctctgagctatatgaccatccagcaaaaagaagatattacccacagtgcacagcatgcactcagactatcagcctttggtcagatttacaaagtgctggagatggacccccttccatctagtaagccttttcagaagtattcctggtcagttactgataaagaaggtgctgggtcttcagctctaaagaggccatttgaagatggattaggggatgataaagaccccaacaagaagatgaaacgaaacttaaggaaaattctggatagtaaagcaatagaccttatgaatgcactaatgaggctaaatcagatcaggcctgggcttcagtataagctcctatctcagtctggccccgttcatgccccagtcttcacaatgtctgtagatgtggatggcacaacatatgaagcctcaggaccatccaagaaaacagcaaaacttcacgtagcggtgaaggtattgcaggcaatgggatatccaacaggctttgatgcagatattgaatgtatgagttccgatgaaaaatcagataatgaaagtaaaaatgaaacagtgtcttcaaactcaagcaataatactggaaattctacaactgaaacctccagtaccttagaggtaagaactcagggccctatcctcacagcaagtggcaaaaaccctgtaatggagctcaatgaaaaaagaagaggtctcaagtatgaactcatctcagagactggtggaagccatgacaagcgctttgtaatggaggtagaagtagatggacagaaattcagaggcgcaggtccaaataagaaagtggcaaaggcgagtgcagctttagctgccttggagaaactgttttctggacccaatgcggcaaataataagaaaaagaagattatccctcaggcaaagggcgttgtgaatacagctgtgtctgcagcagtccaagctgttcggggcagaggaagaggaactctaacaaggggagcttttgttggggcgacagctgctcctggctacatagctccaggtttacccaagagaatggttctgttacccgttatgaaatttccaacatatcctgttccccactactcattcttttagcaaatgacagaagctaattcctattgaacaacaatacagtacaacacagaatgttagagaaaaagcctttttatcctgctttctttgaacacatacttgatcaaaattatttgtaaagaacatctttcctactttttgattttaacaaatgcaaatttagttctctaaaacttgaaaaaaaaaaaagaaaccagttctgtgaaaacggtacctcatttctggaaaataacttataccagcccttctgttctagggaaataaaagtctagcagttcaaagtttaagttttaagagacgtatcagattatgtaaaattaaatttgtgaaggatgtatagagtctcaaacactgatcacaaataaactgctttgttgtaacacagagtactgcctggttcctgatgcagtcactgattcttagttgattgatatgtatttgccccagggcactttaatttgggctgtagttattttttttaatacaatagagacttttcatttaactttaactttgtaaatattgaagtgtgtaataaagccaataaaatatgggtttgaatattgttttagcttattatttttgatatgttttggtatcaaattacaaggaattgaaaactaataacttagccctagaagcccattcacttgtaagcaaagtgctaaaacaaagcaaaggtgattgttagtttgagccagtctactcactttgtaagccctttgtactcctgttgtacaagggccatccccatgataaaggttccattctgttatttgagcattgcttattaaaatgatggcactacccagagatggggaaggagaatgtgattatcctagtttatgaatttccaagtttttaaaaataataaattaatcaatcaatcac

SEQ ID NO: 296807 - DNA, 3128 bp, Homo sapiens
gtcacgtgctcgctgccgccgctgccgccgccgaagcggagaccggagccgcgagcgccaccagggcagcagccgccgcagccgccgccgctgggcagaggagccggagacgcgagcgggcgaggtggcggcggcggcggagcgggagcgggtaccgggcgcgggcagagcgcggcggcgcggagacggggttttgccatgttgacctggctggtctcgaactcctgaacgcaagtgatccgcctgcctcagcctcccaaggtgctgggattacaggcacgagccactgtgcctggcctcaactgttgcttcttataaaggtgtgttccagagaacaagccttcagacatttgctatattgacgctgagctgtcaggggactcaggcttatgaggaggtattgttacacaaaacagtgtctagtgaagacgacaagaaagaggggaaaggatcggaaaaagaagctaaaatactatagaaaaccatgagatctattcgatcttttgctaatgatgatcgccatgttatggtgaaacattcaacaatctatccatctccggaggaacttgaagctgttcagaatatggtatctactgttgaatgtgctcttaaacatgtctcagattggttggatgaaacaaataaaggcacaaaaacagagggtgagacagaagtgaagaaagatgaggccggagaaaactattccaaggatcaaggtggtcggacattgtgtggtgtaatgaggattggcctggttgcaaaaggcttgctgattaaagatgatatggacttggagctggttttaatgtgcaaagacaaacccacagagaccctgttaaatacagtcaaagataatcttcctattcagattcagaaactcacagaagagaaatatcaagtggaacaatgtgtaaatgaggcatctattataattcggaatacaaaagagcccacgctaactttgaaggtgatacttacctcacctctaattagggacgaattggagaagaaggatggagaaaatgtttcgatgaaagatcctccggacttattggacaggcagaaatgcctgaacgccttggcgtctcttcgacatgccaaatggtttcaggcaagggcaaatggattaaaatcatgtgtaattgtcctccgcattctgcgtgatttgtgcaacagagtccccacatgggcaccattgaaaggatggccactagaacttatatgtgaaaagtctataggtacttgtaatagacctttgggcgctggggaggccttgagacgagtaatggagtgtttggcatctggaatactacttcctgggggtcctggtcttcatgatccttgtgagcgagacccaacagatgctctgagctatatgaccatccagcaaaaagaagatattacccacagtgcacagcatgcactcagactatcagcctttggtcagatttacaaagtgctggagatggacccccttccatctagtaagccttttcagaagtattcctggtcagttactgataaagaaggtgctgggtcttcagctctaaagaggccatttgaagatggattaggggatgataaagaccccaacaagaagatgaaacgaaacttaaggaaaattctggatagtaaagcaatagaccttatgaatgcactaatgaggctaaatcagatcaggcctgggcttcagtataagctcctatctcagtctggccccgttcatgccccagtcttcacaatgtctgtagatgtggatggcacaacatatgaagcctcaggaccatccaagaaaacagcaaaacttcacgtagcggtgaaggtattgcaggcaatgggatatccaacaggctttgatgcagatattgaatgtatgagttccgatgaaaaatcagataatgaaagtaaaaatgaaacagtgtcttcaaactcaagcaataatactggaaattctacaactgaaacctccagtaccttagaggtaagaactcagggccctatcctcacagcaagtggcaaaaaccctgtaatggagctcaatgaaaaaagaagaggtctcaagtatgaactcatctcagagactggtggaagccatgacaagcgctttgtaatggaggtagaagtagatggacagaaattcagaggcgcaggtccaaataagaaagtggcaaaggcgagtgcagctttagctgccttggagaaactgttttctggacccaatgcggcaaataataagaaaaagaagattatccctcaggcaaagggcgttgtgaatacagctgtgtctgcagcagtccaagctgttcggggcagaggaagaggaactctaacaaggggagcttttgttggggcgacagctgctcctggctacatagctccaggctatggaacaccatatggttacagcacagctgcccctgcctatggttaatacttttaagcagttttcagcacgtttatctcactttattctcgttctcctcggaccttcgtagccatatcacttgtataaaataggctgagatatagtgactgtaagctgtgatctcagtatacaaaggtaagctcttttattttctgattaaagagaaaaatagtcaattaagacaacatgcatatatgacaatcatatatgatgtatttgatctcttaggtcatatgtcatcgcattacctttaaaaattgtatggtctaaatgtaaaatagttatttttcaacatttgttttaatacccttgtaactgctttttactcaagacagacatttcacttacactaagtgtgtgtgtgtgtgtgtgtgtagaaacttaggatataacacgtatgtaaattacacacacatacctgtttaaatgtaagaattcagtgataggaacagttcatctaagaagattttaatgacagggcactcttttggccaaagcagtggaatttcctaagcagcaaggttggtaatagtgctggtaggatctgtatgtgtaagctgttacacaagctgaggatcaaagtgccaatttctcaaggagaaaaacttctccgagaaatgaaagtctctgatctgtgttgtatgccctaatacaacaacagcaagaagccatagaaaaaagcaatagaaaatgaaaaaaaaaa

SEQ ID NO: 296808 - DNA, 2842 bp, Homo sapiens
  misc_feature (678)..(678): n is a, c, g, or t
  misc_feature (689)..(689): n is a, c, g, or t
  misc_feature (834)..(834): n is a, c, g, or t
atgaggtttatgtggcaatggaggcaataggtttggagtcagtgatatgctcttagacacttttttctactcaggtgctacatgttatagaatcagccatctgcagggtgttgtcagagaagagagcatgagagtgtgtgtgtgcaagagtgtgtgtgtcagcatgccccaggctgggtgtgcatccacacagaagggaaaggcccttcctgtattgccagttttggcattagtcctctacatgagcctcagaccttcgcattgtgcattttctcttcatgcatctgctttgccatttttgtttggatgaaaattgtgttcctaaaacactgctaaactgaaccttcatctgatttcgtaactgtggacataagtagaaagtgaatagtttgaccactttgcccattaaaatagtttatatcctagaaagatgtgaagctacaagggtcacactttcggagcaaattttcttttaggcaaagtgcagagcctggagctacatcctttatatcctctggcacactcgggtgtggtcaaggcttccccatattttgaactgagccgtatgggtaactaggaattggagactaatgcaataataagcttacgcaggtttccttctaaattcaaactctctagttcctttgggtttgggtttggccatttgcttttaactantcagctggctnctgggtctcctgaccatctcatcctctctgtgacttaggtctggtccatttatccaagtacattttggctcactagactcactgtactatgtcttgtataagtgccaaaacatctgccgcttggggcagatatttaaatctgtgnctttcttttagacatacagtaagtttcagattcttcagtaaaggtttgctagagctcgatttttcctttgaaaatactttaatatctagattctaagttacattcatgtttttccttggtctttttttctctcttgttcctccctttcctcctttaacattatactttcaccctgtgccctctgagcccccacatcagaaagctcctctcttccacgtgccatataactgacttccaaagctggtgaaatttgatgcccccatttttcacataaaagatttggtttttaaatgttactgtgatgcaaacctactaaaacgatgctttattttggctgtaaggtaaatatgtcttttggcctttgtaaagctgttgcatgtggggtaatttccctctgatcatctggtgctcttgaatacctgctgttgctgctttgtgatttctccataggttaaatattagcataggaagaggagcagatttcaaatcatgctcgactatgcagaagtctgtgaggccacaagaacgtattaattacaaattcagaaagtaattaatctttccagatttgccatgccaatattggccatagccattaagaagttaagtaaacgcctggccatggctccagctggagctgaggtctgcatggaaagctatgctttgaaccttgacaacccgtttctcctggaatatgtgatatgccacattgagaaccaatatggatttctacagtcgattagaacatgattcaatagcattgcttttgattttcagaattcatggtagctcactcaatgaaattgcttcctagatgtagccatcctgattttgagagtggaaaatattatttatcaaaatattaagagcaatttcaaaatagatctgtgagcgatttatgggcctcttgcaaaatggtatacatgttgactgactgatctggaaaaggttaatgataattactgtcagatatttttttacctgaaatttttattggagtattaaaacttatttggagtcctctccgtttcttttctctgtaggtttacccaagagaatggttctgttacccgttatgaaatttccaacatatcctgttccccactactcattcttttagcaaatgacagaagctaattcctattgaacaacaatacagtacaacacagaatgttagagaaaaagcctttttatcctgctttctttgaacacatacttgatcaaaattatttgtaaagaacatctttcctactttttgattttaacaaatgcaaatttagttctctaaaacttgaaaaaaaaaaaagaaaccagttctgtgaaaacggtacctcatttctggaaaataacttataccagcccttctgttctagggaaataaaagtctagcagttcaaagtttaagttttaagagacgtatcagattatgtaaaattaaatttgtgaaggatgtatagagtctcaaacactgatcacaaataaactgctttgttgtaacacagagtactgcctggttcctgatgcagtcactgattcttagttgattgatatgtatttgccccagggcactttaatttgggctgtagttattttttttaatacaatagagacttttcatttaactttaactttgtaaatattgaagtgtgtaataaagccaataaaatatgggtttgaatattgttttagcttattatttttgatatgttttggtatcaaattacaaggaattgaaaactaataacttagccctagaagcccattcacttgtaagcaaagtgctaaaacaaagcaaaggtgattgttagtttgagccagtctactcactttgtaagccctttgtactcctgttgtacaagggccatccccatgataaaggttccattctgttatttgagcattgcttattaaaatgatggcactacccagagatggggaaggagaatgtgattatcctagtttatgaatttccaagtttttaaaaataataaattaatcaatcaatcac

SEQ ID NO: 296809 - DNA, 2818 bp, Homo sapiens
gtcacgtgctcgctgccgccgctgccgccgccgaagcggagaccggagccgcgagcgccaccagggcagcagccgccgcagccgccgccgctgggcagaggagccggagacgcgagcgggcgaggtggcggcggcggcggagcgggagcgggtaccgggcgcgggcagagcgcggcggcgcggagacggggttttgccatgttgacctggctggtctcgaactcctgaacgcaagtgatccgcctgcctcagcctcccaaggtgctgggattacaggcacgagccactgtgcctggcctcaactgttgcttcttataaaggtgtgttccagagaacaagccttcagacatttgctatattgacgctgagctgtcaggggactcaggcttatgaggaggtattgttacacaaaacagtgtctagtgaagacgacaagaaagaggggaaaggatcggaaaaagaagctaaaatactatagaaaaccatgagatctattcgatcttttgctaatgatgatcgccatgttatggtgaaacattcaacaatctatccatctccggaggaacttgaagctgttcagaatatggtatctactgttgaatgtgctcttaaacatgtctcagattggttggatgaaacaaataaaggcacaaaaacagagggtgagacagaagtgaagaaagatgaggccggagaaaactattccaaggatcaaggtggtcggacattgtgtggtgtaatgaggattggcctggttgcaaaaggcttgctgattaaagatgatatggacttggagctggttttaatgtgcaaagacaaacccacagagaccctgttaaatacagtcaaagataatcttcctattcagattcagaaactcacagaagagaaatatcaagtggaacaatgtgtaaatgaggcatctattataattcggaatacaaaagagcccacgctaactttgaaggtgatacttacctcacctctaattagggacgaattggagaagaaggatggagaaaatgtttcgatgaaagatcctccggacttattggacaggcagaaatgcctgaacgccttggcgtctcttcgacatgccaaatggtttcaggcaagggcaaatggattaaaatcatgtgtaattgtcctccgcattctgcgtgatttgtgcaacagagtccccacatgggcaccattgaaaggatggccactagaacttatatgtgaaaagtctataggtacttgtaatagacctttgggcgctggggaggccttgagacgagtaatggagtgtttggcatctggaatactacttcctgggggtcctggtcttcatgatccttgtgagcgagacccaacagatgctctgagctatatgaccatccagcaaaaagaagatattacccacagtgcacagcatgcactcagactatcagcctttggtcagatttacaaagtgctggagatggacccccttccatctagtaagccttttcagaagtattcctggtcagttactgataaagaaggtgctgggtcttcagctctaaagaggccatttgaagatggattaggggatgataaagaccccaacaagaagatgaaacgaaacttaaggaaaattctggatagtaaagcaatagaccttatgaatgcactaatgaggctaaatcagatcaggcctgggcttcagtataagctcctatctcagtctggccccgttcatgccccagtcttcacaatgtctgtagatgtggatggcacaacatatgaagcctcaggaccatccaagaaaacagcaaaacttcacgtagcggtgaaggtattgcaggcaatgggatatccaacaggctttgatgcagatattgaatgtatgagttccgatgaaaaatcagataatgaaagtaaaaatgaaacagtgtcttcaaactcaagcaataatactggaaattctacaactgaaacctccagtaccttagaggtaagaactcagggccctatcctcacagcaagtggcaaaaaccctgtaatggagctcaatgaaaaaagaagaggtctcaagtatgaactcatctcagagactggtggaagccatgacaagcgctttgtaatggaggtagaagtagatggacagaaattcagaggcgcaggtccaaataagaaagtggcaaaggcgagtgcagctttagctgccttggagaaactgttttctggacccaatgcggcaaataataagaaaaagaagattatccctcaggcaaagggcgttgtgaatacagctgtgtctgcagcagtccaagctgttcggggcagaggaagaggaactctaacaaggggagcttttgttggggcgacagctgctcctggctacatagctccaggctatggaacaccatatggttacagcacagctgcccctgcctatggttaatacttttaagcagttttcagcacgtttatctcactttattctcgttctcctcggaccttcgtagccatatcacttgtataaaataggctgagatatagtgactgtaagctgtgatctcagtatacaaagaaccaacttcagcaagactcgggtggtgaatatcgagtctgcagagaccaaatagacttaaagcaatccatctgtcttttccaggttaggtagctagattatttatttcccaccttattcaaccatcatggagttcatgtaaagatgtgagggttaggcagacattttaataaagatttgcttcatttaggtgtgtcccataaatgcatttaattgtgttagatgttgtgtgctaaggctgtatttgatatatgtaga

SEQ ID NO: 296810 - DNA, 1171 bp, Homo sapiens
gtatgcggcaacgactctcttaattaccaccgctcaggcaaagggcgttgtgaatacagctgtgtctgcagcagtccaagctgttcggggcagaggaagaggaactctaacaaggggagcttttgttggggcgacagctgctcctggctacatagctccaggctatggaacaccatatggttacagcacagctgcccctgcctatggtttacccaagagaatggttctgttacccgttatgaaatttccaacatatcctgttccccactactcattcttttagcaaatgacagaagctaattcctattgaacaacaatacagtacaacacagaatgttagagaaaaagcctttttatcctgctttctttgaacacatacttgatcaaaattatttgtaaagaacatctttcctactttttgattttaacaaatgcaaatttagttctctaaaacttgaaaaaaaaaaaagaaaccagttctgtgaaaacggtacctcatttctggaaaataacttataccagcccttctgttctagggaaataaaagtctagcagttcaaagtttaagttttaagagacgtatcagattatgtaaaattaaatttgtgaaggatgtatagagtctcaaacactgatcacaaataaactgctttgttgtaacacagagtactgcctggttcctgatgcagtcactgattcttagttgattgatatgtatttgccccagggcactttaatttgggctgtagttattttttttaatacaatagagacttttcatttaactttaactttgtaaatattgaagtgtgtaataaagccaataaaatatgggtttgaatattgttttagcttattatttttgatatgttttggtatcaaattacaaggaattgaaaactaataacttagccctagaagcccattcacttgtaagcaaagtgctaaaacaaagcaaaggtgattgttagtttgagccagtctactcactttgtaagccctttgtactcctgttgtacaagggccatccccatgataaaggttccattctgttatttgagcattgcttattaaaatgatggcactacccagagatggggaaggagaatgtgattatcctagtttatgaatttccaagtttttaaaaataataaattaatcaatcaatcac

SEQ ID NO: 296811 - DNA, 2491 bp, Homo sapiens
gtcacgtgctcgctgccgccgctgccgccgccgaagcggagaccggagccgcgagcgccaccagggcagcagccgccgcagccgccgccgctgggcagaggagccggagacgcgagcgggcgaggtggcggcggcggcggagcgggagcgggtaccgggcgcgggcagagcgcggcggcgcggagacggggttttgccatgttgacctggctggtctcgaactcctgaacgcaagtgatccgcctgcctcagcctcccaaggtgctgggattacaggcacgagccactgtgcctggcctcaactgttgcttcttataaaggtgtgttccagagaacaagccttcagacatttgctatattgacgctgagctgtcaggggactcaggcttatgaggaggtattgttacacaaaacagtgtctagtgaagacgacaagaaagaggggaaaggatcggaaaaagaagctaaaatactatagaaaaccatgagatctattcgatcttttgctaatgatgatcgccatgttatggtgaaacattcaacaatctatccatctccggaggaacttgaagctgttcagaatatggtatctactgttgaatgtgctcttaaacatgtctcagattggttggatgaaacaaataaaggcacaaaaacagagggtgagacagaagtgaagaaagatgaggccggagaaaactattccaaggatcaaggtggtcggacattgtgtggtgtaatgaggattggcctggttgcaaaaggcttgctgattaaagatgatatggacttggagctggttttaatgtgcaaagacaaacccacagagaccctgttaaatacagtcaaagataatcttcctattcagattcagaaactcacagaagagaaatatcaagtggaacaatgtgtaaatgaggcatctattataattcggaatacaaaagagcccacgctaactttgaaggtgatacttacctcacctctaattagggacgaattggagaagaaggatggagaaaatgtttcgatgaaagatcctccggacttattggacaggcagaaatgcctgaacgccttggcgtctcttcgacatgccaaatggtttcaggcaagggcaaatggattaaaatcatgtgtaattgtcctccgcattctgcgtgatttgtgcaacagagtccccacatgggcaccattgaaaggatggccactagaacttatatgtgaaaagtctataggtacttgtaatagacctttgggcgctggggaggccttgagacgagtaatggagtgtttggcatctggaatactacttcctgggggtcctggtcttcatgatccttgtgagcgagacccaacagatgctctgagctatatgaccatccagcaaaaagaagatattacccacagtgcacagcatgcactcagactatcagcctttggtcagatttacaaagtgctggagatggacccccttccatctagtaagccttttcagaagtattcctggtcagttactgataaagaaggtgctgggtcttcagctctaaagaggccatttgaagatggattaggggatgataaagaccccaacaagaagatgaaacgaaacttaaggaaaattctggatagtaaagcaatagaccttatgaatgcactaatgaggctaaatcagatcaggcctgggcttcagtataagctcctatctcagtctggccccgttcatgccccagtcttcacaatgtctgtagatgtggatggcacaacatatgaagcctcaggaccatccaagaaaacagcaaaacttcacgtagcggtgaaggtattgcaggcaatgggatatccaacaggctttgatgcagatattgaatgtatgagttccgatgaaaaatcagataatgaaagtaaaaatgaaacagtgtcttcaaactcaagcaataatactggaaattctacaactgaaacctccagtaccttagaggtaagaactcagggccctatcctcacagcaagtggcaaaaaccctgtaatggagctcaatgaaaaaagaagaggtctcaagtatgaactcatctcagagactggtggaagccatgacaagcgctttgtaatggaggtagaagtagatggacagaaattcagaggcgcaggtccaaataagaaagtggcaaaggcgagtgcagctttagctgccttggagaaactgttttctggacccaatgcggcaaataataagaaaaagaagattatccctcaggtatgagtaaacattaaacctttgcagaacctgtgaaaaatgttagaggaattaaattttctttcctgtccatgtggcactttagctttttctgaagttgtttccttttcttggacttggtgacctttgctttgggttaggtcacgaataatataaatttgattagtggtttcatgttctatggactttctaaacaaaatatatatgtacatgtatatttatatttatatgtat

SEQ ID NO: 296812 - DNA, 454 bp, Homo sapiens
ctatcttattgttattaaagtttgtccaagtttcatttggaacacctgccacttaattggtttctgtgtactacataaaatgaggggtgctttctagctcatagtgtggttgttggagtaattgagttaatttagatatgtgcctagtatagcttctatagttcatgatgttttattataattctttttggcttagtattctgaatttcagatggttgcttataaaatcaaacatgactgagaaaagctaaaggttaaattaggtagttgcctggagtggggttgccatgagactacgaaattaattttaatattatggtccttttatttttaaaatgtacctttttaagccttaattttactacttgtgattaattgattttttttgtttgcctgataactgatgaataatttgctacttagtattcacttgaaagaacttgcccaaaatgaa

SEQ ID NO: 296813 - DNA, 336 bp, Homo sapiens
tttgataatttgataggaatcgcttggtcaaattgtatttgtctctctttatcccattttactgttagaaaatgtttcgatgaaagatcctccggacttattggacaggcagaaatgcctgaacgccttggcgtctcttcgacatgccaaatggtttcaggttggctttttcttactatcttattgttattaaagtttgtccaagtttcatttggaacacctgccacttaattggtttctgtgtactacataaaatgaggggtgctttctagctcatagtgtggttgttggagtaattgagttaatttagatatgtgcctagtatagcttctatag

SEQ ID NO: 296814 - DNA, 1963 bp, Homo sapiens
  misc_feature (82)..(82): n is a, c, g, or t
tgcttcttgacttccgcgcctagtgcgcagggccccattctccagtcccgcccacgcgcctttggaggctgcggtgggattngcttttgccttcggttggggctgctgtttctcttcgccgacggtgacagggctttccctatgttgcccaggttcgtctcaaactcctgggctcaaaagatcctcatcttctcaagtggttgaatatacacgctccagcgaccatgcctggctgaatgaagagctttgagattttgaagaaacaggaaccatgaaatttgctttgcaactgtttgcaacctttaaggaagactgaaaaggcattcctgaagcatgtgccttcagccgctacaagagcagaagcagtgggcattggatggagctgagtacaggaccatacaggctaattgcaccggcacaggaatcggatataacatcatctgggtacccatggccagctgtgacttctccatccgcacctacacctatgcagacacccctgatgatttccagttgcacaacttcagcctcccagaggaagataccaagctcaagatacccctgattcaccgagccctgcagttggcccagcgtcccgtttcactccttgccagcccctggacatcacccactcggctcaagaccaagggagcggggaatgggaaggggccactcaagggacagcccagagacatctaccaccagacctgggccagatacattgtgaagttcctggatgcctatgctgagcacaagttacagttctgggcagtgacagctgaaaatgagccttctgctgggctgttgagtggataccccttccagtgcctgggcttcacccctgaacatcagcgagacttcattgcccgtgacctaggtcctaccccttgccaacggtactcaccacaatgtccgcctactcatgctggatgaccaacgcttgctgctgccccactgggcaaaggtggtactgacagacccagaagcagctaaaggcctgtgtgggttccaagttctgggagcagagtgtgcggctaggctcctgggatcgagggatgcagtacagccacagcatcaatcacaaacctcctgtaccatgtggtcggctggaaccgactggaacccatcattgtagacatcaccaagcacacgttttacaaacagcccatgttctaccaccttggccacttcagcaagttcattcctgagggctcccagagagtggggctggttgccagtcagaagaacgacccggacgcagtggcactgatgcatcccgatggctctcctgttgtggtcgtcctaaaccgctcctctaaggatgtgcctcttaccatcaaggatcctgctgtgggcttcctggagacaatctcacctggctactccattcacacctacctgtgcgtcgccagtgatggagcagatactcaaggaggcactgggctcagcctgggcattaaagggacagagtcagctcacacgctgtctgtgactaaagagggcacaacagggccagcgtgagcttacagcgacgtaagcccaggggcaatggtttgggtgactcactttcccctctaggtggtgccaggggctggaggcccctagaaaaagatcagtaagccccagtgtccccccagcccccatgcttatgtgaacatgcgctgtgtgctgcttgctttggaaactgggcctgggtccaggcctagggtgagctcactgtccgtacaaacacaagatcagggctgagggtaaggaaaagaagagactaggaaagctgggcccaaaactggagactgtttgtctttcctggagatgcagaactgggcccgtggagcagcagtgtcagcatcagggcggaagccttaaagcagcagcgggtgtgcccaggcacccagatgattcctatggcaccagccaggaaaaatggcagctcttaaaggagaaaatgtttgagcccagtcag

SEQ ID NO: 296815 - DNA, 2071 bp, Homo sapiens
agaattacttgcaggagtaacctagtgcctatagctatggcaggtatcctgcatccttgttttttgtttagtggatcctctatccttcagagactctggaacccctgtgctcttctcctcatctagtgaccctgaggtgatggagttttcaagtccttccagagaggaatgtcccaagccttcgggtagggtaagcatcatggctggcagcctcacaggattgcttctacttcaggcagtgtcgtgggcatcagatgagtgccttcagccgctacaagagcagaagcagtgggcattggatggagctgagtacaggaccatacaggctaattgcaccggcacagtgaaataagatttcgccgcctatcatctgctaactgctacggactcaggctcagaaaggcctgcgcttcacccaggaatcggatataacatcatctgggtacccatggccagctgtgacttctccatccgcacctacacctatgcagacacccctgatgatttccagttgcacaacttcagcctcccagaggaagataccaagctcaagatacccctgattcaccgagccctgcagttggcccagcgtcccgtttcactccttgccagcccctggacatcacccactcggctcaagaccaagggagcggggaatgggaaggggccactcaagggacagcccagagacatctaccaccagacctgggccagatacattgtgaagttcctggatgcctatgctgagcacaagttacagttctgggcagtgacagctgaaaatgagccttctgctgggctgttgagtggataccccttccagtgcctgggcttcacccctgaacatcagcgagacttcattgcccgtgacctaggtcctaccccttgccaacggtactcaccacaatgtccgcctactcatgctggatgaccaacgcttgctgctgccccactgggcaaaggtggtactgacagacccagaagcagctaagtatgttcatggtattgctgtacattggtacctggactttctggctccagccaaagccaccctaagggagacacaccacctgttccccaacaccatgctctttgcctcagaggcctgtgtgggttccaagttctgggagcagagtgtgcggctaggctcctgggatcgagggatgcagtacagccacagcatcaatcacaaacctcctgtaccatgtggtcggctggaaccgactggaacccatcattgtagacatcaccaagcacacgttttacaaacagcccatgttctaccaccttggccacttcagcaagttcattcctgagggctcccagagagtggggctggttgccagtcagaagaacgacccggacgcagtggcactgatgcatcccgatggctctcctgttgtggtcgtcctaaaccgctcctctaaggatgtgcctcttaccatcaaggatcctgctgtgggcttcctggagacaatctcacctggctactccattcacacctacctgtgcgtcgccagtgatggagcagatactcaaggaggcactgggctcagcctgggcattaaagggacagagtcagctcacacgctgtctgtgactaaagagggcacaacagggccagcgtgagcttacagcgacgtaagcccaggggcaatggtttgggtgactcactttcccctctaggtggtgccaggggctggaggcccctagaaaaagatcagtaagccccagtgtccccccagcccccatgcttatgtgaacatgcgctgtgtgctgcttgctttggaaactgggcctgggtccaggcctagggtgagctcactgtccgtacaaacacaagatcagggctgagggtaaggaaaagaagagactaggaaagctgggcccaaaactggagactgtttgtctttcctggagatgcagaactgggcccgtggagcagcagtgtcagcatcagggcggaagccttaaagcagcagcgggtgtgcccaggcacccagatgattcctatggcaccagccaggaaaaatggcagctcttaaaggagaaaatgtttgagcccagtcag

SEQ ID NO: 296816 - DNA, 2030 bp, Homo sapiens
  misc_feature (82)..(82): n is a, c, g, or t
tgcttcttgacttccgcgcctagtgcgcagggccccattctccagtcccgcccacgcgcctttggaggctgcggtgggattngcttttgccttcggttggggctgctgtttctcttcgccgacgagactctggaacccctgtgctcttctcctcatctagtgaccctgaggtgatggagttttcaagtccttccagagaggaatgtcccaagccttcgggtagggtaagcatcatggctggcagcctcacaggattgcttctacttcaggcagtgtcgtgggcatcagatgagtgccttcagccgctacaagagcagaagcagtgggcattggatggagctgagtacaggaccatacaggctaattgcaccggcacaggaatcggatataacatcatctgggtacccatggccagctgtgacttctccatccgcacctacacctatgcagacacccctgatgatttccagttgcacaacttcagcctcccagaggaagataccaagctcaagatacccctgattcaccgagccctgcagttggcccagcgtcccgtttcactccttgccagcccctggacatcacccactcggctcaagaccaagggagcggggaatgggaaggggccactcaagggacagcccagagacatctaccaccagacctgggccagatacattgtgaagttcctggatgcctatgctgagcacaagttacagttctgggcagtgacagctgaaaatgagccttctgctgggctgttgagtggataccccttccagtgcctgggcttcacccctgaacatcagcgagacttcattgcccgtgacctaggtcctaccccttgccaacggtactcaccacaatgtccgcctactcatgctggatgaccaacgcttgctgctgccccactgggcaaaggtggtactgacagacccagaagcagctaagtatgttcatggtattgctgtacattggtacctggactttctggctccagccaaagccaccctaagggagacacaccacctgttccccaacaccatgctctttgcctcagaggcctgtgtgggttccaagttctgggagcagagtgtgcggctaggctcctgggatcgagggatgcagtacagccacagcatcaatcacaaacctcctgtaccatgtggtcggctggaaccgactggaacccatcattgtagacatcaccaagcacacgttttacaaacagcccatgttctaccaccttggccacttcagcaagttcattcctgagggctcccagagagtggggctggttgccagtcagaagaacgacccggacgcagtggcactgatgcatcccgatggctctcctgttgtggtcgtcctaaaccgctcctctaaggatgtgcctcttaccatcaaggatcctgctgtgggcttcctggagacaatctcacctggctactccattcacacctacctgtgcgtcgccagtgatggagcagatactcaaggaggcactgggctcagcctgggcattaaagggacagagtcagctcacacgctgtctgtgactaaagagggcacaacagggccagcgtgagcttacagcgacgtaagcccaggggcaatggtttgggtgactcactttcccctctaggtggtgccaggggctggaggcccctagaaaaagatcagtaagccccagtgtccccccagcccccatgcttatgtgaacatgcgctgtgtgctgcttgctttggaaactgggcctgggtccaggcctagggtgagctcactgtccgtacaaacacaagatcagggctgagggtaaggaaaagaagagactaggaaagctgggcccaaaactggagactgtttgtctttcctggagatgcagaactgggcccgtggagcagcagtgtcagcatcagggcggaagccttaaagcagcagcgggtgtgcccaggcacccagatgattcctatggcaccagccaggaaaaatggcagctcttaaaggagaaaatgtttgagcccagtcag

SEQ ID NO: 296817 - DNA, 1996 bp, Homo sapiens
agaattacttgcaggagtaacctagtgcctatagctatggcaggtatcctgcatccttgttttttgtttagtggatcctctatccttcagagactctggaacccctgtgctcttctcctcatctagtgaccctgaggtgatggagttttcaagtccttccagagaggaatgtcccaagccttcgggtagggtaagcatcatggctggcagcctcacaggattgcttctacttcaggcagtgtcgtgggcatcagatgagtgccttcagccgctacaagagcagaagcagtgggcattggatggagctgagtacaggaccatacaggctaattgcaccggcacaggaatcggatataacatcatctgggtacccatggccagctgtgacttctccatccgcacctacacctatgcagacacccctgatgatttccagttgcacaacttcagcctcccagaggaagataccaagctcaagatacccctgattcaccgagccctgcagttggcccagcgtcccgtttcactccttgccagcccctggacatcacccactcggctcaagaccaagggagcggggaatgggaaggggccactcaagggacagcccagagacatctaccaccagacctgggccagatacattgtgaagttcctggatgcctatgctgagcacaagttacagttctgggcagtgacagctgaaaatgagccttctgctgggctgttgagtggataccccttccagtgcctgggcttcacccctgaacatcagcgagacttcattgcccgtgacctaggtcctaccccttgccaacggtactcaccacaatgtccgcctactcatgctggatgaccaacgcttgctgctgccccactgggcaaaggtggtactgacagacccagaagcagctaagtatgttcatggtattgctgtacattggtacctggactttctggctccagccaaagccaccctaagggagacacaccacctgttccccaacaccatgctctttgcctcagaggcctgtgtgggttccaagttctgggagcagagtgtgcggctaggctcctgggatcgagggatgcagtacagccacagcatcaatcacaaacctcctgtaccatgtggtcggctggaaccgactggaacccatcattgtagacatcaccaagcacacgttttacaaacagcccatgttctaccaccttggccacttcagcaagttcattcctgagggctcccagagagtggggctggttgccagtcagaagaacgacccggacgcagtggcactgatgcatcccgatggctctcctgttgtggtcgtcctaaaccgctcctctaaggatgtgcctcttaccatcaaggatcctgctgtgggcttcctggagacaatctcacctggctactccattcacacctacctgtgcgtcgccagtgatggagcagatactcaaggaggcactgggctcagcctgggcattaaagggacagagtcagctcacacgctgtctgtgactaaagagggcacaacagggccagcgtgagcttacagcgacgtaagcccaggggcaatggtttgggtgactcactttcccctctaggtggtgccaggggctggaggcccctagaaaaagatcagtaagccccagtgtccccccagcccccatgcttatgtgaacatgcgctgtgtgctgcttgctttggaaactgggcctgggtccaggcctagggtgagctcactgtccgtacaaacacaagatcagggctgagggtaaggaaaagaagagactaggaaagctgggcccaaaactggagactgtttgtctttcctggagatgcagaactgggcccgtggagcagcagtgtcagcatcagggcggaagccttaaagcagcagcgggtgtgcccaggcacccagatgattcctatggcaccagccaggaaaaatggcagctcttaaaggagaaaatgtttgagcccagtcag

SEQ ID NO: 296818 - DNA, 1937 bp, Homo sapiens
gaggatttttgaaaccgtcttcagtctctccaaacagctgtgtccgttctccacatccttgtcagacctcacctctgcttgtgctccctccctcccaggtggtgcccctgcatccctaaaagcttcagtacagctcggtggtctgtgtctgcaatgccacatactgtgactcttgaccccccgacctttcctgccctaggtgccttcagccgctacaagagcagaagcagtgggcattggatggagctgagtacaggaccatacaggctaattgcaccggcacaggaatcggatataacatcatctgggtacccatggccagctgtgacttctccatccgcacctacacctatgcagacacccctgatgatttccagttgcacaacttcagcctcccagaggaagataccaagctcaagatacccctgattcaccgagccctgcagttggcccagcgtcccgtttcactccttgccagcccctggacatcacccactcggctcaagaccaagggagcggggaatgggaaggggccactcaagggacagcccagagacatctaccaccagacctgggccagatacattgtgaagttcctggatgcctatgctgagcacaagttacagttctgggcagtgacagctgaaaatgagccttctgctgggctgttgagtggataccccttccagtgcctgggcttcacccctgaacatcagcgagacttcattgcccgtgacctaggtcctaccccttgccaacggtactcaccacaatgtccgcctactcatgctggatgaccaacgcttgctgctgccccactgggcaaaggtggtactgacagacccagaagcagctaagtatgttcatggtattgctgtacattggtacctggactttctggctccagccaaagccaccctaagggagacacaccacctgttccccaacaccatgctctttgcctcagaggcctgtgtgggttccaagttctgggagcagagtgtgcggctaggctcctgggatcgagggatgcagtacagccacagcatcaatcacaaacctcctgtaccatgtggtcggctggaaccgactggaacccatcattgtagacatcaccaagcacacgttttacaaacagcccatgttctaccaccttggccacttcagcaagttcattcctgagggctcccagagagtggggctggttgccagtcagaagaacgacccggacgcagtggcactgatgcatcccgatggctctcctgttgtggtcgtcctaaaccgctcctctaaggatgtgcctcttaccatcaaggatcctgctgtgggcttcctggagacaatctcacctggctactccattcacacctacctgtgcgtcgccagtgatggagcagatactcaaggaggcactgggctcagcctgggcattaaagggacagagtcagctcacacgctgtctgtgactaaagagggcacaacagggccagcgtgagcttacagcgacgtaagcccaggggcaatggtttgggtgactcactttcccctctaggtggtgccaggggctggaggcccctagaaaaagatcagtaagccccagtgtccccccagcccccatgcttatgtgaacatgcgctgtgtgctgcttgctttggaaactgggcctgggtccaggcctagggtgagctcactgtccgtacaaacacaagatcagggctgagggtaaggaaaagaagagactaggaaagctgggcccaaaactggagactgtttgtctttcctggagatgcagaactgggcccgtggagcagcagtgtcagcatcagggcggaagccttaaagcagcagcgggtgtgcccaggcacccagatgattcctatggcaccagccaggaaaaatggcagctcttaaaggagaaaatgtttgagcccagtcag

SEQ ID NO: 296819 - DNA, 2149 bp, Homo sapiens
  misc_feature (82)..(82): n is a, c, g, or t
tgcttcttgacttccgcgcctagtgcgcagggccccattctccagtcccgcccacgcgcctttggaggctgcggtgggattngcttttgccttcggttggggctgctgtttctcttcgccgacggtgacagggctttccctatgttgcccaggttcgtctcaaactcctgggctcaaaagatcctcatcttctcaagtggttgaatatacacgctccagcgaccatgcctggctgaatgaagagctttgagattttgaagaaacaggaaccatgaaatttgctttgcaactgtttgcaacctttaaggaagactgaaaaggcattcctgaagcatagactctggaacccctgtgctcttctcctcatctagtgaccctgaggtgatggagttttcaagtccttccagagaggtgccttcagccgctacaagagcagaagcagtgggcattggatggagctgagtacaggaccatacaggctaattgcaccggcacaggaatcggatataacatcatctgggtacccatggccagctgtgacttctccatccgcacctacacctatgcagacacccctgatgatttccagttgcacaacttcagcctcccagaggaagataccaagctcaagatacccctgattcaccgagccctgcagttggcccagcgtcccgtttcactccttgccagcccctggacatcacccactcggctcaagaccaagggagcggggaatgggaaggggccactcaagggacagcccagagacatctaccaccagacctgggccagatacattgtgaagttcctggatgcctatgctgagcacaagttacagttctgggcagtgacagctgaaaatgagccttctgctgggctgttgagtggataccccttccagtgcctgggcttcacccctgaacatcagcgagacttcattgcccgtgacctaggtcctaccccttgccaacggtactcaccacaatgtccgcctactcatgctggatgaccaacgcttgctgctgccccactgggcaaaggtggtactgacagacccagaagcagctaagtatgttcatggtattgctgtacattggtacctggactttctggctccagccaaagccaccctaagggagacacaccacctgttccccaacaccatgctctttgcctcagaggcctgtgtgggttccaagttctgggagcagagtgtgcggctaggctcctgggatcgagggatgcagtacagccacagcatcaatcacaaacctcctgtaccatgtggtcggctggaaccgactggaacccatcattgtagacatcaccaagcacacgttttacaaacagcccatgttctaccaccttggccacttcagcaagttcattcctgagggctcccagagagtggggctggttgccagtcagaagaacgacccggacgcagtggcactgatgcatcccgatggctctcctgttgtggtcgtcctaaaccgctcctctaaggatgtgcctcttaccatcaaggatcctgctgtgggcttcctggagacaatctcacctggctactccattcacacctacctgtgcgtcgccagtgatggagcagatactcaaggaggcactgggctcagcctgggcattaaagggacagagtcagctcacacgctgtctgtgactaaagagggcacaacagggccagcgtgagcttacagcgacgtaagcccaggggcaatggtttgggtgactcactttcccctctaggtggtgccaggggctggaggcccctagaaaaagatcagtaagccccagtgtccccccagcccccatgcttatgtgaacatgcgctgtgtgctgcttgctttggaaactgggcctgggtccaggcctagggtgagctcactgtccgtacaaacacaagatcagggctgagggtaaggaaaagaagagactaggaaagctgggcccaaaactggagactgtttgtctttcctggagatgcagaactgggcccgtggagcagcagtgtcagcatcagggcggaagccttaaagcagcagcgggtgtgcccaggcacccagatgattcctatggcaccagccaggaaaaatggcagctcttaaaggagaaaatgtttgagcccagtcag

SEQ ID NO: 296820 - DNA, 1176 bp, Homo sapiens
  misc_feature (82)..(82): n is a, c, g, or t
tgcttcttgacttccgcgcctagtgcgcagggccccattctccagtcccgcccacgcgcctttggaggctgcggtgggattngcttttgccttcggttggggctgctgtttctcttcgccgacgagactctggaacccctgtgctcttctcctcatctagtgaccctgaggtgatggagttttcaagtccttccagagaggaatgtcccaagccttcgggtagggtaagcatcatggctggcagcctcacaggattgcttctacttcaggcagtgtcgtgggcatcagatgagtgccttcagccgctacaagagcagaagcagtgggcattggatggagctgagtacaggaccatacaggctaattgcaccggcacaggaatcggatataacatcatctgggtacccatggccagctgtgacttctccatccgcacctacacctatgcagacacccctgatgatttccagttgcacaacttcagcctcccagaggaagataccaagctcaagatacccctgattcaccgagccctgcagttggcccagcgtcccgtttcactccttgccagcccctggacatcacccactcggctcaagaccaagggagcggggaatgggaaggggccactcaagggacagcccagagacatctaccaccagacctgggccagatacattgtgaagttcctggatgcctatgctgagcacaagttacagttctgggcagtgacagctgaaaatgagccttctgctgggctgttgagtggataccccttccagtgcctgggcttcacccctgaacatcagcgagacttcattgcccgtgacctaggtcctaccccttgccaacggtactcaccacaatgtccgcctactcatgctggatgaccaacgcttgctgctgccccactgggcaaaggtggtactgacagacccagaagcagctaagtatgttcatggtattgctgtacattggtacctggactttctggctccagccaaagccaccctaagggagacacaccacctgttccccaacaccatgctctttgcctcagaggcctgtgtgggttccaagttctgggagcagagtgtgcggctaggctcctgggatcgagggatgcagtacagccacagcatcaatcacagtaagccaccccagtctcccttcctg

SEQ ID NO: 296821 - DNA, 1296 bp, Homo sapiens
  misc_feature (82)..(82): n is a, c, g, or t
tgcttcttgacttccgcgcctagtgcgcagggccccattctccagtcccgcccacgcgcctttggaggctgcggtgggattngcttttgccttcggttggggctgctgtttctcttcgccgacggtgacagggctttccctatgttgcccaggttcgtctcaaactcctgggctcaaaagatcctcatcttctcaagtggttgaatatacacgctccagcgaccatgcctggctgaatgaagagctttgagattttgaagaaacaggaaccatgaaatttgctttgcaactgtttgcaacctttaaggaagactgaaaaggcattcctgaagcatgtgccttcagccgctacaagagcagaagcagtgggcattggatggagctgagtacaggaccatacaggctaattgcaccggcacaggaatcggatataacatcatctgggtacccatggccagctgtgacttctccatccgcacctacacctatgcagacacccctgatgatttccagttgcacaacttcagcctcccagaggaagataccaagctcaagatacccctgattcaccgagccctgcagttggcccagcgtcccgtttcactccttgccagcccctggacatcacccactcggctcaagaccaagggagcggggaatgggaaggggccactcaagggacagcccagagacatctaccaccagacctgggccagatacattgtgaagttcctggatgcctatgctgagcacaagttacagttctgggcagtgacagctgaaaatgagccttctgctgggctgttgagtggataccccttccagtgcctgggcttcacccctgaacatcagcgagacttcattgcccgtgacctaggtcctaccccttgccaacggtactcaccacaatgtccgcctactcatgtggaggcccctagaaaaagatcagtaagccccagtgtccccccagcccccatgcttatgtgaacatgcgctgtgtgctgcttgctttggaaactgggcctgggtccaggcctagggtgagctcactgtccgtacaaacacaagatcagggctgagggtaaggaaaagaagagactaggaaagctgggcccaaaactggagactgtttgtctttcctggagatgcagaactgggcccgtggagcagcagtgtcagcatcagggcggaagccttaaagcagcagcgggtgtgcccaggcacccagatgattcctatggcaccagccaggaaaaatggcagctcttaaaggagaaaatgtttgagcccagtcag

SEQ ID NO: 296822 - DNA, 962 bp, Homo sapiens
  misc_feature (82)..(82): n is a, c, g, or t
tgcttcttgacttccgcgcctagtgcgcagggccccattctccagtcccgcccacgcgcctttggaggctgcggtgggattngcttttgccttcggttggggctgctgtttctcttcgccgacggtgacagggctttccctatgttgcccaggttcgtctcaaactcctgggctcaaaagatcctcatcttctcaagtggttgaatatacacgctccagcgaccatgcctggctgaatgaagagctttgagattttgaagaaacaggaaccatgaaatttgctttgcaactgtttgcaacctttaaggaagactgaaaaggcattcctgaagcatgtgccttcagccgctacaagagcagaagcagtgggcattggatggagctgagtacaggaccatacaggctaattgcaccggcacaggaatcggatataacatcatctgggtacccatggccagctgtgacttctccatccgcacctacacctatgcagacacccctgatgatttccagttgcacaacttcagcctcccagaggaagataccaagctcaagatacccctgattcaccgagccctgcagttggcccagcgtcccgtttcactccttgccagcccctggacatcacccactcggctcaagaccaagggagcggggaatgggaaggggccactcaagggacagcccagagacatctaccaccagacctgggccagatacattgtgaagttcctggatgcctatgctgagcacaagttacagttctgggcagtgacagctgaaaatgagccttctgctgggctgttgagtggataccccttccagtgcctgggcttcacccctgaacatcaggcggaagccttaaagcagcagcgggtgtgcccaggcacccagatgattcctatggcaccagccaggaaaaatggcagctcttaaaggagaaaatgtttgagcccagtcag

SEQ ID NO: 296823 - DNA, 1158 bp, Homo sapiens
  misc_feature (82)..(82): n is a, c, g, or t
tgcttcttgacttccgcgcctagtgcgcagggccccattctccagtcccgcccacgcgcctttggaggctgcggtgggattngcttttgccttcggttggggctgctgtttctcttcgccgacggtgacagggctttccctatgttgcccaggttcgtctcaaactcctgggctcaaaagatcctcatcttctcaagtggttgaatatacacgctccagcgaccatgcctggctgaatgaagagctttgagattttgaagaaacaggaaccatgaaatttgctttgcaactgtttgcaacctttaaggaagactgaaaaggcattcctgaagcatgtgccttcagccgctacaagagcagaagcagtgggcattggatggagctgagtacaggaccatacaggctaattgcaccggcacaggaatcggatataacatcatctgggtacccatggccagctgtgacttctccatccgcacctacacctatgcagacacccctgatgatttccagttgcacaacttcagcctcccagaggaagataccaagctcaagatacccctgattcaccgagccctgcagttggcccagcgtcccgtttcactccttgccagcccctggacatcacccactcggctcaagaccaagggagcggggaatgggaaggggccactcaagggacagcccagagacatctaccaccagggccagcgtgagcttacagcgacgtaagcccaggggcaatggtttgggtgactcactttcccctctaggtggtgccaggggctggaggcccctagaaaaagatcagtaagccccagtgtccccccagcccccatgcttatgtgaacatgcgctgtgtgctgcttgctttggaaactgggcctgggtccaggcctagggtgagctcactgtccgtacaaacacaagatcagggctgagggtaaggaaaagaagagactaggaaagctgggcccaaaactggagactgtttgtctttcctggagatgcagaactgggcccgtggagcagcagtgtcagcatcagggcggaagccttaaagcagcagcgggtgtgcccaggcacccagatgattcctatggcaccagccaggaaaaatggcagctcttaaaggagaaaatgtttgagcccagtcag

SEQ ID NO: 296824 - DNA, 313 bp, Homo sapiens
actgctacggactcaggctcagaaaggcctgcgcttcacccaggtgccagcctccacaggttccaacccaggagcccaagttccttttggccctgactcagacactattaggactggcaagtgataagcagagtcccatactctcctattgactcggactaccatatcttgatcatccttttctgtaggaatcggatataacatcatctgggtacccatggccagctgtgacttctccatccgcacctacacctatgcagacacccctgatgatttccagttgcacaacttcagcctcccagaggaagatacc

SEQ ID NO: 296825 - DNA, 1363 bp, Homo sapiens
ggttgtactggggagtcacagtgacagaaactgttttgtcagtttagcttatactctttaaattattaaaaaatataaacaagtctaccaaacaagtctgtccttcatgaaatatttagggaatatgtttcttatgctttgcaaaatgtatctcttacaataacctttaaacacccaatgtaagaagttttatttttcattaaaatgtaatctatttaggaccaggagctgcattatctattctagacaaatttcttgaagaatcctccaaactgcagtctgattcacaagaacccattttgactacacaaacttgggatccaagtataagccaaaaaccatctaacacatttatcaaggagataccaacaaagaaagaagcatcaaaatgtcaagattcatcagctcttctgcatcccggccttcattatggtgtttctcaaactaccaccatcttcatggagaccatacatttcttgatgaaagtcaaggctgtgcagtatgtgcacagagtgcttgcacatgagctgttatgccctcaaggaggccccagctgtgaatattacttggtgctggcccaaacacacattcttaagaagaactttgccaaggcagaggaataccttcaacaagcagcccagatggactacctgaaccccaatgtctggggcctgaagggccatctctattttctgagtggaaatcattctgaggccaaggcatgctatgaacgaaccattagctttgtagtggatgcttctgagatgcacttcatcttcctgagactggggctcatctatctggaagagaaagagtatgaaaaggcaaagaaaacctatatgcaagcctgtaagagatcaccttcatgccttacctggctaggactgggaatcgcctgctatcggctggaggagctcacagaggctgaggatgctctttctgaagccaatgcattgaacaactacaatgctgaagtatgggcatatctggctctggtctgcctgaaagttggacggcaattagaagctgagcaggcctacaagtacatgatcaagctgaaattgaaagatgaggctctgcttgcagagatccacacactacaggaaacagttggctttggaaatccatctttctgatacccctccagctgaacaattttctgcatgggactctgagttcctttccttcccagagagttttaccgtatgaagcctggagctggagaacgaaagaatcttcactataaacagagacccattcatttatttccattggctgtgttactggatgttttactggttgacgagaaactgggtcacaataaaaaaatggagatatgaaactcaaaattcatcagcatggt

SEQ ID NO: 296826 - DNA, 1245 bp, Homo sapiens
tggctgtcctgttggagaactatgagcaagcagaaattttctttgaggatgctacttgcttggaaccaactaatgttgtagcctggactttacttggtttgtactatgaaattcaaaacaatgatattcgaatggaaatggcatttcatgaggcctccaaacagcttcaggcacggatgcttcaggcacaagaccaggagctgcattatctattctagacaaatttcttgaagaatcctccaaactgcagtctgattcacaagaacccattttgactacacaaacttgggatccaagtataagccaaaaaccatctaacacatttatcaaggagataccaacaaagaaagaagcatcaaaatgtcaagattcatcagctcttctgcatcccggccttcattatggtgtttctcaaactaccaccatcttcatggagaccatacatttcttgatgaaagtcaaggctgtgcagtatgtgcacagagtgcttgcacatgagctgttatgccctcaaggaggccccagctgtgaatattacttggtgctggcccaaacacacattcttaagaagaactttgccaaggcagaggaataccttcaacaagcagcccagatggactacctgaaccccaatgtctggggcctgaagggccatctctattttctgagtggaaatcattctgaggccaaggcatgctatgaacgaaccattagctttgtagtggatgcttctgagatgcacttcatcttcctgagactggggctcatctatctggaagagaaagagctggaggagctcacagaggctgaggatgctctttctgaagccaatgcattgaacaactacaatgctgaagtatgggcatatctggctctggtctgcctgaaagttggacggcaattagaagctgagcaggcctacaagtacatgatcaagctgaaattgaaagatgaggctctgcttgcagagatccacacactacaggaaacagttggctttggaaatccatctttctgatacccctccagctgaacaattttctgcatgggactctgagttcctttccttcccagagagttttaccgtatgaagcctggagctggagaacgaaagaatcttcactataaacagagacccattcatttatttccattggctgtgttactggatgttttactggttgacgagaaactgggtcacaataaaaaaatggagatatgaaactcaaaattcatcagcatggt

SEQ ID NO: 296827 - DNA, 1370 bp, Homo sapiens
ggttgtactggggagtcacagtgacagaaactgttttgtcagtttagcttatactctttaaattattaaaaaatataaacaagtctaccaaacaagtctgtccttcatgaaatatttagggaatatgtttcttatgctttgcaaaatgtatctcttacaataacctttaaacacccaatgtaagaagttttatttttcattaaaatgtaatctatttaggaccaggagctgcattatctattctagacaaatttcttgaagaatcctccaaactgcagtctgattcacaagaacccattttgactacacaaacttgggatccaagtataagccaaaaaccatctaacacatttatcaaggagataccaacaaagaaagaagcatcaaaatgtcaagattcatcagctcttctgcatcccggccttcattatggtgtttctcaaactaccaccatcttcatggagaccatacatttcttgatgaaagtcaaggctgtgcagtatgtgcacagagtgcttgcacatgagctgttatgccctcaaggaggccccagctgtgaatattacttggtgctggcccaaacacacattcttaagaagaactttgccaaggcagaggaataccttcaacaagcagcccagatggactacctgaaccccaatgtctggggcctgaagggccatctctattttctgagtggaaatcattctgaggccaaggcatgctatgaacgaaccattagctttgtagtggatgcttctgagatgcacttcatcttcctgagactggggctcatctatctggaagagaaagagtatgaaaaggcaaagaaaacctatatgcaagcctgtaagagatcaccttcatgccttacctggctaggactgggaatcgcctgctatcggctggaggagctcacagaggctgaggatgctctttctgaagccaatgcattgaacaactacaatgctgaagtatgggcatatctggctctggtctgcctgaaagttggacggcaattagaagctgagcaggcctacaagtacatgatcaagctgaaattgaaagatgaggctctgcttgcagagatccacacactacaggaaacagttggctttggaaatccatctttctgatacccctccagctgaacaattttcgcgaagggatatggtaatcccttccccccccaaaaaatccccccgaaaaacaccgggaagggaaaattttttattaacccccaaaaaaaaacaaccccctaccattcatttatttccattggctgtgttactggatgttttactggttgacgagaaactgggtcacaataaaaaaatggagatatgaaactcaaaattcatcagcatggt

SEQ ID NO: 296828 - DNA, 779 bp, Homo sapiens
  misc_feature (779)..(779): n is a, c, g, or t
ggttgtactggggagtcacagtgacagaaactgttttgtcagtttagcttatactctttaaattattaaaaaatataaacaagtctaccaaacaagtctgtccttcatgaaatatttagggaatatgtttcttatgctttgcaaaatgtatctcttacaataacctttaaacacccaatgtaagaagttttatttttcattaaaatgtaatctatttaggaccaggagctgcattatctattctagacaaatttcttgaagaatcctccaaactgcagtctgattcacaagaacccattttgactacacaaacttgggatccaagtataagccaaaaaccatctaacacatttatcaaggagataccaacaaagaaagaagcatcaaaatgtcaagattcatcagctcttctgcatcccggccttcattatggtgtttctcaaactaccaccatcttcatggagaccatacatttcttgatgaaagtcaaggctgtgcagtatgtgcacagagtgcttgcacatgagctgttatgccctcaaggaggccccagctgtgaatattacttggtgctggcccaaacacacattcttaagaagaactttgccaaggcagaggaataccttcaacaagcagcccagatggactacctgaaccccaatgtctggggcctgaagggccatctctattttctgagtggaaatcattctgaggccaaggcatgctatgaacgaaccattagctttgtagtggatgcacaacccgaagggatcctctan

SEQ ID NO: 296829 - DNA, 654 bp, Homo sapiens
tggctgtcctgttggagaactatgagcaagcagaaattttctttgaggatgctacttgcttggaaccaactaatgttgtagcctggactttacttggtttgtactatgaaattcaaaacaatgatattcgaatggaaatggcatttcatgaggcctccaaacagcttcaggcacggatgcttcaggcacaagaccaggagctgcattatctattctagacaaatttcttgaagaatcctccaaactgcagtctgattcacaagaacccattttgactacacaaacttgggatccaagtataagccaaaaaccatctaacacatttatcaaggagataccaacaaagaaaggtaactagaaataaagatttccacttggaagaggggcataagctagacaaggatgaagactcttacgatgatgaaatggcaatcctgacttgtttgaagttgataaccaggctctgaaatccaaactcaatggtgtaactctctcagtaagcaaggattttatatttagccaccgcgcccggcctcactcctagatcttaacccaactgaaacaaacgtatccttgcaagatctgtatgtaaatgtttaaataaaagatttatttatttttttaataacttaaaatagggatcttactgatatt

SEQ ID NO: 296830 - DNA, 462 bp, Homo sapiens
tcattctgtaatacatttcgtattatttattatcagagacagaatccttcaaccgaaaaagacgcaatgcagccatttatatgttgcttataatctgattatccttgcagtatgtgcacagagtgcttgcacatgagctgttatgccctcaaggaggccccagctgtgaatattacttggtgctggcccaaacacacattcttaagaagaactttgccaaggcagaggaataccttcaacaagcagcccagatggactacctggtaatgacttttgctaaagcctcttgagtctggagaaggggctttatttaaaggtggtgatgccatatcacacgtagatttctggtgaacagaagggtggtcatcagctgtcagtaaactcatctctctatacccttccatttgcttttcttaagtaatcatgagttggctgggcgcggtggctcacaactgtaatcgc

SEQ ID NO: 296831 - DNA, 289 bp, Homo sapiens
gtcactatagttttgcctattcttgaattacatagaaaagaaatgagtcagtatatagtctttgctgttgctcttacactttgcataatgcccttaagatgaattcatctgttgtttcttgtatcagtagtttgtttctttctatttattcatttaccagttgatggaccacttgggttgttcatgctctttgattatcataggtatttgccccaagagaaatgaaatatatgttaaggcaaaaattgttgcccaaatattcttagcaactttatccatgatgtcgacg

SEQ ID NO: 296832 - DNA, 440 bp, Homo sapiens
tatgaacctaccctcagcatgtgaagttggttatttagttattttgaaaattcaaatctgtatgctttagatatctcagatgtgatctaagctgtttctgttatttttattttttaattttatgatttttactgtctccaggtgtttctattcttttaacaacagagaaaaacaaaatcctttaccagtgggtacagtggttctcagttgggaggaggttgactttcccccacagaaaacatttggtaatgtctggagatgtttttggttgtcgcagctaggggagtgctactggcatctagtgggtggaggccagggattctgctaaatgttctgcaatgcacaagagtgtcccctgtaacaaaacattatccagccgagtgtcagtagtgctgaggttgagaaactgttcagtaggaggaagatcacaaaaaaaaaaa

SEQ ID NO: 296833 - DNA, 3512 bp, Homo sapiens
atttgaagtcctcgttccacgccttctcatcatcctgaacaccgagctctgggactccggcggagaatctaaacgtaaagcatcacccacggtcgtgaactgtaggctctcctggcatccgggatcttattctggccttggcggagttggggatggtgtcgcctagcagccgctgccgctttggcttgctcgggaccatttggctggacccagagtccgcgtggaaccgcgatagggatctgtcagggcccgcggccgggtccagcttggtggttgcggtagtgagaggcctccgctggttgccaggcttggtctagaggtggagcacagtgaaagaattcaagatgccacctaatataaactggaaagaaataatgaaagttgacccagatgacctgccccgtcaagaagaactggcagataatttattgatttccttatccaaggtggaagtaaatgagctaaaaagtgaaaagcaagaaaatgtgatacaccttttcagaattactcagtcactaatgaagatgaaagctcaagaagtggagctggctttggaagaagtagaaaaagctggagaagaacaagcaaaatttgaaaatcaattaaaaactaaagtaatgaaactggaaaatgaactggagatggctcagcagtctgcaggtggacgagatactcggtttttacgtaatgaaatttgccaacttgaaaaacaattagaacaaaaagatagagaattggaggacatggaaaaggagttggagaaagagaagaaagttaatgagcaattggctcttcgaaatgaggaggcagaaaatgaaaacagcaaattaagaagagagaacaaacgtctaaagaaaaagaatgaacaactttgtcaggatattattgactaccagaaacaaatagattcacagaaagaaacacttttatcaagaagaggggaagacagtgactaccgatcacagttgtctaaaaaaaactatgagcttatccaatatcttgatgaaattcagactttaacagaagctaatgagaaaattgaagttcagaatcaagaaatgagaaaaaatttagaagagtctgtacaggaaatggagaagatgactgatgaatataatagaatgaaagctattgtgcatcagacagataatgtaatagatcagttaaaaaaagaaaacgatcattatcaacttcaagtgcaggagcttacagatcttctgaaatcaaaaaatgaagaagatgatccaattatggtagctgtcaatgcaaaagtagaagaatggaagctaattttgtcttctaaagatgatgaaattattgagtatcagcaaatgttacataacctaagggagaaacttaagaatgctcagcttgatgctgataaaagtaatgttatggctctacagcagggtatacaggaacgagacagtcaaattaagatgctcaccgaacaagtagaacaatatacaaaagaaatggaaaagaatacttgtattattgaagatttgaaaaatgagctccaaagaaacaaaggtgcttcaaccctttctcaacagactcatatgaaaattcagtcaacgttagacattttaaaagagaaaactaaagaggctgagagaacagctgaactggctgaggctgatgctagggaaaaggataaagaattagttgaggctctgaagaggttaaaagattatgaatcgggagtatatggtttagaagatgctgtcgttgaaataaagaattgtaaaaaccaaattaaaataagagatcgagagattgaaatattaacaaaggaaatcaataaacttgaattgaagatcagtgatttccttgatgaaaatgaggcacttagagagcgtgtgggccttgaaccaaagacaatgattgatttaactgaatttagaaatagcaaacacttaaaacagcagcagtacagagctgaaaaccagattcttttgaaagagattgaaagtctagaggaagaacgacttgatctgaaaaaaaaaaattcgtcaaatggctcaagaaagaggaaaaagaagtgcaacttcaggattaaccactgaggacctgaacctaactgaaaacatttctcaaggagatagaataagtgaaagaaaattggatttattgagcctcaaaaatatgagtgaagcacaatcaaagaatgaatttctttcaagagaactaattgaaaaagaaagagatttagaaaggagtaggacagtgatagccaaatttcagaataaattaaaagaattagttgaagaaaataagcaacttgaagaaggtatgaaagaaatattgcaagcaattaaggaaatgcagaaagatcctgatgttaaaggaggagaaacatctctaattatccctagccttgaaagactagttaatgctatagaatcaaagaatgcagaaggaatctttgatgcgagtctgcatttgaaagcccaagttgatcagcttaccggaagaaatgaagaattaagacaggagctcagggaatctcggaaagaggctataaattattcacagcagttggcaaaagctaatttaaagatagaccatcttgaaaaagaaactagtcttttacgacaatcagaaggatcgaatgttgtttttaaaggaattgacttacctgatgggatagcaccatctagtgccagtatcattaattctcagaatgaatatttaatacatttgttacaggaactagaaaataaagaaaaaaagttaaagaatttagaagattctcttgaagattacaacagaaaatttgctgtaattcgtcatcaacaaagtttgttgtataaagaatacctaagtgaaaaggagacctggaaaacagaatctaaaacaataaaagaggaaaagagaaaacttgaggatcaagtccaacaagatgctataaaagtaaaagaatataataatttgctcaatgctcttcagatggattcggatgaaatgaaaaaaatacttgcagaaaatagtaggaaaattactgttttgcaagtgaatgaaaaatcacttataaggcaatatacaaccttagtagaattggagcgacaacttagaaaagaaaatgagaagcaaaagaatgaattgttgtcaatggaggctgaagtttgtgaaaaaattgggtgtttgcaaagatttaaggaaatggccattttcaagattgcagctctccaaaaagttgtagataatagtgtttctttgtctgaactagaactggctaataaacagtacaatgaactgactgctaagtacagggacatcttgcaaaaagataatatgcttgttcaaagaacaagtaacttggaacacctggagtgtgaaaacatctccttaaaagaacaagtggagtctataaataaagaactggagattaccaaggaaaaacttcacactattgaacaagcctgggaacaggaaactaaattaggtaatgaatctagcatggataaggcaaagaaatcaataaccaacagtgacattgtttccatttc

SEQ ID NO: 296834 - DNA, 2569 bp, Homo sapiens
atttgaagtcctcgttccacgccttctcatcatcctgaacaccgagctctgggactccggcggagaatctaaacgtaaagcatcacccacggtcgtgaactgtaggctctcctggcatccgggatcttattctggccttggcggagttggggatggtgtcgcctagcagccgctgccgctttggcttgctcgggaccatttggctggacccagagtccgcgtggaaccgcgatagggatctgtcagggcccgcggccgggtccagcttggtggttgcggtagtgagaggcctccgctggttgccaggcttggtctagaggtggagcacagtgaaagaattcaagatgccacctaatataaactggaaagaaataatgaaagttgacccagatgacctgccccgtcaagaagaactggcagataatttattgatttccttatccaaggtggaagtaaatgagctaaaaagtgaaaagcaagaaaatgtgatacaccttttcagaattactcagtcactaatgaagatgaaagctcaagaagtggagctggctttggaagaagtagaaaaagctggagaagaacaagcaaaatttgaaaatcaattaaaaactaaagtaatgaaactggaaaatgaactggagatggctcagcagtctgcaggtggacgagatactcggtttttacgtaatgaaatttgccaacttgaaaaacaattagaacaaaaagatagagaattggaggacatggaaaaggagttggagaaagagaagaaagttaatgagcaattggctcttcgaaatgaggaggcagaaaatgaaaacagcaaattaagaagagagaacaaacgtctaaagaaaaagaatgaacaactttgtcaggatattattgactaccagaaacaaatagattcacagaaagaaacacttttatcaagaagaggggaagacagtgactaccgatcacagttgtctaaaaaaaactatgagcttatccaatatcttgatgaaattcagactttaacagaagctaatgagaaaattgaagttcagaatcaagaaatgagaaaaaatttagaagagtctgtacaggaaatggagaagatgactgatgaatataatagaatgaaagctattgtgcatcagacagataatgtaatagatcagttaaaaaaagaaaacgatcattatcaacttcaagtgcaggagcttacagatcttctgaaatcaaaaaatgaagaagatgatccaattatggtagctgtcaatgcaaaagtagaagaatggaagctaattttgtcttctaaagatgatgaaattattgagtatcagcaaatgttacataacctaagggagaaacttaagaatgctcagcttgatgctgataaaagtaatgttatggctctacagcagggtatacaggaacgagacagtcaaattaagatgctcaccgaacaagtagaacaatatacaaaagaaatggaaaagaatacttgtattattgaagatttgaaaaatgagctccaaagaaacaaaggtgcttcaaccctttctcaacagactcatatgaaaattcagtcaacgttagacattttaaaagagaaaactaaagaggctgagagaacagctgaactggctgaggctgatgctagggaaaaggataaagaattagttgaggctctgaagaggttaaaagattatgaatcgggagtatatggtttagaagatgctgtcgttgaaataaagaattgtaaaaaccaaattaaaataagagatcgagagattgaaatattaacaaaggaaatcaataaacttgaattgaagatcagtgatttccttgatgaaaatgaggcacttagagagcgtgtgggccttgaaccaaagacaatgattgatttaactgaatttagaaatagcaaacacttaaaacagcagcagtacagagctgaaaaccagattcttttgaaagagattgaaagtctagaggaagaacgacttgatctgaaaaaaaaaaattcgtcaaatggctcaagaaagaggaaaaagaagtgcaacttcaggattaaccactgaggacctgaacctaactgaaaacatttctcaaggagatagaataagtgaaagaaaattggatttattgagcctcaaaaatatgagtgaagcacaatcaaagaatgaatttctttcaagagaactaattgaaaaagaaagagatttagaaaggagtaggacagtgatagccaaatttcagaataaatgctatagaatcaaagaatgcagaaggaatctttgatgcgagtctgcatttgaaagcccaagttgatcagcttaccggaagaaatgaagaattaagacaggagctcagggaatctcggaaagaggctataaattattcacagcagttggcaaaagctaatttaaagatagaccatcttgaaaaagaaactagtcttttacgacaatcagaaggatcgaatgttgtttttaaaggaattgacttacctgatgggatagcaccatctagtgccagtatcattaattctcagaatgaatatttaatacatttgttacag

SEQ ID NO: 296835 - DNA, 399 bp, Homo sapiens
ttttgaaagaggcaagtgtggtagtcagttgattattttcttggctgaactatagagaaatactaataatttatactttgcagattgaaagtctagaggaagaacgacttgatctgaaaaaaaaaaattcgtcaaatggctcaagaaagaggaaaaagaagtgcaacttcaggtatactcagttattctaaacctttaaaaagaattattgataagtgagttgtctggatatgaaattatttgtgtcttagctgtttttgctgttctattgtggatctgctacaaatttaataaatgacaataataacctgaaggagataagtgagtgtcagtgggttcagtcctgaatctgaaatagacaaaaacaaaacaaaacaaaataacaaaaaccaagcaaac

SEQ ID NO: 296836 - DNA, 612 bp, Homo sapiens
tcatattttctgtgcttaaaaagctccaaatcttggtttataatttcatttaggtttttgttaggatttccattaataattgtgataaaattttaacttgggttacagtttaaatatctggaaaattctttcacagaaagttacctcattcttcagtgatactggctaagtgaattataaccagttgcttgatggtatatgacatttttgcagcttatttgaatgtttttaagtttttaattatattgctttctattgtaggccttgaaccaaagacaatgattgatttaactgaatttagaaatagcaaacacttaaaacagcagcagtacagagctgaaaaccagattcttttgaaagaggcaagtgtggtagtcagttgattattttcttggctgaactatagagaaatactaataatttatactttgcagattgaaagtctagaggaagaacgacttgatctgaaaaaaaaaaattcgtcaaatggctcaagaaagaggaaaaagaagtgcaacttcaggtatactcagttattctaaacctttaaaaagaattattgataagtgagttgtctggatatgaaattatttgtgtcttagctgtttttgc

SEQ ID NO: 296837 - DNA, 1021 bp, Homo sapiens
gacttccggccggaccgctgaggacgcggacccgccatggcgcggaagaaggtgcgtccgcggctgatcgcggagctggcccgccgcgtgcgcgccctgcgggagcaactgaacaggccgcgcgactcccagctctacgcggtggactacgagaccttgacgcggccgttctctggacgccggctgccggtccgggcctgggccgacgtgcgccgcgagagccgcctcttgcagctgctcggccgcctcccgctcttcggcctgggccgcctggtcacgcgcaagtcctggctgtggcagcacgacgagccgtgctactggcgcctcacgcgggtgcggcccgactacacggcgcagaacttggaccacgggaaggcctggggcatcctgaccttcaaagggaagactgagagcgaggcgcgggagatcgaacacgtcatgtaccatgactggcggctggtgcccaagcacgaggaggaggccttcaccgcgttcacgccggcgccggaagacagcctggcctccgtgccgtacccgcctctcctccgggccatgattatcgcagaacgacagaaaaatggagacacaagcaccgaggagcccatgctgaatgtgcagaggatacgcatggaaccctgggattaccctgcaaaacaggaagacaaaggaagggccaagggcacccccgtctagaatgccagaaccagcgggtggccttaggggctgtgaggcagtggggaccttattgatgaaagaaaccgtctttgcgttacacccgagtctgcctctcggagcagggagctcaccttccgcgacgtgttctgagggtctgcatcttaggggggagggctggggcaaatcgccacctgtgcctttcctctggccctgctgcccccacacccaactccgagggcccacgctggggaaagcgggaagcgctcgctccctttcccccattagtgctctctctgcctggatcccggcagaagctatgaaagggaataaagagaaaagaagtacc

SEQ ID NO: 296838 - DNA, 1034 bp, Homo sapiens
aaaataggctaggtacgaggctgggtgtgtaattccctgcggacccgccatggcgcggaagaaggtgcgtccgcggctgatcgcggagctggcccgccgcgtgcgcgccctgcgggagcaactgaacaggccgcgcgactcccagctctacgcggtggactacgagaccttgacgcggccgttctctggacgccggctgccggtccgggcctgggccgacgtgcgccgcgagagccgcctcttgcagctgctcggccgcctcccgctcttcggcctgggccgcctggtcacgcgcaagtcctggctgtggcagcacgacgagccgtgctactggcgcctcacgcgggtgcggcccgactacacggcgcagaacttggaccacgggaaggcctggggcatcctgaccttcaaagggaagactgagagcgaggcgcgggagatcgaacacgtcatgtaccatgactggcggctggtgcccaagcacgaggaggaggccttcaccgcgttcacgccggcgccggaagacagcctggcctccgtgccgtacccgcctctcctccgggccatgattatcgcagaacgacagaaaaatggagacacaagcaccgaggagcccatgctgaatgtgcagaggatacgcatggaaccctgggattaccctgcaaaacaggaagacaaaggaagggccaagggcacccccgtctagaatgccagaaccagcgggtggccttaggggctgtgaggcagtggggaccttattgatgaaagaaaccgtctttgcgttacacccgagtctgcctctcggagcagggagctcaccttccgcgacgtgttctgagggtctgcatcttaggggggagggctggggcaaatcgccacctgtgcctttcctctggccctgctgcccccacacccaactccgagggcccacgctggggaaagcgggaagcgctcgctccctttcccccattagtgctctctctgcctggatcccggcagaagctatgaaagggaataaagagaaaagaagtacc

SEQ ID NO: 296839 - DNA, 1053 bp, Homo sapiens
  misc_feature (81)..(81): n is a, c, g, or t
  misc_feature (105)..(105): n is a, c, g, or t
  misc_feature (183)..(184): n is a, c, g, or t
  misc_feature (188)..(188): n is a, c, g, or t
  misc_feature (263)..(263): n is a, c, g, or t
tccagcagtctctttccctctctggcctttgtgctgcgcggtgtccaaatgttaagtagtcctgcccatgtcccgggctanatatacatcgaacccaagctgtanatgctcttgagtagaagcaactttaactagccttcgggggcaagtaatagagatggctttcggcagagttgggaaatnnactnaatgcattgtagggcctttccaacattgacatctgtggccattagtttgcagttcaaagcctcactgagccctcnaaccagctacagcgggccttgtaatccaagctgggccgcctggtcacgcgcaagtcctggctgtggcagcacgacgagccgtgctactggcgcctcacgcgggtgcggcccgactacacggcgcagaacttggaccacgggaaggcctggggcatcctgaccttcaaagggaagactgagagcgaggcgcgggagatcgaacacgtcatgtaccatgactggcggctggtgcccaagcacgaggaggaggccttcaccgcgttcacgccggcgccggaagacagcctggcctccgtgccgtacccgcctctcctccgggccatgattatcgcagaacgacagaaaaatggagacacaagcaccgaggagcccatgctgaatgtgcagaggatacgcatggaaccctgggattaccctgcaaaacaggaagacaaaggaagggccaagggcacccccgtctagaatgccagaaccagcgggtggccttaggggctgtgaggcagtggggaccttattgatgaaagaaaccgtctttgcgttacacccgagtctgcctctcggagcagggagctcaccttccgcgacgtgttctgagggtctgcatcttaggggggagggctggggcaaatcgccacctgtgcctttcctctggccctgctgcccccacacccaactccgagggcccacgctggggaaagcgggaagcgctcgctccctttcccccattagtgctctctctgcctggatcccggcagaagctatgaaagggaataaagagaaaagaagtacc

SEQ ID NO: 296840 - DNA, 958 bp, Homo sapiens
aaaataggctaggtacgaggctgggtgtgtaattccctgcggacccgccatggcgcggaagaaggtgcgtccgcggctgatcgcggagctggcccgccgcgtgcgcgccctgcgggagcaactgaacaggccgcgcgactcccagctctacgcggtggactacgagaccttgacgcggccgttctctggacgccggctctgggccgcctggtcacgcgcaagtcctggctgtggcagcacgacgagccgtgctactggcgcctcacgcgggtgcggcccgactacacggcgcagaacttggaccacgggaaggcctggggcatcctgaccttcaaagggaagactgagagcgaggcgcgggagatcgaacacgtcatgtaccatgactggcggctggtgcccaagcacgaggaggaggccttcaccgcgttcacgccggcgccggaagacagcctggcctccgtgccgtacccgcctctcctccgggccatgattatcgcagaacgacagaaaaatggagacacaagcaccgaggagcccatgctgaatgtgcagaggatacgcatggaaccctgggattaccctgcaaaacaggaagacaaaggaagggccaagggcacccccgtctagaatgccagaaccagcgggtggccttaggggctgtgaggcagtggggaccttattgatgaaagaaaccgtctttgcgttacacccgagtctgcctctcggagcagggagctcaccttccgcgacgtgttctgagggtctgcatcttaggggggagggctggggcaaatcgccacctgtgcctttcctctggccctgctgcccccacacccaactccgagggcccacgctggggaaagcgggaagcgctcgctccctttcccccattagtgctctctctgcctggatcccggcagaagctatgaaagggaataaagagaaaagaagtacc

SEQ ID NO: 296841 - DNA, 1190 bp, Homo sapiens
aaaataggctaggtacgaggctgggtgtgtaattccctgcggacccgccatggcgcggaagaaggtgcgtccgcggctgatcgcggagctggcccgccgcgtgcgcgccctgcgggagcaactgaacaggccgcgcgactcccagctctacgcggtggactacgagaccttgacgcggccgttctctggacgccggctgccggtccgggcctgggccgacgtgcgccgcgagagccgcctcttgcagctgctcggccgcctcccgctcttcggcctgggccgcctggtcacgcgcaagtcctggctgtggcagcacgacgagccgtgctactggcgcctcacgcgggtgcggcccgactacacggcgcaggtaggtgcgtgcaccccgtccgcaccccgcccctgcagccgcctggtctccccgcctcccctcctccctgcaggtttgcgtggctgaggctcccacctcctgacctcgggggccgagagctttgcgagctgaccccgcttccttctggctttgcagaacttggaccacgggaaggcctggggcatcctgaccttcaaagggaagactgagagcgaggcgcgggagatcgaacacgtcatgtaccatgactggcggctggtgcccaagcacgaggaggaggccttcaccgcgttcacgccggcgccggaagacagcctggcctccgtgccgtacccgcctctcctccgggccatgattatcgcagaacgacagaaaaatggagacacaagcaccgaggagcccatgctgaatgtgcagaggatacgcatggaaccctgggattaccctgcaaaacaggaagacaaaggaagggccaagggcacccccgtctagaatgccagaaccagcgggtggccttaggggctgtgaggcagtggggaccttattgatgaaagaaaccgtctttgcgttacacccgagtctgcctctcggagcagggagctcaccttccgcgacgtgttctgagggtctgcatcttaggggggagggctggggcaaatcgccacctgtgcctttcctctggccctgctgcccccacacccaactccgagggcccacgctggggaaagcgggaagcgctcgctccctttcccccattagtgctctctctgcctggatcccggcagaagctatgaaagggaataaagagaaaagaagtacc

SEQ ID NO: 296842 - DNA, 855 bp, Homo sapiens
gacttccggccggaccgctgaggacgcggacccgccatggcgcggaagaaggtgcgtccgcggctgatcgcggagctggcccgccgcgtgcgcgccctgcgggagcaactgaacaggccgcgcgactcccagctctacgcggtggactacgagaccttgacgcggccgttctctggacgccggctgccggtccgggcctgggccgacgtgcgccgcgagagccgcctcttgcagctgctcggccgcctcccgctcttcggcctgggccgcctggtcacgcgcaagtcctggctgtggcagcacgacgagccgtgctactggcgcctcacgcgggtgcggcccgactacacggcgcagaacttggaccacgggaaggcctggggcatcctgaccttcaaagggaagactgagagcgaggcgcgggagatcgaacacgtcatgtaccatgactggcggctggtgcccaagcacgaggaggaggccttcaccgcgttcacgccggcgccggaagacagcctggcctccgtgccgtacccgcctctcctccgggccatgattatcgcagaacgacagaaaaatggagacacaagcaccgaggagcccatgctgaatgtgcagaggatacgcatggaaccctgggattaccctgcaaaacaggaagacaaaggaagggccaagggcacccccgtctagaatgccagaaccagcgggtggccttagggctgcccccacacccaactccgagggcccacgctggggaaagcgggaagcgctcgctccctttcccccattagtgctctctctgcctggatcccggcagaagctatgaaagggaataaagagaaaagaagtacc

SEQ ID NO: 296843 - DNA, 1401 bp, Homo sapiens
gacttccggccggaccgctgaggacgcggacccgccatggcgcggaagaaggtgcgtccgcggctgatcgcggagctggcccgccgcgtgcgcgccctgcgggagcaactgaacaggccgcgcgactcccagctctacgcggtggactacgagaccttgacgcggccgttctctggacgccggctgccggtccgggcctgggccgacgtgcgccgcgagagccgcctcttgcagctgctcggccgcctcccgctcttcggcctgggccgcctggtcacgcgcaagtcctggctgtggcagcacgacgagccgtgctactggcgcctcacgcgggtgcggcccgactacacggcgcagaacttggaccacgggaaggcctggggcatcctgaccttcaaagggaagactgagagcgaggcgcgggagatcgaacacgtcatgtaccatgactggcggctggtgcccaagcacgaggaggaggccttcaccgcgttcacgccggcgccggaagacagcctggcctccgtgccgtacccgcctctcctccgggccatgattatcgcagaacgacagaaaaatggagacacaagcaccgaggagcccatgctgaatgtgcagaggatacgcatggaaccctgggattaccctgcaaaacaggaagacaaaggaagggccaagggcacccccgtctagaatgccagaaccagcgggtggccttaggggctgtgaggcagtggggaccttattgatgaaagaaaccgtctttgcgttacacccgagtctgcctctcggagcagggagctcaccttccgcgacgtgttctgagggtctgcatcttaggggggagggctggggcaaatcgccacctgtgcctttcctctggccctgctgcccccacacccaactccgagggcccacgctggggaaagcgggaagcgctcgctccctttcccccattagtgctctctctgcctggatcccggcagaagctatgaaagggaataaagagaaaagaagtaccacaaacagcaaaaaagggcgacaggatacaaagaatcacaaaggggcccaagatagcggtacccagaatactgtaccacgtgcccaaaaggactaggaataaaaccaggcgaggagcgaaaaaagcggaagcgcacacgagccggaacaggcaaggaccaaacagcgaggacccaagcgcaacacccacagactcagccggaacactaaataacaggaagcgaaaaaaaggcaatagaggagaaaagtgaagagtgatgtagaatatccggagagaagagaaaaaaaaggaaagacgaaaggaagaagaagcggcaagagaacacgagaacaaaccactcggcaaggagcacaaacacaccgcaacaccaaacaacaaga

SEQ ID NO: 296844 - DNA, 1042 bp, Homo sapiens
gacttccggccggaccgctgaggacgcggacccgccatggcgcggaagaaggtgcgtccgcggctgatcgcggagctggcccgccgcgtgcgcgccctgcgggagcaactgaacaggccgcgcgactcccagctctacgcggtggactacgagaccttgacgcggccgttctctggacgccggctgccggtccgggcctgggccgacgtgcgccgcgagagccgcctcttgcagctgctcggccgcctcccgctcttcggcctgggccgcctggtcacgcgcaagtcctggctgtggcagcacgacgagccgtgctactggcgcctcacgcgggtgcggcccgactacacggcgcagaacttggaccacgggaaggcctggggcatcctgaccttcaaagacgcctctttttcttcatcagggaagactgagagcgaggcgcgggagatcgaacacgtcatgtaccatgactggcggctggtgcccaagcacgaggaggaggccttcaccgcgttcacgccggcgccggaagacagcctggcctccgtgccgtacccgcctctcctccgggccatgattatcgcagaacgacagaaaaatggagacacaagcaccgaggagcccatgctgaatgtgcagaggatacgcatggaaccctgggattaccctgcaaaacaggaagacaaaggaagggccaagggcacccccgtctagaatgccagaaccagcgggtggccttaggggctgtgaggcagtggggaccttattgatgaaagaaaccgtctttgcgttacacccgagtctgcctctcggagcagggagctcaccttccgcgacgtgttctgagggtctgcatcttaggggggagggctggggcaaatcgccacctgtgcctttcctctggccctgctgcccccacacccaactccgagggcccacgctggggaaagcgggaagcgctcgctccctttcccccattagtgctctctctgcctggatcccggcagaagctatgaaagggaataaagagaaaagaagtacc

SEQ ID NO: 296845 - DNA, 1124 bp, Homo sapiens
aaaataggctaggtacgaggctgggtgtgtaattccctgcggacccgccatggcgcggaagaaggtgcgtccgcggctgatcgcggagctggcccgccgcgtgcgcgccctgcgggagcaactgaacaggccgcgcgactcccagctctacgcggtggactacgagaccttgacgcggccgttctctggacgccggctgccggtccgggcctgggccgacgtgcgccgcgagagccgcctcttgcagctgctcggccgcctcccgctcttcggcctgggccgcctggtcacgcgcaagtcctggctgtggcagcacgacgagccgtgctactggcgcctcacgcgggtgcggcccgactacacggcgcagaacttggaccacgggaaggcctggggcatcctgaccttcaaaggtaaggctcgggagagcgggtgcccggcagttcgatgccgaccgccgacggcacagcaagtgtgtgcagacgcctctttttcttcatcagggaagactgagagcgaggcgcgggagatcgaacacgtcatgtaccatgactggcggctggtgcccaagcacgaggaggaggccttcaccgcgttcacgccggcgccggaagacagcctggcctccgtgccgtacccgcctctcctccgggccatgattatcgcagaacgacagaaaaatggagacacaagcaccgaggagcccatgctgaatgtgcagaggatacgcatggaaccctgggattaccctgcaaaacaggaagacaaaggaagggccaagggcacccccgtctagaatgccagaaccagcgggtggccttaggggctgtgaggcagtggggaccttattgatgaaagaaaccgtctttgcgttacacccgagtctgcctctcggagcagggagctcaccttccgcgacgtgttctgagggtctgcatcttaggggggagggctggggcaaatcgccacctgtgcctttcctctggccctgctgcccccacacccaactccgagggcccacgctggggaaagcgggaagcgctcgctccctttcccccattagtgctctctctgcctggatcccggcagaagctatgaaagggaataaagagaaaagaagtacc

SEQ ID NO: 296846 - DNA, 820 bp, Homo sapiens
gacttccggccggaccgctgaggacgcggacccgccatggcgcggaagaaggtgcgtccgcggctgatcgcggagctggcccgccgcgtgcgcgccctgcgggagcaactgaacaggccgcgcgactcccagctctacgcggtggactacgagaccttgacgcggccgttctctggacgccggctgccggtccgggcctgggccgacgtgcgccgcgagagccgcctcttgcagctgctcggccgcctcccgctcttcggcctgggccgcctggtcacgcgcaagtcctggctgtggcagcacgacgagccgtgctactggcgcctcacgcgggtgcggcccgactacacggcgcagaacttggaccacgggaaggcctggggcatcctgaccttcaaagggaagactgagagcgaggcgcgggagatcgaacacgtcatgtaccatgactggcggctggtgcccaagcacgaggaggaggccttcaccgcgttcacgccggcgccggaagacagcctggcctccgtgccgtacccgcctctcctccgggccatgattatcgcagaacgacagaaaaatggagacacaagcaccgaggagcccatgctgaatgtgcagaggatacgcatggaaccctgggattaccctgcaaaacaggaagacaaaggaagggccaagggcacccccctgcccccacacccaactccgagggcccacgctggggaaagcgggaagcgctcgctccctttcccccattagtgctctctctgcctggatcccggcagaagctatgaaagggaataaagagaaaagaagtacc

SEQ ID NO: 296847 - DNA, 3239 bp, Homo sapiens
ggcatggttgggaggttgagcagtaagagaccattaatactaagtattttgcctgaaatgcttctttataattatttcagggaaggaataagataatctcagacttactggggtggggcttggggaatgtttggatgttgctctttttcttcttccttcttttttttttttttttttttttggttggtgttgtttggcatttttttcttttcctttttaaagaaaatgttttcaggaaacatgaacaaacatactgccaattatagtggggctgggaaggcacaggagctggcgacctctcagctgcatagttgggacggcaaaccctgctgtgagcttctcagacttttcacctacttcacctattaagaagccatgaggagttgtaaactcttgttcagggaagaaaagagggcaggaggaagtaacccaatgcctttaaatacaaaacagatgaaaaacaaaatactcatttttccttttctattgtgggtttggggagccaaaccaagtgtgactgtgagcacgttcactgagaggcatgacaacattattgaagaggtctttccattatgtctggttctcttattttcttaagtcaagccttaactatgaacatactttaagatgatacgggtctgtcaccataaacctgtaaaagggcatcgacagcttttcagataatccaggaatgttgagacatggctaagtttctagctgatacttagtcattccctcttgatattgttgggatgggtagccaaaaggcaggcttgtgggagttaagagccaatgatacctggaaacatgggaggtagctgggggtacaagtggatgttgagactgaaggaagaggtggaaagaagacacagaaggcacccagatgccaaaaggcctggcatgaatgagagttggcatctgtcctgttgtggtgttcccattcttgccatacccatttgcccagattgttctgattctcatgttcaattgactatcccacatgagactacagtttataggcagtgaggaattgtttcttcctgggaaatgtccttccagcaacttcagaggaatgggaaagtgttaatcttacgtgaagcaaaggagcctggactaggggcagagagaaagaagcagcagcccaccttctttgtgtttgcacatgtgcctatgtcgtgtacattggtacctgactgtggctcagatctgcgtcgcagcagcgagagaagaaatcactccatatccgatgagaggaagggtggcacagagatggtgtctacaattagagacatttctgactccaccttagcctaagcaaactttatatactgagtaacatttgaaggttgtcttttaatggtggggggtgttttttcctttttaaactacagtgcttgcacaagagagggagggactcagaaaaggttagggcaggtgagggagacagtagatggcctgggatgacttgagtccatcatactattgcttggcaggtgtcctcccccatgtttgattcaaattccatgagtgacctacctttccccaggaatgggactgagagggtagtctccagcaactcagtctgcacagggctccccgttcaggctgcctttggtggttgtgcttttgtaagtttctttctctgcacttcgacttacctctgaatcagaaagcaagcccagcaggtgaatgagggatgtctgcttggcattgcccaatctaaccagggaggctggctggccacccactgtccgctagaggggagagctagcaggtgttggtatgaactcaggaatagaaacacgaggcctttttaaatacgagggagaagaatccatgatgcatacctgtaaccccctagaacccaagtgccagaattcctagatgctgcttctgtttgaacaaaatgtcactgcttttacacttgaaaaaaacacactcgaaaaatgttcaactccatgaaaaatattttttggctttaagaaattgtttggtgtttaactgtttcctttgattgccattccaccagtaaattgttggttgatttgcactgcactctggggttggggttgggaggggagggtccttatacagagccgaacctggggttgctcaggaagtgggccagggaatgtggaagtcgttgacattgcctgggccaaaagagtgggagatagtttttctcccctcagcccactcctggtagcacctgtcgccagcctggtacaaagccaggcctttttcttctgtgagcatctcatcactgtccagcagcaggtggaaaaagggggacaacaaccagacctattttttctcccccattttttccaaattttgctgtgccaaatgtttaaaattttataaatatgaatctattgaaatttccttaatcaagagcttcttcgtgtaaagtttgcttttttagctatagaaaaagaaaacagtaaatatctcttaatggcatccagccttgctgagctcaccttttttcctgaagaatgggtaggagtgaaatatttaatgtaaacatttcaccaagtccctttaccctaattttgaagctgcattaaacccaactcactaacacagggaatgattgcaccctagtcctctgtgggccaagaaactttcagaagcattaaaaaaatagttgaagtatatcacttctcaccaagtgggtagagtcagttggctgtttgtcccttgttttttatttattccataattatgtttgtgctttttgttttgtaaacagtaatggaacgtacatttttattttgtttagaagacaactttgattcaatctttcaagaactgttccattcttggtttcttcttagggggataaaaagttaccagttaatttgttttgagatatttaagcattctttgagttatagaattgtgatgcagggatttgtgaatgagacatttacatgtgaaaggtgacttcactagttacctgcttgagcagagtaaagtgtgtatatgtacataaaatgtaagtaatcttaactccattgtgcagtgccttttagatgttccgctttctataaagtcttcaaatttttgcatatatattatatatatatgatgtaatgttatagaaatatatgtataatatacatattttttccaggggtatctgatagctctgtattttgttatggaagttgaaagaaaaaagtattttacctcagaaattaaataaaaaaatacttttaagtaaaaaaaaatga

SEQ ID NO: 296848 - DNA, 3299 bp, Homo sapiens
ggcatggttgggaggttgagcagtaagagaccattaatactaagtattttgcctgaaatgcttctttataattatttcagggaaggaataagataatctcagacttactggggtggggcttggggaatgtttggatgttgctctttttcttcttccttcttttttttttttttttttttttggttggtgttgtttggcatttttttctttgttttaccttgttttaaagaaaaagtgtttgcaggggaaagcattagatacaaggacattagtgccaattgtaatgaggggggtgtggagaagggcaggaggtgagctggggagacgcttctcaggggtgcaataggtggagagaggagaaaaccttgtgtgtggtgagctgctcaagattgtttcagcctattattctaacgctgtaattaaggaagcctgtggagggagtcttgtaaactcttgttcagggaagaaaagagggcaggaggaagtaacccaatgcctttaaatacaaaacagatgaaaaacaaaatactcatttttccttttctattgtgggtttggggagccaaaccaagtgtgactgtgagcacgttcactgagaggcatgacaacattattgaagaggtctttccattatgtctggttctcttattttcttaagtcaagccttaactatgaacatactttaagatgatacgggtctgtcaccataaacctgtaaaagggcatcgacagcttttcagataatccaggaatgttgagacatggctaagtttctagctgatacttagtcattccctcttgatattgttgggatgggtagccaaaaggcaggcttgtgggagttaagagccaatgatacctggaaacatgggaggtagctgggggtacaagtggatgttgagactgaaggaagaggtggaaagaagacacagaaggcacccagatgccaaaaggcctggcatgaatgagagttggcatctgtcctgttgtggtgttcccattcttgccatacccatttgcccagattgttctgattctcatgttcaattgactatcccacatgagactacagtttataggcagtgaggaattgtttcttcctgggaaatgtccttccagcaacttcagaggaatgggaaagtgttaatcttacgtgaagcaaaggagcctggactaggggcagagagaaagaagcagcagcccaccttctttgtgtttgcacatgtgcctatgtcgtgtacattggtacctgactgtggctcagatctgcgtcgcagcagcgagagaagaaatcactccatatccgatgagaggaagggtggcacagagatggtgtctacaattagagacatttctgactccaccttagcctaagcaaactttatatactgagtaacatttgaaggttgtcttttaatggtggggggtgttttttcctttttaaactacagtgcttgcacaagagagggagggactcagaaaaggttagggcaggtgagggagacagtagatggcctgggatgacttgagtccatcatactattgcttggcaggtgtcctcccccatgtttgattcaaattccatgagtgacctacctttccccaggaatgggactgagagggtagtctccagcaactcagtctgcacagggctccccgttcaggctgcctttggtggttgtgcttttgtaagtttctttctctgcacttcgacttacctctgaatcagaaagcaagcccagcaggtgaatgagggatgtctgcttggcattgcccaatctaaccagggaggctggctggccacccactgtccgctagaggggagagctagcaggtgttggtatgaactcaggaatagaaacacgaggcctttttaaatacgagggagaagaatccatgatgcatacctgtaaccccctagaacccaagtgccagaattcctagatgctgcttctgtttgaacaaaatgtcactgcttttacacttgaaaaaaacacactcgaaaaatgttcaactccatgaaaaatattttttggctttaagaaattgtttggtgtttaactgtttcctttgattgccattccaccagtaaattgttggttgatttgcactgcactctggggttggggttgggaggggagggtccttatacagagccgaacctggggttgctcaggaagtgggccagggaatgtggaagtcgttgacattgcctgggccaaaagagtgggagatagtttttctcccctcagcccactcctggtagcacctgtcgccagcctggtacaaagccaggcctttttcttctgtgagcatctcatcactgtccagcagcaggtggaaaaagggggacaacaaccagacctattttttctcccccattttttccaaattttgctgtgccaaatgtttaaaattttataaatatgaatctattgaaatttccttaatcaagagcttcttcgtgtaaagtttgcttttttagctatagaaaaagaaaacagtaaatatctcttaatggcatccagccttgctgagctcaccttttttcctgaagaatgggtaggagtgaaatatttaatgtaaacatttcaccaagtccctttaccctaattttgaagctgcattaaacccaactcactaacacagggaatgattgcaccctagtcctctgtgggccaagaaactttcagaagcattaaaaaaatagttgaagtatatcacttctcaccaagtgggtagagtcagttggctgtttgtcccttgttttttatttattccataattatgtttgtgctttttgttttgtaaacagtaatggaacgtacatttttattttgtttagaagacaactttgattcaatctttcaagaactgttccattcttggtttcttcttagggggataaaaagttaccagttaatttgttttgagatatttaagcattctttgagttatagaattgtgatgcagggatttgtgaatgagacatttacatgtgaaaggtgacttcactagttacctgcttgagcagagtaaagtgtgtatatgtacataaaatgtaagtaatcttaactccattgtgcagtgccttttagatgttccgctttctataaagtcttcaaatttttgcatatatattatatatatatgatgtaatgttatagaaatatatgtataatatacatattttttccaggggtatctgatagctctgtattttgttatggaagttgaaagaaaaaagtattttacctcagaaattaaataaaaaaatacttttaagtaaaaaaaaatga

SEQ ID NO: 296849 - DNA, 2813 bp, Homo sapiens
ggcatggttgggaggttgagcagtaagagaccattaatactaagtattttgcctgaaatgcttctttataattatttcagggaaggaataagataatctcagacttactggggtggggcttggggaatgtttggatgttgctctttttcttcttccttcttttttttttttttttttttttggttggtgttgtttggcatttttttcttttcctttttaaagaaaatgttttcaggaaacatgaacaaacatactgccaattatagtggggctgggaaggcacaggagctggcgacctctcagctgcatagttgggacggcaaaccctgctgtgagcttctcagacttttcacctacttcacctattaagaagccatgaggagttgtaaactcttgttcagggaagaaaagagggcaggaggaagtaacccaatgcctttaaatacaaaacagatgaaaaacaaaatactcatttttccttttctattgtgggtttggggagccaaaccaagtgtgactgtgagcacgttcactgagaggcatgacaacattattgaagaggtctttccattatgtctggttctcttattttcttaagtcaagccttaactatgaacatactttaagatgatacgggtctgtcaccataaacctgtaaaagggcatcgacagcttttcagataatccaggaatgttgagacatggctaagtttctagctgatacttagtcattccctcttgatattgttgggatgggtagccaaaaggcaggcttgtgggagttaagagccaatgatacctggaaacatgggaggtagctgggggtacaagtggatgttgagactgaaggaagaggtggaaagaagacacagaaggcacccagatgccaaaaggcctggcatgaatgagagttggcatctgtcctgttgtggtgttcccattcttgccatacccatttgcccagattgttctgattctcatgttcaattgactatcccacatgagactacagtttataggcagtgaggaattgtttcttcctgggaaatgtccttccagcaacttcagaggaatgggaaagtgttaatcttacgtgaagcaaaggagcctggactaggggcagagagaaagaagcagcagcccaccttctttgtgtttgcacatgtgcctatgtcgtgtacattggtacctgactgtggctcagatctgcgtcgcagcagcgagagaagaaatcactccatatccgatgagaggaagggtggcacagagatggtgtctacaattagagacatttctgactccaccttagcctaagcaaactttatatactgagtaacatttgaaggttgtcttttaatggtggggggtgttttttcctttttaaactacagtgcttgcacaagagagggagggactcagaaaaggttagggcaggtgagggagacagtagatggcctgggatgacttgagtccatcatactattgcttggcaggtgtcctcccccatgtttgattcaaattccatgagtgacctacctttccccaggaatgggactgagagggtagtctccagcaactcagtctgcacagggctccccgttcaggctgcctttggtggttgtgcttttgtaagtttctttctctgcacttcgacttacctctgaatcagaaagcaagcccagcaggtgaatgagggatgtctgcttggcattgcccaatctaaccagggaggctggctggccacccactgtccgctagaggggagagctagcaggtgttggtatgaactcaggaatagaaacacgaggcgcctttttcttctgtgagcatctcatcactgtccagcagcaggtggaaaaagggggacaacaaccagacctattttttctcccccattttttccaaattttgctgtgccaaatgtttaaaattttataaatatgaatctattgaaatttccttaatcaagagcttcttcgtgtaaagtttgcttttttagctatagaaaaagaaaacagtaaatatctcttaatggcatccagccttgctgagctcaccttttttcctgaagaatgggtaggagtgaaatatttaatgtaaacatttcaccaagtccctttaccctaattttgaagctgcattaaacccaactcactaacacagggaatgattgcaccctagtcctctgtgggccaagaaactttcagaagcattaaaaaaatagttgaagtatatcacttctcaccaagtgggtagagtcagttggctgtttgtcccttgttttttatttattccataattatgtttgtgctttttgttttgtaaacagtaatggaacgtacatttttattttgtttagaagacaactttgattcaatctttcaagaactgttccattcttggtttcttcttagggggataaaaagttaccagttaatttgttttgagatatttaagcattctttgagttatagaattgtgatgcagggatttgtgaatgagacatttacatgtgaaaggtgacttcactagttacctgcttgagcagagtaaagtgtgtatatgtacataaaatgtaagtaatcttaactccattgtgcagtgccttttagatgttccgctttctataaagtcttcaaatttttgcatatatattatatatatatgatgtaatgttatagaaatatatgtataatatacatattttttccaggggtatctgatagctctgtattttgttatggaagttgaaagaaaaaagtattttacctcagaaattaaataaaaaaatacttttaagtaaaaaaaaatga

SEQ ID NO: 296850 - DNA, 1917 bp, Homo sapiens
ggcatggttgggaggttgagcagtaagagaccattaatactaagtattttgcctgaaatgcttctttataattatttcagggaaggaataagataatctcagacttactggggtggggcttggggaatgtttggatgttgctctttttcttcttccttcttttttttttttttttttttttggttggtgttgtttggcatttttttcttttcctttttaaagaaaatgttttcaggaaacatgaacaaacatactgccaattatagtggggctgggaaggcacaggagctggcgacctctcagctgcatagttgggacggcaaaccctgctgtgagcttctcagacttttcacctacttcacctattaagaagccatgaggagttgtaaactcttgttcagggaagaaaagagggcaggaggaagtaacccaatgcctttaaatacaaaacagatgaaaaacaaaatactcatttttccttttctattgtgggtttggggagccaaaccaagtgtgactgtgagcacgttcactgagaggcatgacaacattattgaagaggtctttccattatgtctggttctcttattttcttaagtcaagccttaactatgaacatactttaagatgatacgggtctgtcaccataaacctgtaaaagggcatcgacagcttttcagataatccaggaatgttgagacatggctaagtttctagctgatacttagtcattccctcttgatattgttgggaggggagggtccttatacagagccgaacctggggttgctcaggaagtgggccagggaatgtggaagtcgttgacattgcctgggccaaaagagtgggagatagtttttctcccctcagcccactcctggtagcacctgtcgccagcctggtacaaagccaggcctttttcttctgtgagcatctcatcactgtccagcagcaggtggaaaaagggggacaacaaccagacctattttttctcccccattttttccaaattttgctgtgccaaatgtttaaaattttataaatatgaatctattgaaatttccttaatcaagagcttcttcgtgtaaagtttgcttttttagctatagaaaaagaaaacagtaaatatctcttaatggcatccagccttgctgagctcaccttttttcctgaagaatgggtaggagtgaaatatttaatgtaaacatttcaccaagtccctttaccctaattttgaagctgcattaaacccaactcactaacacagggaatgattgcaccctagtcctctgtgggccaagaaactttcagaagcattaaaaaaatagttgaagtatatcacttctcaccaagtgggtagagtcagttggctgtttgtcccttgttttttatttattccataattatgtttgtgctttttgttttgtaaacagtaatggaacgtacatttttattttgtttagaagacaactttgattcaatctttcaagaactgttccattcttggtttcttcttagggggataaaaagttaccagttaatttgttttgagatatttaagcattctttgagttatagaattgtgatgcagggatttgtgaatgagacatttacatgtgaaaggtgacttcactagttacctgcttgagcagagtaaagtgtgtatatgtacataaaatgtaagtaatcttaactccattgtgcagtgccttttagatgttccgctttctataaagtcttcaaatttttgcatatatattatatatatatgatgtaatgttatagaaatatatgtataatatacatattttttccaggggtatctgatagctctgtattttgttatggaagttgaaagaaaaaagtattttacctcagaaattaaataaaaaaatacttttaagtaaaaaaaaatga

SEQ ID NO: 296851 - DNA, 2948 bp, Homo sapiens
ggcatggttgggaggttgagcagtaagagaccattaatactaagtattttgcctgaaatgcttctttataattatttcagggaaggaataagataatctcagacttactggggtggggcttggggaatgtttggatgttgctctttttcttcttccttcttttttttttttttttttttttggttggtgttgtttggcatttttttcttttcctttttaaagaaaatgttttcaggaaacatgaacaaacatactgccaattatagtggggctgggaaggcacaggagctggcgacctctcagctgcatagttgggacggcaaaccctgctgtgagcttctcagacttttcacctacttcacctattaagaagccatgaggagttgtaaactcttgttcagggaagaaaagagggcaggaggaagtaacccaatgcctttaaatacaaaacagatgaaaaacaaaatactcatttttccttttctattgtgggtttggggagccaaaccaagtgtgactgtgagcacgttcactgagaggcatgacaacattattgaagaggtctttccattatgtctggttctcttattttcttaagtcaagccttaactatgaacatactttaagatgatacgggtctgtcaccataaacctgtaaaagggcatcgacagcttttcagataatccaggaatgttgagacatggctaagtttctagctgatacttagtcattccctcttgatattgttgggatgggtagccaaaaggcaggcttgtgggagttaagagccaatgatacctggaaacatgggaggtagctgggggtacaagtggatgttgagactgaaggaagaggtggaaagaagacacagaaggcacccagatgccaaaaggcctggcatgaatgagagttggcatctgtcctgttgtggtgttcccattcttgccatacccatttgcccagattgttctgattctcatgttcaattgactatcccacatgagactacagtttataggcagtgaggaattgtttcttcctgggaaatgtccttccagcaacttcagaggaatgggaaagtgttaatcttacgtgaagcaaaggagcctggactaggggcagagagaaagaagcagcagcccaccttctttgtgtttgcacatgtgcctatgtcgtgtacattggtacctgactgtggctcagatctgcgtcgcagcagcgagagaagaaatcactccatatccgatgagaggaagggtggcacagagatggtgtctacaattagagacatttctgactccaccttagcctaagcaaactttatatactgagtaacatttgaaggttgtcttttaatggtggggggtgttttttcctttttaaactacagtgcttgcacaagagagggagggactcagaaaaggttagggcaggtgagggagacagtagatggcctgggatgacttgagtccatcatactattgcttggcaggtgtcctcccccatgtttgattcaaattccatgagtgacctacctttccccaggaatgggactgagagggtagtctccagcaactcagtctgcacagggctccccgttcaggctgcctttggtggttgtgcttttgtaagtttctttctctgcacttcgacttacctctgaatcagaaagcaagcccagcaggtgaatgagggatgtctgcttggcattgcccaatctaaccagggaggctggctggccacccactgtccgctagaggggagagctagcaggtgttggtatgaactcaggaatagaaacacgaggcctttttaaatacgagggagaagaatccatgatgcatacctgtaaccccctagaacccaagtgccagaattcctagatgctgcttctgtttgaacaaaatgtcactgcttttacacttgaaaaaaacacactcgaaaaatgttcaactccatgaaaaatattttttggctttaagaaattgtttggtgtttaactgtttcctttgattgccattccaccagtaaattgttggttgatttgcactgcactctggggttggggttgggaggggagggtccttatacagagccgaacctggggttgctcaggaagtgggccagggaatgtggaagtcgttgacattgcctgggccaaaagagtgggagatagtttttctcccctcagcccactcctggtagcacctgtcgccagcctggtacaaagccaggcctttttcttctgtgagcatctcatcactgtccagcagcaggtggaaaaagggggacaacaaccagacctattttttctcccccattttttccaaattttgctgtgccaaatgtttaaaattttataaatatgaatctattgaaatttccttaatcaagagcttcttcgtgtaaagtttgcttttttagctatagaaaaagaaaacagtaaatatctcttaatggcatccagccttgctgagctcaccttttttcctgaagaatgggtaggagtgaaatatttaatgtaaacatttcaccaagtccctttaccctaattttgaagctgcattaaacccaactcactaacacagggaatgattgcaccctagtcctctgtgggccaagaaactttcagaagcattaaaaaaatagttgaagtatatcacttctcaccaagtgggtagagtcagttggctgtttgtcccttgttttttatttattccataattatgtttgtgctttttgtaacagtattgcacgtcttttattgttagagacacttgtccagcttcagatggtcatctggtgctctaggggagaataccagatggtggatttagctttgggttaaggggcgaggggtagaaattgaggggacactcgggcggacggttaacaaaacacgcgcggggcacaagtatattaaattctcgggtcacaatggcgacag

SEQ ID NO: 296852 - DNA, 1248 bp, Homo sapiens
gcggccgcgcgggggaggcgcgggatggcggcgggcggcgcagggtccccctctggcggtggcgcgatggtgcgcgccgcctggggagctgcggccgggggtttgaaccggccaacttctccagccggccggggcgagcgccagcgcggcgtccggggcgagtgacacgcagagctgaagccatggttcatcaggtgctctaccgggcgctggtctccaccaagtggctggcggagtccatcaggactggcaagctggggcccggcctgcgggtgctggacgcgtcctggtactcaccaggcacccgagaggcccgcaaggagtacctcgagcgccacgtacccggcgcctctttctttgacatagaagagtgccgggacacggcgtcgccctacgagatgatgctgcccagcgaggctggcttcgccgagtatgtgggccgcctgggcatcagcaaccacacgcacgtggtggtgtatgatggtgaacacctgggcagcttctatgctccccgggtctggtggatgttccgtgtgtttggccaccgcaccgtatcagtgctcaatggtggcttccggaactggctgaaggagggccacccggtgacatccgagccctcacgcccagaaccggccgtcttcaaagccacactggaccgctccctgctcaagacctacgagcaggtgctggagaaccttgaatctaagaggttccagctggtggattcaaggtctcaagggcggttcctgggcaccgagccggagccggatgcagtaggactggactcgggccatatccgtggtgccgtcaacatgcctttcatggacttcctgactgaggatggcttcgagaagggcccagaagagctccgtgctctgttccagaccaagaaggtggatctctcgcagcctctcattgccacgtgccgcaagggagtcaccgcctgccacgtggccttggctgcctacctctgcggcaagcctgatgtggccgtgtacgatggctcctggtccgagtggtttcgccgggcccccccagagagccgtgtgtcccagggaaagtctgagaaggcctgagccgtgacctcttctgcttactgtaactgcggccggtttagtgaccccatgacttacagccggttcttacctcttaggtgaaggagatgacatgtttttagaattgctgtgcaaggctcaccctctctctgtcaacactggaataaactttgccttttctgaaaaaaaaaaa

SEQ ID NO: 296853 - DNA, 423 bp, Homo sapiens
gcctactactactatactgctgcaagacgacgacagaagggtgagatataaaacaaaccaaaaaagaaaaatctatcacaaactatcattgccaacataccaaaaggaaaaaacacgcctgccacgtggccttggctgcctacctctgcggcaagcctgatgtggccgtgtacgatggctcctggtccgagtggtttcgccgggcccccccagagagccgtgtgtcccagggaaagtctgagaaggcctgagccgtgacctcttctgcttactgtaactgcggccggtttagtgaccccatgacttacagccggttcttacctcttaggtgaaggagatgacatgtttttagaattgctgtgcaaggctcaccctctctctgtcaacactggaataaactttgccttttctgaaaaaaaaaaa

SEQ ID NO: 296854 - DNA, 1894 bp, Homo sapiens
gcggccgcgcgggggaggcgcgggatggcggcgggcggcgcagggtccccctctggcggtggcgcgatggtgcgcgccgcctggggagctgcggccgggggtttgaaccggccaacttctccagccggccggggcgagcgccagcgcggcgtccggggcgagtgagtgcggggcgggggcagcggccgggcgcctgggccgccggtcgggccacctgctgcccggggaaggatagcgttgcgagagtgggacggggtgccccgggaacccctgatccacctagggcagagggcagcgagctacgggccggactcgggcactctggaggcgggcgagctcgggctgcctggggaggccgcaggcgatggcgtgtgcgcggctcgcggagcttcctagccgtgcgcccaccccctctgccttggaaggaaaggggattctaagcccaagatgccatcgccccccatcccgggcatgctttcattgctctttcctggcgggatcgagtactgtaacttctaggagccagatccccgccccaggaagcgcccctacttggagtcctcggaaactcttgccccacccgcttctgcgctgggcccccgggccggctgggaggggcggggccggctttccagagggaatctgcaaacttatcccgctgcacgccccagcctcgctggcttgctgtaaacaaggaacccgggggagtgcggagggagaaagagcttctcccaggcctcaccctactgcacacaccgacttccttcctcacgcctgtctctctttcctggttcccacccgtgccaggtgacacgcagagctgaagccatggttcatcaggtgctctaccgggcgctggtctccaccaagtggctggcggagtccatcaggactggcaagctggggcccggcctgcgggtgctggacgcgtcctggtactcaccaggcacccgagaggcccgcaaggagtacctcgagcgccacgtacccggcgcctctttctttgacatagaagagtgccgggacacggcgtcgccctacgagatgatgctgcccagcgaggctggcttcgccgagtatgtgggccgcctgggcatcagcaaccacacgcacgtggtggtgtatgatggtgaacacctgggcagcttctatgctccccgggtctggtggatgttccgtgtgtttggccaccgcaccgtatcagtgctcaatggtggcttccggaactggctgaaggagggccacccggtgacatccgagccctcacgcccagaaccggccgtcttcaaagccacactggaccgctccctgctcaagacctacgagcaggtgctggagaaccttgaatctaagaggttccagctggtggattcaaggtctcaagggcggttcctgggcaccgagccggagccggatgcagtaggactggactcgggccatatccgtggtgccgtcaacatgcctttcatggacttcctgactgaggatggcttcgagaagggcccagaagagctccgtgctctgttccagaccaagaaggtggatctctcgcagcctctcattgccacgtgccgcaagggagtcaccgcctgccacgtggccttggctgcctacctctgcggcaagcctgatgtggccgtgtacgatggctcctggtccgagtggtttcgccgggcccccccagagagccgtgtgtcccagggaaagtctgagaaggcctgagccgtgacctcttctgcttactgtaactgcggccggtttagtgaccccatgacttacagccggttcttacctcttaggtgaaggagatgacatgtttttagaattgctgtgcaaggctcaccctctctctgtcaacactggaataaactttgccttttctgaaaaaaaaaaa

SEQ ID NO: 296855 - DNA, 567 bp, Homo sapiens
tgggagggagcttggggggcctcactggtctttgggatacagggctcagaagctgtggaattgactgtactttctctgggtctgttttagcctgtggtagtcagagcatgtcacttactggaattcagttaggagagcatagattaaccttactcaggtaactttgattcagggctttattggggacgttgtttagatatttttaaaaattcacttttttagagaggagtggtttttaaaatgttctcattttggctttttctgtaactttttgaagtgtttctctatgtagatgttactttgttgtgaaattctgaaccatgacatttggcttgtttttgtttccaggagcttttgatgggaggccagcagactatttattcatgctcctctttaactggatttgcatcgtggtatccttcagtctgtgattttgggccagaaataaaccagttttgtttccaggtttggggaaatagaccatattctgtaaacgtttcaaattacaagtatttgcatcttggttgactaccgttaataagaataattatagttttttaaaaaaaa

SEQ ID NO: 296856 - DNA, 3254 bp, Homo sapiens
tgagatggaatatcactcttgttgcccaggctggagtgcagtggcgcgatatcggctcactgcaacctccacctcccagttcaagcaattctcctgcctcagcgtcccaagtagctgggattacaggcatatgccaccatgcccagctaattttcctttaagcggcgggacttctggtcacgtcgtccgcggtcgccggaaggggaagtttcgcctcagaaggctgcctcgctggtccgaattcggtggcgccacgtccgcccgtctccgccttctgcatcgcggcttcggcggcttccacctagacacctaacagtcgcggagccggccgcgtcgtgagggggtcggcacggggagtcgggcggtcttgtgcatcttggctacctgtgggtcgaagatgtcggacatcggagactggttcaggagcatcccggcgatcacgcgctattggttcgccgccaccgtcgccgtgcccttggtcggcaaactcggcctcatcagcccggcctacctcttcctctggcccgaagccttcctttatcgctttcagatttggaggccaatcactgccaccttttatttccctgtgggtccaggaactggatttctttatttggtcaatttatatttcttatatcagtattctacgcgacttgaaacaggagcttttgatgggaggccagcagactatttattcatgctcctctttaactggatttgcatcgtgattactggcttagcaatggatatgcagttgctgatgattcctctgatcatgtcagtactttatgtctgggcccagctgaacagagacatgattgtatcattttggtttggaacacgatttaaggcctgctatttaccctgggttatccttggattcaactatatcatcggaggctcggtaatcaatgagcttattggaaatctggttggacatctttattttttcctaatgttcagatacccaatggacttgggaggaagaaattttctatccacacctcagtttttgtaccgctggctgcccagtaggagaggaggagtatcaggatttggtgtgccccctgctagcatgaggcgagctgctgatcagaatggcggaggcgggagacacaactggggccagggctttcgacttggagaccagtgaaggggcggcctcgggcagccgctcctctcaagccacatttcctcccagtgctgggtgcgcttaacaactgcgttctggctaacactgttggacctgacccacactgaatgtagtctttcagtacgagacaaagtttcttaaatcccgaagaaaaatataagtgttccacaagtttcacgattctcattcaagtccttactgctgtgaagaacaaataccaactgtgcaaattgcaaaactgactacattttttggtgtcttctcttctcccctttccgtctgaataatgggttttagcgggtcctagtctgctggcattgagctggggctgggtcaccaaacccttcccaaaaggacccttatctctttcttgcacacatgcctctctcccacttttcccaacccccacatttgcaactagaagaggttgcccataaaattgctctgcccttgacaggttctgttatttattgacttttgccaaggcttggtcacaacaatcatattcacgtaattttccccctttggtggcagaactgtagcaatagggggagaagacaagcagcggatgaagcgttttctcagcttttggaattgcttcgacctgacatccgttgtaaccgtttgccacttcttcagatatttttataaaaaagtaccactgagtcagtgagggccacagattggtattaatgagatacgagggttgttgctgggtgtttgtttcctgagctaagtgatcaagactgtagtggagttgcagctaacatgggttaggtttaaaccatgggggatgcaacccctttgcgtttcatatgtaggcctactggctttgtgtagctggagtagttgggttgctttgtgttaggaggatccagatcatgttggctacagggagatgctctctttgagaggctcctgggcattgattccatttcaatctcattctggatatgtgttcattgagtaaaggaggagagaccctcatacgctatttaaatgtcacttttttgcctatcccccgttttttggtcatgtttcaattaattgtgaggaaggcgcagctcctctctgcacgtagatcattttttaaagctaatgtaagcacatctaagggaataacatgatttaaggttgaaatggctttagaatcatttgggtttgagggtgtgttattttgagtcatgaatgtacaagctctgtgaatcagaccagcttaaatacccacacctttttttcgtaggtgggcttttcctatcagagcttggctcataaccaaataaagttttttgaaggccatggcttttcacacagttattttattttatgacgttatctgaaagcagactgttaggagcagtattgagtggctgtcacactttgaggcaactaaaaaggcttcaaacgttttgatcagtttcttttcaggaaacattgtgctctaacagtatgactattctttcccccactcttaaacagtgtgatgtgtgttatcctaggaaatgagagttggcaaacaacttctcattttgaatagagtttgtgtgtacctctccatatttaatttatatgataaaataggtggggagagtctgaaccttaactgtcatgttttgttgttcatctgtggccacaataaagtttacttgtaaaattttagaggccattactccaattatgttgcacgtacactcattgtacaggcgtggagactcattgtatgtataagaatattctgacagtgagtgacccggagtctctggtgtaccctcttaccagtcagctgcctgcgagcagtcattttttcctaaaggtttacaagtatttagaactcttcagttcagggcaaaatgttcatgaagttattcctcttaaacatggttaggaagctgatgacgttattgattttgtctggattatgtttctggaataattttaccaaaacaagctatttgagttttgacttgacaaggcaaaacatgacagtggattctctttacaaatggaaaaaaaaaatccttattttgtataaaggacttccctttttgtaaactaatcctttttattggtaaaaattgtaaattaaaatgtgcaacttgaa

SEQ ID NO: 296857 - DNA, 6863 bp, Homo sapiens
  misc_feature (1739)..(1739): n is a, c, g, or t
  misc_feature (1896)..(1896): n is a, c, g, or t
tgagatggaatatcactcttgttgcccaggctggagtgcagtggcgcgatatcggctcactgcaacctccacctcccagttcaagcaattctcctgcctcagcgtcccaagtagctgggattacaggcatatgccaccatgcccagctaattttcctttaagcggcgggacttctggtcacgtcgtccgcggtcgccggaaggggaagtttcgcctcagaaggctgcctcgctggtccgaattcggtggcgccacgtccgcccgtctccgccttctgcatcgcggcttcggcggcttccacctagacacctaacagtcgcggagccggccgcgtcgtgagggggtcggcacggggagtcgggcggtcttgtgcatcttggctacctgtgggtcgaagatgtcggacatcggagactggttcaggagcatcccggcgatcacgcgctattggttcgccgccaccgtcgccgtgcccttggtcggcaaactcggcctcatcagcccggcctacctcttcctctggcccgaagccttcctttatcgctttcagatttggaggccaatcactgccaccttttatttccctgtgggtccaggaactggatttctttatttggtcaatttatatttcttatatcagtattctacgcgacttgaaacaggagcttttgatgggaggccagcagactatttattcatgctcctctttaactggatttgcatcgtgattactggcttagcaatggatatgcagttgctgatgattcctctgatcatgtcagtactttatgtctgggcccagctgaacagagacatgattgtatcattttggtttggaacacgatttaaggcctgctatttaccctgggttatccttggattcaactatatcatcggaggctcggtaatcaatgagcttattggaaatctggttggacatctttattttttcctaatgttcagatacccaatggacttgggaggaagaaattttctatccacacctcagtttttgtaagtgtttttgtcctgtctcatctaacattttactgcctgtgttcttagtgcatcctaatgagagctccatgaggagtatgatttacccctatgccccatctgctggagaaacctgaggcaacaagtgacttaccctagtcacacagtcacaggaagttagggattaaagcttaggctcagttgccttcctgttactcttttagccagggaccactgacaactagattccaacattacaggaggcatctcagctctctgagcctgctgagggacctgatgcaactccagagtgcgaaacagtaggctggtgaatgggcagagtcacaggttagtggggtgtcttttcttggcccatcagtttttacccatgattttgcccaaggaagggtaagttagcgtgttggtcagcaattttaaacatttttatattaaatactatggagtagacattttacaggactgttcagagttaaaatgagagacttgaggtttgtataggcccaaccccctgggagtttgtgctctttatctgcttttagggtttactgaagtgggctggtaagggcaacagctttgatttttgagacaaacttggatttgaatcccagtcccctcagatagcagtttttatactgggaaagttacttaatcaaacctccaagcttcagtttgcaagcctgtaaattgtgggagaagcccctgtctcacaggactgcatgagntaagatacactgttgggaagcacagtagcgggttctcggtaagtaaagctagctgccatattcctaaaggtgggggtaggagagcaggattttgacgatctgagaggagacgcgcacacacccagaagcatgtaatagtcgtgtgaccgttctgtcngtgaggcaaaaggctgtcgaagaacgggccagttaaatcaccatctgggtgtcacagcctgcctgacaatcatgcctaatctcatatcagggatatgcagtaatagcttgcatttgaaagctttaaaaaaacaaacaaaccaaacccttccacatcttgctaattttaatgttttgcagttctgtcattcctctaagggatcagtgagggcagtaaaacttgagcaggcctcctctttctccccttccttttatagggtaggggtatgtttttcaaagacttttcaaattgtgaactgtaatatacagagatataccatattggtggttgtggtgtgtgtgtttttctttaagagaataaaaagaaacttgtttctcttctgagccttgaattgccttcaggctaaaaaaacaaatgaccaatctggtttctaattatcaaaggacataataacagcaggtttggctttctgatctaggtttatcaagtaggatggcagatgcatcaattaaaaaaagcttggtgcttttggggggcagccaacagttactttactttaaatggccatattctaacttaacggcttgtagctacttctcagttgtgggcaacacaggatacaagattctagtggcaaaatcagcgagccctggagcctgccttccacttgaactttctctgttgggggaagtccttctgctaaattttgcataaagatcagatgacaaaatacagctccttgcaaaagcagtaactgctttgaaattaccataaatttttgttgattatgtataattgggtatctttttatactaattatttgcatttaatttcactatctacttaagcagtggagatggcttccatattgtcttagagtgagtagcaaagcaagacagccctagcattttctccagcaagtgttctattttattatgtactttggaggaatattattgtaccagaaggcatggatgttgagaaaccagcacttggaaaatacattttgatttaatggtaaagctgtatttgtttaaaatggaggaggtgagtataggaaggtataactgcttttctaaatggaatgctgatacatttgtatcaccattttccattccatttagagtagttatatcttctctgtacacactaaattttgtgtttaaaaggggtttttggccaggcgtggttgctcacgtcggtaatcccagcattttgggaggccgacgggtggatcacgaggtcaggagatcgagaccatcctggctaacatggtgaaaccctggctccactaaaaatacaaaaattagctggacatggtagcgggcgcctgttgtcccagctactcgggaggctgaggcaggagaattgcttgaacccgggaggtggaggttgcagtgagctgagatcatgctactgcactccagcctggtgacagagtgagactccgtctcaaaaaaaaacaaaaaaacaaaaacccgagttgttgtctgttttgggaagaggcatgaaggtatcgagtatgatgtaaacagactccagtcactgactgctgtcccttcccaggcaggatgcatgtagtataacaagtagtgcagggcgcaggctctggaaccaggctgactaggttggaatcctgtcactttcgaagcgcttcactcagtgttggctcaattttcttgtttataaaacaggagtaatagtaatgcctacctcatggggttattgtgaagatcagatgaatttataagcaggcagcacctagtgtaaggcaataatcactgagtaaattcacatagtaactgctctagtataaggtcaagtataaagcctgtcctcttcagggtttctgctgtggacaagtcacctgtcatgacttactcttgctgccaagaagggtttaagcggaggtatcagatcatgctctctgccttcaagcaaaattttaaacattaggatctgctaagtggaataggtttaaacacattctcagtttactaataaaagagtcaaagatgggaaatagttggaaaatactattgagagtgtaggcttgggtttaagttctcttagttgttctgtgaactcttagtttattaattttaaggtgggaaatcatctaaccgtctggggccccagctctcccaccatctgtgagaagggaagaatgtacctggaaggcagattctgaataaattttaaaacatacccatacttccaacatagaaagccttcttcccctgtctcctttgatgggctcagctgagagccttttagaaatgctgtgcaaggctcaaacatgcaggctgtggatttggcctttgaaagtgaatgtattttgtatcctttgatccagtttgagccatatttagatataccaagatgctatcagtcattctttggttgctgggcttgtgggtgtaatatttttgtttccatactgttctgcatggattacttttataagcagagaaaaaaacgttcagagtgtgaatttagctgaaatctgaatacatttaagaaacatgaaaaacgaatgccgtctgtggtcaggtcatggggctgagtacagaaaagacaaagttaaataagacgtccctcgctgccttcaacatgacaagtgccatgggaacagcaggagagggaggtgttctcggaggtcagataactatgtggaagtgactttgttctcttctctccgtttgtgtccccgtctttctgcaccaggtaccgctggctgcccagtaggagaggaggagtatcaggatttggtgtgccccctgctagcatgaggcgagctgctgatcagaatggcggaggcgggagacacaactggggccagggctttcgacttggagaccagtgaaggggcggcctcgggcagccgctcctctcaagccacatttcctcccagtgctgggtgcgcttaacaactgcgttctggctaacactgttggacctgacccacactgaatgtagtctttcagtacgagacaaagtttcttaaatcccgaagaaaaatataagtgttccacaagtttcacgattctcattcaagtccttactgctgtgaagaacaaataccaactgtgcaaattgcaaaactgactacattttttggtgtcttctcttctcccctttccgtctgaataatgggttttagcgggtcctagtctgctggcattgagctggggctgggtcaccaaacccttcccaaaaggacccttatctctttcttgcacacatgcctctctcccacttttcccaacccccacatttgcaactagaagaggttgcccataaaattgctctgcccttgacaggttctgttatttattgacttttgccaaggcttggtcacaacaatcatattcacgtaattttccccctttggtggcagaactgtagcaatagggggagaagacaagcagcggatgaagcgttttctcagcttttggaattgcttcgacctgacatccgttgtaaccgtttgccacttcttcagatatttttataaaaaagtaccactgagtcagtgagggccacagattggtattaatgagatacgagggttgttgctgggtgtttgtttcctgagctaagtgatcaagactgtagtggagttgcagctaacatgggttaggtttaaaccatgggggatgcaacccctttgcgtttcatatgtaggcctactggctttgtgtagctggagtagttgggttgctttgtgttaggaggatccagatcatgttggctacagggagatgctctctttgagaggctcctgggcattgattccatttcaatctcattctggatatgtgttcattgagtaaaggaggagagaccctcatacgctatttaaatgtcacttttttgcctatcccccgttttttggtcatgtttcaattaattgtgaggaaggcgcagctcctctctgcacgtagatcattttttaaagctaatgtaagcacatctaagggaataacatgatttaaggttgaaatggctttagaatcatttgggtttgagggtgtgttattttgagtcatgaatgtacaagctctgtgaatcagaccagcttaaatacccacacctttttttcgtaggtgggcttttcctatcagagcttggctcataaccaaataaagttttttgaaggccatggcttttcacacagttattttattttatgacgttatctgaaagcagactgttaggagcagtattgagtggctgtcacactttgaggcaactaaaaaggcttcaaacgttttgatcagtttcttttcaggaaacattgtgctctaacagtatgactattctttcccccactcttaaacagtgtgatgtgtgttatcctaggaaatgagagttggcaaacaacttctcattttgaatagagtttgtgtgtacctctccatatttaatttatatgataaaataggtggggagagtctgaaccttaactgtcatgttttgttgttcatctgtggccacaataaagtttacttgtaaaattttagaggccattactccaattatgttgcacgtacactcattgtacaggcgtggagactcattgtatgtataagaatattctgacagtgagtgacccggagtctctggtgtaccctcttaccagtcagctgcctgcgagcagtcattttttcctaaaggtttacaagtatttagaactcttcagttcagggcaaaatgttcatgaagttattcctcttaaacatggttaggaagctgatgacgttattgattttgtctggattatgtttctggaataattttaccaaaacaagctatttgagttttgacttgacaaggcaaaacatgacagtggattctctttacaaatggaaaaaaaaaatccttattttgtataaaggacttccctttttgtaaactaatcctttttattggtaaaaattgtaaattaaaatgtgcaacttgaa

SEQ ID NO: 296858 - DNA, 3200 bp, Homo sapiens
tgagatggaatatcactcttgttgcccaggctggagtgcagtggcgcgatatcggctcactgcaacctccacctcccagttcaagcaattctcctgcctcagcgtcccaagtagctgggattacaggcatatgccaccatgcccagctaattttcctttaagcggcgggacttctggtcacgtcgtccgcggtcgccggaaggggaagtttcgcctcagaaggctgcctcgctggtccgaattcggtggcgccacgtccgcccgtctccgccttctgcatcgcggcttcggcggcttccacctagacacctaacagtcgcggagccggccgcgtcgtgagggggtcggcacggggagtcgggcggtcttgtgcatcttggctacctgtgggtcgaagatgtcggacatcggagactggttcaggagcatcccggcgatcacgcgctattggttcgccgccaccgtcgccgtgcccttggtcggcaaactcggcctcatcagcccggcctacctcttcctctggcccgaagccttcctttatcgctttcagatttggaggccaatcactgccaccttttatttccctgtgggtccaggaactggatttctttatttggtcaatttatatttcttatatcagtattctacgcgacttgaaacaggagcttttgatgggaggccagcagactatttattcatgctcctctttaactggatttgcatcgtgattactggcttagcaatggatatgcagttgctgatgattcctctgatcatgtcagtactttatgtctgggcccagctgaacagagacatgattgtatcattttggtttggaacacgatttaaggcctgctatttaccctgggttatccttggattcaactatatcatcggaggctcggtaatcaatgagcttattggaaatctggttggacatctttattttttcctaatgttcagatacccaatggacttgggaggaagaaattttctatccacacctcagtttttgtaccgctggctgcccagtaggagaggaggagtatcaggatttggtgtgccccctgctagcatgaggcgagctgctgatcagaatggcggaggcgggagacacaactggggccagggctttcgacttggagaccagtgaaggggcggcctcgggcagccgctcctctcaagccacatttcctcccagtgctgggtgcgcttaacaactgcgttctggctaacactgttggacctgacccacactgaatgtagtctttcagtacgagacaaagtttcttaaatcccgaagaaaaatataagtgttccacaagtttcacgattctcattcaagtccttactgctgtgaagaacaaataccaactgtgcaaattgcaaaactgactacattttttggtgtcttctcttctcccctttccgtctgaataatgggttttagcgggtcctagtctgctggcattgagctggggctgggtcaccaaacccttcccaaaaggacccttatctctttcttgcacacatgcctctctcccacttttcccaacccccacatttgcaactagaagaggttgcccatggtcacaacaatcatattcacgtaattttccccctttggtggcagaactgtagcaatagggggagaagacaagcagcggatgaagcgttttctcagcttttggaattgcttcgacctgacatccgttgtaaccgtttgccacttcttcagatatttttataaaaaagtaccactgagtcagtgagggccacagattggtattaatgagatacgagggttgttgctgggtgtttgtttcctgagctaagtgatcaagactgtagtggagttgcagctaacatgggttaggtttaaaccatgggggatgcaacccctttgcgtttcatatgtaggcctactggctttgtgtagctggagtagttgggttgctttgtgttaggaggatccagatcatgttggctacagggagatgctctctttgagaggctcctgggcattgattccatttcaatctcattctggatatgtgttcattgagtaaaggaggagagaccctcatacgctatttaaatgtcacttttttgcctatcccccgttttttggtcatgtttcaattaattgtgaggaaggcgcagctcctctctgcacgtagatcattttttaaagctaatgtaagcacatctaagggaataacatgatttaaggttgaaatggctttagaatcatttgggtttgagggtgtgttattttgagtcatgaatgtacaagctctgtgaatcagaccagcttaaatacccacacctttttttcgtaggtgggcttttcctatcagagcttggctcataaccaaataaagttttttgaaggccatggcttttcacacagttattttattttatgacgttatctgaaagcagactgttaggagcagtattgagtggctgtcacactttgaggcaactaaaaaggcttcaaacgttttgatcagtttcttttcaggaaacattgtgctctaacagtatgactattctttcccccactcttaaacagtgtgatgtgtgttatcctaggaaatgagagttggcaaacaacttctcattttgaatagagtttgtgtgtacctctccatatttaatttatatgataaaataggtggggagagtctgaaccttaactgtcatgttttgttgttcatctgtggccacaataaagtttacttgtaaaattttagaggccattactccaattatgttgcacgtacactcattgtacaggcgtggagactcattgtatgtataagaatattctgacagtgagtgacccggagtctctggtgtaccctcttaccagtcagctgcctgcgagcagtcattttttcctaaaggtttacaagtatttagaactcttcagttcagggcaaaatgttcatgaagttattcctcttaaacatggttaggaagctgatgacgttattgattttgtctggattatgtttctggaataattttaccaaaacaagctatttgagttttgacttgacaaggcaaaacatgacagtggattctctttacaaatggaaaaaaaaaatccttattttgtataaaggacttccctttttgtaaactaatcctttttattggtaaaaattgtaaattaaaatgtgcaacttgaa

SEQ ID NO: 296859 - DNA, 3536 bp, Homo sapiens
tgagatggaatatcactcttgttgcccaggctggagtgcagtggcgcgatatcggctcactgcaacctccacctcccagttcaagcaattctcctgcctcagcgtcccaagtagctgggattacaggcatatgccaccatgcccagctaattttcctttaagcggcgggacttctggtcacgtcgtccgcggtcgccggaaggggaagtttcgcctcagaaggctgcctcgctggtccgaattcggtggcgccacgtccgcccgtctccgccttctgcatcgcggcttcggcggcttccacctagacacctaacagtcgcggagccggccgcgtcgtgagggggtcggcacggggagtcgggcggtcttgtgcatcttggctacctgtgggtcgaagatgtcggacatcggagactggttcaggagcatcccggcgatcacgcgctattggttcgccgccaccgtcgccgtgcccttggtcggcaaactcggcctcatcagcccggcctacctcttcctctggcccgaagccttcctttatcgctttcagatttggaggccaatcactgccaccttttatttccctgtgggtccaggaactggatttctttatttggtcaatttatatttcttatatcagtattctacgcgacttgaaacaggagcttttgatgggaggccagcagactatttattcatgctcctctttaactggatttgcatcgtgattactggcttagcaatggatatgcagttgctgatgattcctctgatcatgtcagtactttatgtctgggcccagctgaacagagacatgattgtatcattttggtttggaacacgatttaaggcctgctatttaccctgggttatccttggattcaactatatcatcggaggctcggtaatcaatgagcttattggaaatctggttggacatctttattttttcctaatgttcagatacccaatggacttgggaggaagaaattttctatccacacctcagtttttgtaccgctggctgcccagtaggagaggaggagtatcaggatttggtgtgccccctgctagcatgaggcgagctgctgatcagaatggcggaggcgggagacacaactggggccagggctttcgacttggagaccagtgaaggggcggcctcgggcagccgctcctctcaagccacatttcctcccagtgctgggtgcgcttaacaactgcgttctggctaacactgttggacctgacccacactgaatgtagtctttcagtacgagacaaagtttcttaaatcccgaagaaaaatataagtgttccacaagtttcacgattctcattcaagtccttactgctgtgaagaacaaataccaactgtgcaaattgcaaaactgactacattttttggtgtcttctcttctcccctttccgtctgaataatgggttttagcgggtcctagtctgctggcattgagctggggctgggtcaccaaacccttcccaaaaggacccttatctctttcttgcacacatgcctctctcccacttttcccaacccccacatttgcaactagaagaggttgcccataaaattgctctgcccttgacaggttctgttatttattgacttttgccaaggcttggtcacaacaatcatattcacgtaattttccccctttggtggcagaactgtagcaatagggggagaagacaagcagcggatgaagcgttttctcagcttttggaattgcttcgacctgacatccgttgtaaccgtttgccacttcttcagatatttttataaaaaagtaccactgagtcagtgagggccacagattggtattaatgagatacgagggttgttgctgggtgtttgtttcctgagctaagtgatcaagactgtagtggagttgcagctaacatgggttaggtttaaaccatgggggatgcaacccctttgcgtttcatatgtaggcctactggctttgtgtagctggagtagttgggttgctttgtgttaggaggatccagatcatgttggctacagggagatgctctctttgagaggctcctgggcattgattccatttcaatctcattctggatatgtgttcattgagtaaaggaggagagaccctcatacgctatttaaatgtcacttttttgcctatcccccgttttttggtcatgtttcaattaattgtgaggaaggcgcagctcctctctgcacgtagatcattttttaaagctaatgtaagcacatctaagggaataacatgatttaaggttgaaatggctttagaatcatttgggtttgagggtgtgttattttgagtcatgaatgtacaagctctgtgaatcagaccagcttaaatacccacacctttttttcgtaggtgggcttttcctatcagagcttggctcataaccaaataaagttttttgaaggccatggcttttcacacagttattttattttatgacgttatctgaaagcagactgttaggagcagtattgagtggctgtcacactttgaggcaactaaaaaggcttcaaacgttttgatcagtttcttttcaggaaacattgtgctctaacagtatgactattctttcccccactcttaaacagtgtgatgtgtgttatcctaggaaatgagagttggcaaacaacttctcattttgaatagagtttgtgtgtacctctccatatttaatttatatgataaaataggtggggagagtctgaaccttaactgtcatgttttgttgttcatctgtggccacaataaagtttacttgtaaaattttagaggccattactccaattatgttgcacgtacactcattgtacaggcgtggagactcattgtatgtataagaatattctgacagtgagtgacccggagtctctggtgtaccctcttaccagtcagctgcctgcgagcagtcattttttcctaaaggtttacaagtatttagaactcttcagttcagggcaaaatgttcatgaagttattcctcttaaacatggttaggaagctgatgacgttattgattttgtctggattatgtttctggaataattttaccaaaacaagctatttgagttttgacttgacaaggcaaaacatgacagtggattctctttacaaatggaaaaaaaaaatccttattttgtataaaggacttccctttttgtaaactaatcctttttattggtaaaaattgtaaattaaaatgtgcaacttgaaaaaaaaaaaaaaaaaaaaaaaaaaaaaaaaaaaaaaaaaaaaaaaaaaaaaaaaaaaaaaaaaaaaaaaaaaaaaaaaaaaaaaaaaaaaaaaaaaaaaaaaaaaaagggggggggcggttagattactcgagggggcattttgctccccgtttttggaaagggcctaagggggggttaaaaaaggaggggggtaacaaggcgcgggaacggtctggttgggaacctttgggggattgggccagattagaggagaaagtgtggacgttgcatgcttaaaaag

SEQ ID NO: 296860 - DNA, 3440 bp, Homo sapiens
tgagatggaatatcactcttgttgcccaggctggagtgcagtggcgcgatatcggctcactgcaacctccacctcccagttcaagcaattctcctgcctcagcgtcccaagtagctgggattacaggcatatgccaccatgcccagctaattttcctttaagcggcgggacttctggtcacgtcgtccgcggtcgccggaaggggaagtttcgcctcagaaggctgcctcgctggtccgaattcggtggcgccacgtccgcccgtctccgccttctgcatcgcggcttcggcggcttccacctagacacctaacagtcgcggagccggccgcgtcgtgagggggtcggcacggggagtcgggcggtcttgtgcatcttggctacctgtgggtcgaagatgtcggacatcggagactggttcaggagcatcccggcgatcacgcgctattggttcgccgccaccgtcgccgtgcccttggtcggcaaactcggcctcatcagcccggcctacctcttcctctggcccgaagccttcctttatcgctttcagatttggaggccaatcactgccaccttttatttccctgtgggtccaggaactggatttctttatttggtcaatttatatttcttatatcagtattctacgcgacttgaaacaggagcttttgatgggaggccagcagactatttattcatgctcctctttaactggatttgcatcgtgattactggcttagcaatggatatgcagttgctgatgattcctctgatcatgtcagtactttatgtctgggcccagctgaacagagacatgattgtatcattttggtttggaacacgatttaaggcctgctatttaccctgggttatccttggattcaactatatcatcggaggctcggtaatcaatgagcttattggaaatctggttggacatctttattttttcctaatgttcagatacccaatggacttgggaggaagaaattttctatccacacctcagtttttgtaccgctggctgcccagtaggagaggaggagtatcaggatttggtgtgccccctgctagcatgaggcgagctgctgatcagaatggcggaggcgggagacacaactggggccagggctttcgacttggagaccagtgaaggggcggcctcgggcagccgctcctctcaagccacatttcctcccagtgctgggtgcgcttaacaactgcgttctggctaacactgttggacctgacccacactgaatgtagtctttcagtacgagacaaagtttcttaaatcccgaagaaaaatataagtgttccacaagtttcacgattctcattcaagtccttactgctgtgaagaacaaataccaactgtgcaaattgcaaaactgactacattttttggtgtcttctcttctcccctttccgtctgaataatgggttttagcgggtcctagtctgctggcattgagctggggctgggtcaccaaacccttcccaaaaggacccttatctctttcttgcacacatgcctctctcccacttttcccaacccccacatttgcaactagaagaggttgcccataaaattgctctgcccttgacaggttctgttatttattgacttttgccaaggcttggtcacaacaatcatattcacgtaattttccccctttggtggcagaactgtagcaatagggggagaagacaagcagcggatgaagcgttttctcagcttttggaattgcttcgacctgacatccgttgtaaccgtttgccacttcttcagatatttttataaaaaagtaccactgagtcagtgagggccacagattggtattaatgagatacgagggttgttgctgggtgtttgtttcctgagctaagtgatcaagactgtagtggagttgcagctaacatgggttaggtttaaaccatgggggatgcaacccctttgcgtttcatatgtaggcctactggctttgtgtagctggagtagttgggttgctttgtgttaggaggatccagatcatgttggctacagggagatgctctctttgagaggctcctgggcattgattccatttcaatctcattctggatatgtgttcattgagtaaaggaggagagaccctcatacgctatttaaatgtcacttttttgcctatcccccgttttttggtcatgtttcaattaattgtgaggaaggcgcagctcctctctgcacgtagatcattttttaaagctaatgtaagcacatctaagggaataacatgatttaaggttgaaatggctttagaatcatttgggtttgagggtgtgttattttgagtcatgaatgtacaagctctgtgaatcagaccagcttaaatacccacacctttttttcgtaggtgggcttttcctatcagagcttggctcataaccaaataaagttttttgaaggccatggcttttcacacagttattttattttatgacgttatctgaaagcagactgttaggagcagtattgagtggctgtcacactttgaggcaactaaaaaggcttcaaacgttttgatcagtttcttttcaggaaacattgtgctctaacagtatgactattctttcccccactcttaaacagtgtgatgtgtgttatcctaggaaatgagagttggcaaacaacttctcattttgaatagagtttgtgtgtacctctccatatttaatttatatgataaaataggtggggagagtctgaaccttaactgtcatgttttgttgttcatctgtggccacaataaagtttacttgtaaaattttagaggccattactccaattatgttgcacgtacactcattgtacaggcgtggagactcattgtatgtataagaatattctgacagtgagtgacccggagtctctggtgtaccctcttaccagtcagctgcctgcgagcagtcattttttcctaaaggtttacaagtatttagaactcttcagttcagggcaaaatgttcatgaagttattcctcttaaacatggttaggaagctgatgacgttattgattttgtctggattatgtttctggaataattttaccaaaacaagctatttgagttttgacttgacaaggcaaaacatgacagtggattctctttacaaatggaaaaaaaaaatccttattttgtataaaggacttccctttttgtaaactaatcctttttattggtaaaaattgtaaattaaaatgtgcaacttgaaggttgtctgtgttaagtttccatgtccctgctctgctgtctcttagatatcacataatttgtgtaaccaattatctcttgaagagcatttaggaagtacccagtattttttgctggattaattcctggatgcagaattcctgggttttcattttaatgaaggaggatgcttgctaactttgagtga

SEQ ID NO: 296861 - DNA, 3201 bp, Homo sapiens
tgagatggaatatcactcttgttgcccaggctggagtgcagtggcgcgatatcggctcactgcaacctccacctcccagttcaagcaattctcctgcctcagcgtcccaagtagctgggattacaggcatatgccaccatgcccagctaattttcctttaagcggcgggacttctggtcacgtcgtccgcggtcgccggaaggggaagtttcgcctcagaaggctgcctcgctggtccgaattcggtggcgccacgtccgcccgtctccgccttctgcatcgcggcttcggcggcttccacctagacacctaacagtcgcggagccggccgcgtcgtgagggggtcggcacggggagtcgggcggtcttgtgcatcttggctacctgtgggtcgaagatgtcggacatcggagactggttcaggagcatcccggcgatcacgcgctattggttcgccgccaccgtcgccgtgcccttggtcggcaaactcggcctcatcagcccggcctacctcttcctctggcccgaagccttcctttatcgctttcagatttggaggccaatcactgccaccttttatttccctgtgggtccaggaactggatttctttatttggtcaatttatatttcttatatcagtattctacgcgacttgaaacaggagcttttgatgggaggccagcagactatttattcatgctcctctttaactggatttgcatcgtgattactggcttagcaatggatatgcagttgctgatgattcctctgatcatgtcagtactttatgtctgggcccagctgaacagagacatgattgtatcattttggtttggaacacgatttaaggcctgctatttaccctgggttatccttggattcaactatatcatcggaggctcggtaatcaatgagcttattggaaatctggttggacatctttattttttcctaatgttcagatacccaatggacttgggaggaagaaattttctatccacacctcagtttttgtaccgctggctgcccagtaggagaggaggagtatcaggatttggtgtgccccctgctagcatgaggcgagctgctgatcagaatggcggaggcgggagacacaactggggccagggctttcgacttggagaccagtgaaggggcggcctcgggcagccgctcctctcaagccacatttcctcccagtgctgggtgcgcttaacaactgcgttctggctaacactgttggacctgacccacactgaatgtagtctttcagtacgagacaaagtttcttaaatcccgaagaaaaatataagtgttccacaagtttcacgattctcattcaagtccttactgctgtgaagaacaaataccaactgtgcaaattgcaaaactgactacattttttggtgtcttctcttctcccctttccgtctgaataatgggttttagcgggtcctagtctgctggcattgagctggggctgggtcaccaaacccttcccaaaaggacccttatctctttcttgcacacatgcctctctcccacttttcccaacccccacatttgcaactagaagaggttgcccataaaattgctctgcccttgacaggttctgttatttattgacttttgccaaggcttggtcacaacaatcatattcacgtaattttccccctttggtggcagaactgtagcaatagggggagaagacaagcagcggatgaagcgttttctcagcttttggaattgcttcgacctgacatccgttgtaaccgtttgccacttcttcagatatttttataaggttgttgctgggtgtttgtttcctgagctaagtgatcaagactgtagtggagttgcagctaacatgggttaggtttaaaccatgggggatgcaacccctttgcgtttcatatgtaggcctactggctttgtgtagctggagtagttgggttgctttgtgttaggaggatccagatcatgttggctacagggagatgctctctttgagaggctcctgggcattgattccatttcaatctcattctggatatgtgttcattgagtaaaggaggagagaccctcatacgctatttaaatgtcacttttttgcctatcccccgttttttggtcatgtttcaattaattgtgaggaaggcgcagctcctctctgcacgtagatcattttttaaagctaatgtaagcacatctaagggaataacatgatttaaggttgaaatggctttagaatcatttgggtttgagggtgtgttattttgagtcatgaatgtacaagctctgtgaatcagaccagcttaaatacccacacctttttttcgtaggtgggcttttcctatcagagcttggctcataaccaaataaagttttttgaaggccatggcttttcacacagttattttattttatgacgttatctgaaagcagactgttaggagcagtattgagtggctgtcacactttgaggcaactaaaaaggcttcaaacgttttgatcagtttcttttcaggaaacattgtgctctaacagtatgactattctttcccccactcttaaacagtgtgatgtgtgttatcctaggaaatgagagttggcaaacaacttctcattttgaatagagtttgtgtgtacctctccatatttaatttatatgataaaataggtggggagagtctgaaccttaactgtcatgttttgttgttcatctgtggccacaataaagtttacttgtaaaattttagaggccattactccaattatgttgcacgtacactcattgtacaggcgtggagactcattgtatgtataagaatattctgacagtgagtgacccggagtctctggtgtaccctcttaccagtcagctgcctgcgagcagtcattttttcctaaaggtttacaagtatttagaactcttcagttcagggcaaaatgttcatgaagttattcctcttaaacatggttaggaagctgatgacgttattgattttgtctggattatgtttctggaataattttaccaaaacaagctatttgagttttgacttgacaaggcaaaacatgacagtggattctctttacaaatggaaaaaaaaaatccttattttgtataaaggacttccctttttgtaaactaatcctttttattggtaaaaattgtaaattaaaatgtgcaacttgaa

SEQ ID NO: 296862 - DNA, 2940 bp, Homo sapiens
tgggagggagcttggggggcctcactggtctttgggatacagggctcagaagctgtggaattgactgtactttctctgggtctgttttagcctgtggtagtcagagcatgtcacttactggaattcagttaggagagcatagattaaccttactcaggtaactttgattcagggctttattggggacgttgtttagatatttttaaaaattcacttttttagagaggagtggtttttaaaatgttctcattttggctttttctgtaactttttgaagtgtttctctatgtagatgttactttgttgtgaaattctgaaccatgacatttggcttgtttttgtttccaggagcttttgatgggaggccagcagactatttattcatgctcctctttaactggatttgcatcgtgattactggcttagcaatggatatgcagttgctgatgattcctctgatcatgtcagtactttatgtctgggcccagctgaacagagacatgattgtatcattttggtttggaacacgatttaaggcctgctatttaccctgggttatccttggattcaactatatcatcggaggctcggtaatcaatgagcttattggaaatctggttggacatctttattttttcctaatgttcagatacccaatggacttgggaggaagaaattttctatccacacctcagtttttgtaccgctggctgcccagtaggagaggaggagtatcaggatttggtgtgccccctgctagcatgaggcgagctgctgatcagaatggcggaggcgggagacacaactggggccagggctttcgacttggagaccagtgaaggggcggcctcgggcagccgctcctctcaagccacatttcctcccagtgctgggtgcgcttaacaactgcgttctggctaacactgttggacctgacccacactgaatgtagtctttcagtacgagacaaagtttcttaaatcccgaagaaaaatataagtgttccacaagtttcacgattctcattcaagtccttactgctgtgaagaacaaataccaactgtgcaaattgcaaaactgactacattttttggtgtcttctcttctcccctttccgtctgaataatgggttttagcgggtcctagtctgctggcattgagctggggctgggtcaccaaacccttcccaaaaggacccttatctctttcttgcacacatgcctctctcccacttttcccaacccccacatttgcaactagaagaggttgcccataaaattgctctgcccttgacaggttctgttatttattgacttttgccaaggcttggtcacaacaatcatattcacgtaattttccccctttggtggcagaactgtagcaatagggggagaagacaagcagcggatgaagcgttttctcagcttttggaattgcttcgacctgacatccgttgtaaccgtttgccacttcttcagatatttttataaaaaagtaccactgagtcagtgagggccacagattggtattaatgagatacgagggttgttgctgggtgtttgtttcctgagctaagtgatcaagactgtagtggagttgcagctaacatgggttaggtttaaaccatgggggatgcaacccctttgcgtttcatatgtaggcctactggctttgtgtagctggagtagttgggttgctttgtgttaggaggatccagatcatgttggctacagggagatgctctctttgagaggctcctgggcattgattccatttcaatctcattctggatatgtgttcattgagtaaaggaggagagaccctcatacgctatttaaatgtcacttttttgcctatcccccgttttttggtcatgtttcaattaattgtgaggaaggcgcagctcctctctgcacgtagatcattttttaaagctaatgtaagcacatctaagggaataacatgatttaaggttgaaatggctttagaatcatttgggtttgagggtgtgttattttgagtcatgaatgtacaagctctgtgaatcagaccagcttaaatacccacacctttttttcgtaggtgggcttttcctatcagagcttggctcataaccaaataaagttttttgaaggccatggcttttcacacagttattttattttatgacgttatctgaaagcagactgttaggagcagtattgagtggctgtcacactttgaggcaactaaaaaggcttcaaacgttttgatcagtttcttttcaggaaacattgtgctctaacagtatgactattctttcccccactcttaaacagtgtgatgtgtgttatcctaggaaatgagagttggcaaacaacttctcattttgaatagagtttgtgtgtacctctccatatttaatttatatgataaaataggtggggagagtctgaaccttaactgtcatgttttgttgttcatctgtggccacaataaagtttacttgtaaaattttagaggccattactccaattatgttgcacgtacactcattgtacaggcgtggagactcattgtatgtataagaatattctgacagtgagtgacccggagtctctggtgtaccctcttaccagtcagctgcctgcgagcagtcattttttcctaaaggtttacaagtatttagaactcttcagttcagggcaaaatgttcatgaagttattcctcttaaacatggttaggaagctgatgacgttattgattttgtctggattatgtttctggaataattttaccaaaacaagctatttgagttttgacttgacaaggcaaaacatgacagtggattctctttacaaatggaaaaaaaaaatccttattttgtataaaggacttccctttttgtaaactaatcctttttattggtaaaaattgtaaattaaaatgtgcaacttgaa

SEQ ID NO: 296863 - DNA, 2812 bp, Homo sapiens
tgagatggaatatcactcttgttgcccaggctggagtgcagtggcgcgatatcggctcactgcaacctccacctcccagttcaagcaattctcctgcctcagcgtcccaagtagctgggattacaggcatatgccaccatgcccagctaattttcctttaagcggcgggacttctggtcacgtcgtccgcggtcgccggaaggggaagtttcgcctcagaaggctgcctcgctggtccgaattcggtggcgccacgtccgcccgtctccgccttctgcatcgcggcttcggcggcttccacctagacacctaacagtcgcggagccggccgcgtcgtgagggggtcggcacggggagtcgggcggtcttgtgcatcttggctacctgtgggtcgaagatgtcggacatcggagactggttcaggagcatcccggcgatcacgcgctattggttcgccgccaccgtcgccgtgcccttggtcggcaaactcggcctcatcagcccggcctacctcttcctctggcccgaagccttcctttatcgctttcagatttggaggccaatcactgccaccttttatttccctgtgggtccaggaactggatttctttatttggtcaatttatatttcttatatcagtattctacgcgacttgaaacaggagcttttgatgggaggccagcagactatttattcatgctcctctttaactggatttgcatcgtgattactggcttagcaatggatatgcagttgctgatgattcctctgatcatgtcagtactttatgtctgggcccagctgaacagagacatgattgtatcattttggtttggaacacgatttaaggcctgctatttaccctgggttatccttggattcaactatatcatcggaggctcggtaatcaatgagcttattggaaatctggttggacatctttattttttcctaatgttcagatacccaatggacttgggaggaagaaattttctatccacacctcagtttttgtaccgctggctgcccagtaggagaggaggagtatcaggatttggtgtgccccctgctagcatgaggcgagctgctgatcagaatggcggaggcgggagacacaactggggccagggctttcgacttggagaccagtgaaggggcggcctcgggcagccgctcctctcaagccacatttcctcccagtgctgggtgcgcttaacaactgcgttctggctaacactgttggacctgacccacactgaatgtagtctttcagtacgagacaaagtttcttaaatcccgaagaaaaatataagtgttccacaagtttcacgattctcattcaagtccttactgctgtgaagaacaaataccaactgtgcaaattgcaaaactgactacattttttggtgtcttctcttctcccctttccgtctgaataatgggttttagcgggtcctagtctgctggcattgagctggggctgggtcaccaaacccttcccaaaaggacccttatctctttcttgcacacatgcctctctcccacttttcccaacccccacatttgcaactagaagaggttgcccataaaattgctctgcccttgacaggttctgttatttattgacttttgccaaggcttggtcacaacaatcatattcacgtaattttccccctttggtggcagaactgtagcaatagggggagaagacaagcagcggatgaagcgttttctcagcttttggaattgcttcgacctgacatccgttgtaaccgtttgccacttcttcagatatttttataaaaaagtaccactgagtcagtgagggccacagattggtattaatgagatacgagggttgttgctgggtgtttgtttcctgagctaagtgatcaagactgtagtggagttgcagctaacatgggttaggtttaaaccatgggggatgcaacccctttgcgtttcatatgtaggcctactggctttgtgtagctggagtagttgggttgctttgtgttaggaggatccagatcatgttggctacagggagatgctctctttgagaggctcctgggcattgattccatttcaatctcattctggatatgtgttcattgagtaaaggaggagagaccctcatacgctatttaaatgtcacttttttgcctatcccccgttttttggtcatgtttcaattaattgtgaggaaggcgcagctcctctctgcacgtagatcattttttaaagctaatgtaagcacatctaagggaataacatgatttaaggttgaaatggctttagaatcatttgggtttgagggtgtgttattttgagtcatgaatgtacaagctctgtgaatcagaccagcttaaatacccacacctttttttcgtaggtgggcttttcctatcagagcttggctcataaccaaataaagttttttgaaggccatggcttttcacacagttattttattttatgacgttatctgaaagcagactgttaggagcagtattgagtggctgtcacactttgaggcaactaaaaaggcttcaaacgttttgatcagtttcttttcaggaaacattgtgctctaacagtatgactattctttcccccactcttaaacagtgtgatgtgtgttatcctaggaaatgagagttggcaaacaacttctcattttgaatagagtttgtgtgtacctctccatatttaatttatatgataaaataggtggggagagtctgaaccttaactgtcatgttttgttgttcatctgtggccacaataaagtttacttgtaaaatttta

SEQ ID NO: 296864 - DNA, 2885 bp, Homo sapiens
cggccgggcggtaaaatcggcgcttaccctttaagcggcgggacttctggtcacgtcgtccgcggtcgccggaaggggaagtttcgcctcagaaggctgcctcgctggtccgaattcggtggcgccacgtccgcccgtctccgccttctgcatcgcggcttcggcggcttccacctagacacctaacagtcgcggagccggccgcgtcgtgagggggtcggcacggggagtcgggcggtcttgtgcatcttggctacctgtgggtcgaagatgtcggacatcggagactggttcaggagcatcccggcgatcacgcgctattggttcgccgccaccgtcgccgtgcccttggtcggcaaactcggcctcatcagcccggcctacctcttcctctggcccgaagccttcctttatcgctttcagatttggaggccaatcactgccaccttttatttccctgtgggtccaggaactggatttctttatttggtcaatttatatttcttatatcagtattctacgcgacttgaaacaggagcttttgatgggaggccagcagactatttattcatgctcctctttaactggatttgcatcgtgattactggcttagcaatggatatgcagttgctgatgattcctctgatcatgtcagtactttatgtctgggcccagctgaacagagacatgattgtatcattttggtttggaacacgatttaaggcctgctatttaccctgggttatccttggattcaactatatcatcggaggctcggtaatcaatgagcttattggaaatctggttggacatctttattttttcctcccagtgctgggtgcgcttaacaactgcgttctggctaacactgttggacctgacccacactgaatgtagtctttcagtacgagacaaagtttcttaaatcccgaagaaaaatataagtgttccacaagtttcacgattctcattcaagtccttactgctgtgaagaacaaataccaactgtgcaaattgcaaaactgactacattttttggtgtcttctcttctcccctttccgtctgaataatgggttttagcgggtcctagtctgctggcattgagctggggctgggtcaccaaacccttcccaaaaggacccttatctctttcttgcacacatgcctctctcccacttttcccaacccccacatttgcaactagaagaggttgcccataaaattgctctgcccttgacaggttctgttatttattgacttttgccaaggcttggtcacaacaatcatattcacgtaattttccccctttggtggcagaactgtagcaatagggggagaagacaagcagcggatgaagcgttttctcagcttttggaattgcttcgacctgacatccgttgtaaccgtttgccacttcttcagatatttttataaaaaagtaccactgagtcagtgagggccacagattggtattaatgagatacgagggttgttgctgggtgtttgtttcctgagctaagtgatcaagactgtagtggagttgcagctaacatgggttaggtttaaaccatgggggatgcaacccctttgcgtttcatatgtaggcctactggctttgtgtagctggagtagttgggttgctttgtgttaggaggatccagatcatgttggctacagggagatgctctctttgagaggctcctgggcattgattccatttcaatctcattctggatatgtgttcattgagtaaaggaggagagaccctcatacgctatttaaatgtcacttttttgcctatcccccgttttttggtcatgtttcaattaattgtgaggaaggcgcagctcctctctgcacgtagatcattttttaaagctaatgtaagcacatctaagggaataacatgatttaaggttgaaatggctttagaatcatttgggtttgagggtgtgttattttgagtcatgaatgtacaagctctgtgaatcagaccagcttaaatacccacacctttttttcgtaggtgggcttttcctatcagagcttggctcataaccaaataaagttttttgaaggccatggcttttcacacagttattttattttatgacgttatctgaaagcagactgttaggagcagtattgagtggctgtcacactttgaggcaactaaaaaggcttcaaacgttttgatcagtttcttttcaggaaacattgtgctctaacagtatgactattctttcccccactcttaaacagtgtgatgtgtgttatcctaggaaatgagagttggcaaacaacttctcattttgaatagagtttgtgtgtacctctccatatttaatttatatgataaaataggtggggagagtctgaaccttaactgtcatgttttgttgttcatctgtggccacaataaagtttacttgtaaaattttagaggccattactccaattatgttgcacgtacactcattgtacaggcgtggagactcattgtatgtataagaatattctgacagtgagtgacccggagtctctggtgtaccctcttaccagtcagctgcctgcgagcagtcattttttcctaaaggtttacaagtatttagaactcttcagttcagggcaaaatgttcatgaagttattcctcttaaacatggttaggaagctgatgacgttattgattttgtctggattatgtttctggaataattttaccaaaacaagctatttgagttttgacttgacaaggcaaaacatgacagtggattctctttacaaatggaaaaaaaaaatccttattttgtataaaggacttccctttttgtaaactaatcctttttattggtaaaaattgtaaattaaaatgtgcaacttgaa

SEQ ID NO: 296865 - DNA, 2648 bp, Homo sapiens
tgagatggaatatcactcttgttgcccaggctggagtgcagtggcgcgatatcggctcactgcaacctccacctcccagttcaagcaattctcctgcctcagcgtcccaagtagctgggattacaggcatatgccaccatgcccagctaattttcctttaagcggcgggacttctggtcacgtcgtccgcggtcgccggaaggggaagtttcgcctcagaaggctgcctcgctggtccgaattcggtggcgccacgtccgcccgtctccgccttctgcatcgcggcttcggcggcttccacctagacacctaacagtcgcggagccggccgcgtcgtgagggggtcggcacggggagtcgggcggtcttgtgcatcttggctacctgtgggtcgaagatgtcggacatcggagactggttcaggagcatcccggcgatcacgcgctattggttcgccgccaccgtcgccgtgcccttggtcggcaaactcggcctcatcagcccggcctacctcttcctctggcccgaagccttcctttatcgctttcagatttggaggccaatcactgccaccttttatttccctgtgggtccaggaactggatttctttatttggtcaatttatatttcttatatcagtattctacgcgacttgaaacaggagcttttgatgggaggccagcagactatttattcatgctcctctttaactggatttgcatcgtgattactggcttagcaatggatatgcagttgctgatgattcctctgatcatgtcagtactttatgtctgggcccagctgaacagagacatgattgtatcattttggtttggaacacgatttaaggcctgctatttaccctgggttatccttggattcaactatatcatcggaggctcggtaatcaatgagcttattggaaatctggttggacatctttattttttcctaatgttcagatacccaatggacttgggaggaagaaattttctatccacacctcagtttttgtaccgctggctgcccagtaggagaggaggagtatcaggatttggtgtgccccctgctagcatgaggcgagctgctgatcagaatggcggaggcgggagacacaactggggccagggctttcgacttggagaccagtgaaggggcggcctcgggcagccgctcctctcaagccacatttcctcccagtgctgggtgcgcttaacaactgcgttctggctaacactgttggacctgacccacactgaatgtagtctttcagtacgagacaaagtttcttaaatcccgaagaaaaatataagtgttccacaagtttcacgattctcattcaagtccttactgctgtgaagaacaaataccaactgtgcaaattgcaaaactgactacattttttggtgtcttctcttctcccctttccgtctgaataatgggttttagcgggtcctagtctgctggcattgagctggggctgggtcaccaaacccttcccaaaaggacccttatctctttcttgcacacatgcctctctcccacttttcccaacccccacatttgcaactagaagaggttgcccataaaattgctctgcccttgacaggttctgttatttattgacttttgccaaggcttggtcacaacaatcatattcacgtaattttccccctttggtggcagaactgtagcaatagggggagaagacaagcagcggatgaagcgttttctcagcttttggaattgcttcgacctgacatccgttgtaaccgtttgccacttcttcagatatttttataaaaaagtaccactgagtcagtgagggccacagattggtattaatgagatacgagggttgttgctgggtgtttgtttcctgagctaagtgatcaagactgtagtggagttgcagctaacatgggttaggtttaaaccatgggggatgcaacccctttgcgtttcatatgtaggcctactggctttgtgtagctggagtagttgggttgctttgtgttaggaggatccagatcatgttggctacagggagatgctctctttgagaggctcctgggcattgattccatttcaatctcattctggatatgtgttcattgagtaaaggaggagagaccctcatacgctatttaaatgtcacttttttgcctatcccccgttttttggtcatgtttcaattaattgtgaggaaggcgcagctcctctctgcacgtagatcattttttaaagctaatgtaagcacatctaagggaataacatgatttaaggttgaaatggctttagaatcatttgggtttgagggtgtgttattttgagtcatgaatgtacaagctctgtgaatcagaccagcttaaatacccacacctttttttcgtaggtgggcttttcctatcagagcttggctcataaccaaataaagttttttgaaggccaaaaaaaaaaaaaaaaaaaaaagggggggggcggttagattactcgagggggcattttgctccccgtttttggaaagggcctaagggggggttaaaaaaggaggggggtaacaaggcgcgggaacggtctggttgggaacctttgggggattgggccagattagaggagaaagtgtggacgttgcatgcttaaaaag

SEQ ID NO: 296866 - DNA, 2796 bp, Homo sapiens
tgagatggaatatcactcttgttgcccaggctggagtgcagtggcgcgatatcggctcactgcaacctccacctcccagttcaagcaattctcctgcctcagcgtcccaagtagctgggattacaggcatatgccaccatgcccagctaattttcctttaagcggcgggacttctggtcacgtcgtccgcggtcgccggaaggggaagtttcgcctcagaaggctgcctcgctggtccgaattcggtggcgccacgtccgcccgtctccgccttctgcatcgcggcttcggcggcttccacctagacacctaacagtcgcggagccggccgcgtcgtgagggggtcggcacggggagtcgggcggtcttgtgcatcttggctacctgtgggtcgaagatgtcggacatcggagactggttcaggagcatcccggcgatcacgcgctattggttcgccgccaccgtcgccgtgcccttggtcggcaaactcggcctcatcagcccggcctacctcttcctctggcccgaagccttcctttatcgctttcagatttggaggccaatcactgccaccttttatttccctgtgggtccaggaactggatttctttatttggtcaatttatatttcttatatcagtattctacgcgacttgaaacagtggggccagggctttcgacttggagaccagtgaaggggcggcctcgggcagccgctcctctcaagccacatttcctcccagtgctgggtgcgcttaacaactgcgttctggctaacactgttggacctgacccacactgaatgtagtctttcagtacgagacaaagtttcttaaatcccgaagaaaaatataagtgttccacaagtttcacgattctcattcaagtccttactgctgtgaagaacaaataccaactgtgcaaattgcaaaactgactacattttttggtgtcttctcttctcccctttccgtctgaataatgggttttagcgggtcctagtctgctggcattgagctggggctgggtcaccaaacccttcccaaaaggacccttatctctttcttgcacacatgcctctctcccacttttcccaacccccacatttgcaactagaagaggttgcccataaaattgctctgcccttgacaggttctgttatttattgacttttgccaaggcttggtcacaacaatcatattcacgtaattttccccctttggtggcagaactgtagcaatagggggagaagacaagcagcggatgaagcgttttctcagcttttggaattgcttcgacctgacatccgttgtaaccgtttgccacttcttcagatatttttataaaaaagtaccactgagtcagtgagggccacagattggtattaatgagatacgagggttgttgctgggtgtttgtttcctgagctaagtgatcaagactgtagtggagttgcagctaacatgggttaggtttaaaccatgggggatgcaacccctttgcgtttcatatgtaggcctactggctttgtgtagctggagtagttgggttgctttgtgttaggaggatccagatcatgttggctacagggagatgctctctttgagaggctcctgggcattgattccatttcaatctcattctggatatgtgttcattgagtaaaggaggagagaccctcatacgctatttaaatgtcacttttttgcctatcccccgttttttggtcatgtttcaattaattgtgaggaaggcgcagctcctctctgcacgtagatcattttttaaagctaatgtaagcacatctaagggaataacatgatttaaggttgaaatggctttagaatcatttgggtttgagggtgtgttattttgagtcatgaatgtacaagctctgtgaatcagaccagcttaaatacccacacctttttttcgtaggtgggcttttcctatcagagcttggctcataaccaaataaagttttttgaaggccatggcttttcacacagttattttattttatgacgttatctgaaagcagactgttaggagcagtattgagtggctgtcacactttgaggcaactaaaaaggcttcaaacgttttgatcagtttcttttcaggaaacattgtgctctaacagtatgactattctttcccccactcttaaacagtgtgatgtgtgttatcctaggaaatgagagttggcaaacaacttctcattttgaatagagtttgtgtgtacctctccatatttaatttatatgataaaataggtggggagagtctgaaccttaactgtcatgttttgttgttcatctgtggccacaataaagtttacttgtaaaattttagaggccattactccaattatgttgcacgtacactcattgtacaggcgtggagactcattgtatgtataagaatattctgacagtgagtgacccggagtctctggtgtaccctcttaccagtcagctgcctgcgagcagtcattttttcctaaaggtttacaagtatttagaactcttcagttcagggcaaaatgttcatgaagttattcctcttaaacatggttaggaagctgatgacgttattgattttgtctggattatgtttctggaataattttaccaaaacaagctatttgagttttgacttgacaaggcaaaacatgacagtggattctctttacaaatggaaaaaaaaaatccttattttgtataaaggacttccctttttgtaaactaatcctttttattggtaaaaattgtaaattaaaatgtgcaacttgaa

SEQ ID NO: 296867 - DNA, 2137 bp, Homo sapiens
cgagctcggtacccatgcaagcttggagaccagtgaaggggcggcctcgggcagccgctcctctcaagccacatttcctcccagtgctgggtgcgcttaacaactgcgttctggctaacactgttggacctgacccacactgaatgtagtctttcagtacgagacaaagtttcttaaatcccgaagaaaaatataagtgttccacaagtttcacgattctcattcaagtccttactgctgtgaagaacaaataccaactgtgcaaattgcaaaactgactacattttttggtgtcttctcttctcccctttccgtctgaataatgggttttagcgggtcctagtctgctggcattgagctggggctgggtcaccaaacccttcccaaaaggacccttatctctttcttgcacacatgcctctctcccacttttcccaacccccacatttgcaactagaagaggttgcccataaaattgctctgcccttgacaggttctgttatttattgacttttgccaaggcttggtcacaacaatcatattcacgtaattttccccctttggtggcagaactgtagcaatagggggagaagacaagcagcggatgaagcgttttctcagcttttggaattgcttcgacctgacatccgttgtaaccgtttgccacttcttcagatatttttataaaaaagtaccactgagtcagtgagggccacagattggtattaatgagatacgagggttgttgctgggtgtttgtttcctgagctaagtgatcaagactgtagtggagttgcagctaacatgggttaggtttaaaccatgggggatgcaacccctttgcgtttcatatgtaggcctactggctttgtgtagctggagtagttgggttgctttgtgttaggaggatccagatcatgttggctacagggagatgctctctttgagaggctcctgggcattgattccatttcaatctcattctggatatgtgttcattgagtaaaggaggagagaccctcatacgctatttaaatgtcacttttttgcctatcccccgttttttggtcatgtttcaattaattgtgaggaaggcgcagctcctctctgcacgtagatcattttttaaagctaatgtaagcacatctaagggaataacatgatttaaggttgaaatggctttagaatcatttgggtttgagggtgtgttattttgagtcatgaatgtacaagctctgtgaatcagaccagcttaaatacccacacctttttttcgtaggtgggcttttcctatcagagcttggctcataaccaaataaagttttttgaaggccatggcttttcacacagttattttattttatgacgttatctgaaagcagactgttaggagcagtattgagtggctgtcacactttgaggcaactaaaaaggcttcaaacgttttgatcagtttcttttcaggaaacattgtgctctaacagtatgactattctttcccccactcttaaacagtgtgatgtgtgttatcctaggaaatgagagttggcaaacaacttctcattttgaatagagtttgtgtgtacctctccatatttaatttatatgataaaataggtggggagagtctgaaccttaactgtcatgttttgttgttcatctgtggccacaataaagtttacttgtaaaattttagaggccattactccaattatgttgcacgtacactcattgtacaggcgtggagactcattgtatgtataagaatattctgacagtgagtgacccggagtctctggtgtaccctcttaccagtcagctgcctgcgagcagtcattttttcctaaaggtttacaagtatttagaactcttcagttcagggcaaaatgttcatgaagttattcctcttaaacatggttaggaagctgatgacgttattgattttgtctggattatgtttctggaataattttaccaaaacaagctatttgagttttgacttgacaaggcaaaacatgacagtggattctctttacaaatggaaaaaaaaaatccttattttgtataaaggacttccctttttgtaaactaatcctttttattggtaaaaattgtaaattaaaatgtgcaacttgaa

SEQ ID NO: 296868 - DNA, 2619 bp, Homo sapiens
tgagatggaatatcactcttgttgcccaggctggagtgcagtggcgcgatatcggctcactgcaacctccacctcccagttcaagcaattctcctgcctcagcgtcccaagtagctgggattacaggcatatgccaccatgcccagctaattttcctttaagcggcgggacttctggtcacgtcgtccgcggtcgccggaaggggaagtttcgcctcagaaggctgcctcgctggtccgaattcggtggcgccacgtccgcccgtctccgccttctgcatcgcggcttcggcggcttccacctagacacctaacagtcgcggagccggccgcgtcgtgagggggtcggcacggggagtcgggcggtcttgtgcatcttggctacctgtgggtcgaagatgtcggacatcggagactggttcaggagcatcccggcgatcacgcgctattggttcgccgccaccgtcgccgtgcccttggtcggcaaactcggcctcatcagcccggcctacctcttcctctggcccgaagccttcctttatcgctttcagatttggaggccaatcactgccaccttttatttccctgtgggtccaggaactggatttctttatttggtcaatttatatttcttatatcatacgagacaaagtttcttaaatcccgaagaaaaatataagtgttccacaagtttcacgattctcattcaagtccttactgctgtgaagaacaaataccaactgtgcaaattgcaaaactgactacattttttggtgtcttctcttctcccctttccgtctgaataatgggttttagcgggtcctagtctgctggcattgagctggggctgggtcaccaaacccttcccaaaaggacccttatctctttcttgcacacatgcctctctcccacttttcccaacccccacatttgcaactagaagaggttgcccataaaattgctctgcccttgacaggttctgttatttattgacttttgccaaggcttggtcacaacaatcatattcacgtaattttccccctttggtggcagaactgtagcaatagggggagaagacaagcagcggatgaagcgttttctcagcttttggaattgcttcgacctgacatccgttgtaaccgtttgccacttcttcagatatttttataaaaaagtaccactgagtcagtgagggccacagattggtattaatgagatacgagggttgttgctgggtgtttgtttcctgagctaagtgatcaagactgtagtggagttgcagctaacatgggttaggtttaaaccatgggggatgcaacccctttgcgtttcatatgtaggcctactggctttgtgtagctggagtagttgggttgctttgtgttaggaggatccagatcatgttggctacagggagatgctctctttgagaggctcctgggcattgattccatttcaatctcattctggatatgtgttcattgagtaaaggaggagagaccctcatacgctatttaaatgtcacttttttgcctatcccccgttttttggtcatgtttcaattaattgtgaggaaggcgcagctcctctctgcacgtagatcattttttaaagctaatgtaagcacatctaagggaataacatgatttaaggttgaaatggctttagaatcatttgggtttgagggtgtgttattttgagtcatgaatgtacaagctctgtgaatcagaccagcttaaatacccacacctttttttcgtaggtgggcttttcctatcagagcttggctcataaccaaataaagttttttgaaggccatggcttttcacacagttattttattttatgacgttatctgaaagcagactgttaggagcagtattgagtggctgtcacactttgaggcaactaaaaaggcttcaaacgttttgatcagtttcttttcaggaaacattgtgctctaacagtatgactattctttcccccactcttaaacagtgtgatgtgtgttatcctaggaaatgagagttggcaaacaacttctcattttgaatagagtttgtgtgtacctctccatatttaatttatatgataaaataggtggggagagtctgaaccttaactgtcatgttttgttgttcatctgtggccacaataaagtttacttgtaaaattttagaggccattactccaattatgttgcacgtacactcattgtacaggcgtggagactcattgtatgtataagaatattctgacagtgagtgacccggagtctctggtgtaccctcttaccagtcagctgcctgcgagcagtcattttttcctaaaggtttacaagtatttagaactcttcagttcagggcaaaatgttcatgaagttattcctcttaaacatggttaggaagctgatgacgttattgattttgtctggattatgtttctggaataattttaccaaaacaagctatttgagttttgacttgacaaggcaaaacatgacagtggattctctttacaaatggaaaaaaaaaatccttattttgtataaaggacttccctttttgtaaactaatcctttttattggtaaaaattgtaaattaaaatgtgcaacttgaa

SEQ ID NO: 296869 - DNA, 2294 bp, Homo sapiens
tgagatggaatatcactcttgttgcccaggctggagtgcagtggcgcgatatcggctcactgcaacctccacctcccagttcaagcaattctcctgcctcagcgtcccaagtagctgggattacaggcatatgccaccatgcccagctaattttcctttaagcggcgggacttctggtcacgtcgtccgcggtcgccggaaggggaagtttcgcctcagaaggctgcctcgctggtccgaattcggtggcgccacgtccgcccgtctccgccttctgcatcgcggcttcggcggcttccacctagacacctaacagtcgcggagccggccgcgtcgtgagggggtcggcacggggagtcgggcggtcttgtgcatcttggctacctgtgggtcgaagatgtcggacatcggagactggttcaggagcatcccggcgatcacgcgctattggttcgccgccaccgtcgccgtgcccttggtcggcaaactcggcctcatcagcccggcctacctcttcctctggcccgaagccttcctttatcgctttcagatttggaggccaatcactgccaccttttatttccctgtgggtccaggaactggatttctttatttggtcaatttatatttcttatatcagtattctacgcgacttgaaacaggagcttttgatgggaggccagcagactatttattcatgctcctctttaactggatttgcatcgtgattactggcttagcaatggatatgcagttgctgatgattcctctgatcatgtcagtactttatgtctgggcccagctgaacagagacatgattgtatcattttggtttggaacacgatttaaggcctgctatttaccctgggttatccttggattcaactatatcatcggaggctcggtaatcaatgagcttattggaaatctggttggacatctttattttttcctaatgttcagatacccaatggacttgggaggaagaaattttctatccacacctcagtttttgtaccgctggctgcccagtaggagaggaggagtatcaggatttggtgtgccccctgctagcatgaggcgagctgctgatcagaatggcggaggcgggagacacaactggggccagggctttcgacttggagaccagtgaaggggcggcctcgggcagccgctcctctcaagccacatttcctcccagtgctgggtgcgcttaacaactgcgttctggctaacactgttggacctgacccacactgaatgtagtctttcagtacgagacaaagtttcttaaatcccgaagaaaaatataagtgttccacaagtttcacgattctcattcaagtccttactgctgtgaagaacaaataccaactgtgcaaattgcaaaactgactacattttttggtgtcttctcttctcccctttccgtctgaataatgggttttagcgggtcctagtctgctggcattgagctggggctgggtcaccaaacccttcccaaaaggacccttatctctttcttgcacacatgcctctctcccacttttcccaacccccacatttgcaactagaagaggttgcccataaaattgctctgcccttgacaggttctgttatttattgacttttgccaaggcttggtcacaacaatcatattcacgtaattttccccctttggtggcagaactgtagcaatagggggagaagacaagcagcggatgaagcgttttctcagcttttggaattgcttcgacctgacatccgttgtaaccgtttgccacttcttcagatatttttataaaaaagtaccactgagtcagtgagggccacagattggtattaatgagatacgagggttgttgctgggtgtttgtttcctgagctaagtgatcaagactgtagtggagttgcagctaacatgggttaggtttaaaccatgggggatgcaacccctttgcgtttcatatgtaggcctactggctttgtgtagctggagtagttgggttgctttgtgttaggaggatccagatcatgttggctacagggagatgctctctttgagaggctcctgggcattgattccatttcaatctcattctggatatgtgttcattgagtaaaggaggagagaccctcatacgctatttaaatgtcacttttttgcctatcccccgttttttggtcatgtttcaattaattgtgaggaaggcgcagctcctctctgcacgatgaggtgatcttctgcacgataaggtgatcttgctgcacgatgaggtgatcttctgcacgat

SEQ ID NO: 296870 - DNA, 1107 bp, Homo sapiens
tcatgtttccaattaatctgtgaggaaaggcgcagccttccccttcttccttggcccaacggttaaagaattcccattttttttttttaagacaggcctttaaattgtaagcacatctaagggaataacatgatttaaggttgaaatggctttagaatcatttgggtttgagggtgtgttattttgagtcatgaatgtacaagctctgtgaatcagaccagcttaaatacccacacctttttttcgtaggtgggcttttcctatcagagcttggctcataaccaaataaagttttttgaaggccatggcttttcacacagttattttattttatgacgttatctgaaagcagactgttaggagcagtattgagtggctgtcacactttgaggcaactaaaaaggcttcaaacgttttgatcagtttcttttcaggaaacattgtgctctaacagtatgactattctttcccccactcttaaacagtgtgatgtgtgttatcctaggaaatgagagttggcaaacaacttctcattttgaatagagtttgtgtgtacctctccatatttaatttatatgataaaataggtggggagagtctgaaccttaactgtcatgttttgttgttcatctgtggccacaataaagtttacttgtaaaattttagaggccattactccaattatgttgcacgtacactcattgtacaggcgtggagactcattgtatgtataagaatattctgacagtgagtgacccggagtctctggtgtaccctcttaccagtcagctgcctgcgagcagtcattttttcctaaaggtttacaagtatttagaactcttcagttcagggcaaaatgttcatgaagttattcctcttaaacatggttaggaagctgatgacgttattgattttgtctggattatgtttctggaataattttaccaaaacaagctatttgagttttgacttgacaaggcaaaacatgacagtggattctctttacaaatggaaaaaaaaaatccttattttgtataaaggacttccctttttgtaaactaatcctttttattggtaaaaattgtaaattaaaatgtgcaacttgaa

SEQ ID NO: 296871 - DNA, 4800 bp, Homo sapiens
ggcaagtggccgcctggagcccagggccgctgtccggggaagggggcgccggagcagcccggaattcctgaggccggcgctgcaggcagcggcggctgcgcggtgaacgaggcggcctgcgcggcggagtgctgagtcccgatccccggctctgtccggcccacggatcctcaagcccgggccccgggcccggccccagcctcagccctgagcgtctcggggcggatggcgcggggcggcgggggcgggcggtgctgagccctgcgcgggccatggcctcggcctgcggggcgccgggcccggggggcgccctgggcagccaggccccctcctggtaccaccgcgacctgagccgggcggccgcggaggagctgctggcccgggcgggccgcgatggcagcttcctggtccgagacagcgagagcgtggcgggggccttcgcgctctgcgtcctgtatcagaagcatgtgcacacgtatcgcattctgcctgatggagaagatttcttggctgtgcagacctcgcagggtgtgcctgtgcgccgcttccagaccctgggtgagctcatcggcctgtacgcccagcccaaccagggccttgtgtgcgccctgcttcttcctgtagagggtgagcgagagccggacccaccggatgaccgggatgcctcagatggggaggatgagaagcccccgctgcccccgcgctctggctccaccagcatttctgcccccactgggcccagcagtcccctgccagctcctgagactcccacagctccagctgctgagagtgctcccaatgggctgagcaccgtctcgcacgactacctgaaaggcagctatgggctggacctggaagctgtgaggggtggagccagccacctgccccacctcacccgtaccctcgctacctcatgccggaggctgcacagtgaggtggacaaggtcctgtcaggcctggagatcctgtccaaggtgtttgaccagcagagctcgcccatggtgacccgccttttgcagcagcagaacctgccacagacaggggagcaggaactagagagcctggtgctgaagctgtcagtgctaaaggacttcctgtcaggcatccagaagaaggccctgaaggccctacaggacatgagctccacagcacccccagctccgcagccatccacacgtaaggccaagaccatccccgtgcaggcctttgaggtgaagctagatgtgaccctgggtgacctgaccaagattgggaagtcacagaagttcacgctgagcgtggatgtggagggtgggcggctggtgctgctgcggagacagcgggactcccaggaggactggaccaccttcacgcacgaccgcatccgccagctcattaagtcccagcgtgtccagaacaagctgggtgttgtgtttgagaaggagaaggaccggactcagcgcaaggacttcatctttgtcagtgcccggaagcgggaggccttctgccagctgttgcagctcatgaagaacaagcactccaagcaggacgagcccgacatgatctcagtcttcataggcacctggaacatgggaagtgtaccacctccaaaaaacgtgacatcctggttcacatcgaagggtctggggaagaccctggacgaggtcacagtgaccataccccatgacatctatgtctttgggacccaggagaactcagtgggcgaccgcgagtggctggacctactgcgcgggggcctcaaggagcttacggatctggattaccgcccgattgccatgcaatcactgtggaatatcaaggtggcagtgctggtcaagccagagcacgagaaccgtatcagccatgtcagtacgtccagtgtgaagactggcatcgccaacaccctggggaacaagggggctgtgggcgtctccttcatgtttaatggcacctcatttggctttgtgaattgtcacctcacctcgggaaatgagaagacggctcggaggaaccaaaactacttggacatcctgcggctgctctcgctgggcgaccggcagctcaatgcctttgacatctctctgcgtttcacacacctcttctggtttggggacctcaactaccgcctggacatggatatccaggagatcctgaactacatcagcaggaaagagtttgagcccctcctcagggtggaccagctcaacctggagcgggagaagcacaaggtcttccttcgattcagtgaggaggagatctccttcccacccacctaccgctatgagcggggttcccgggacacatatgcctggcacaagcagaagccaactggggtccggaccaatgtgccctcatggtgtgaccggattctgtggaaatcctaccctgaaactcacatcatctgcaattcttatggttgcactgatgacatcgtcaccagcgaccattcccccgtgtttgggacatttgaggttggagttacctcccagttcatctccaagaaagggctctcaaagacttcagaccaggcctacattgagtttgagagcatcgaggccattgtgaagacagccagccgcaccaagttcttcatcgagttctactctacctgcctggaggaatacaagaagagctttgagaatgatgcccagagcagtgacaacatcaacttcctcaaagtgcagtggtcttcacgccagctgcccacgctcaaaccaattctggctgatatcgagtacctgcaggaccagcacctcctgctcacagtcaagtccatggatggctatgaatcctatggggagtgtgtggttgcactcaaatccatgatcggcagcacggcccaacagttcctgaccttcctatcccaccgtggcgaggagacaggcaatatcagaggctccatgaaggtgcgggtgcccacggagcgcctgggcacccgtgagcggctctacgagtggatcagcattgataaggatgaggcaggagcaaagagcaaagccccctctgtgtcccgagggagccaggagcccaggtcagggagccgcaagccagccttcacagaggcctcctgcccgctctccaggttatttgaagaaccagagaaaccgccaccaacggggaggcccccagccccaccccgagcagctccccgggaggagcccttgacccccaggttgaagccagagggagctcctgaaccagaaggggtggcggccccccacccaagaacagcttcaataaccctgcctactacgtccttgaaggggtcccgcaccagctgctgcccccggagccaccctcgcctgccagggcccctgtcccatctgccaccaagaacaaagtggccattacagtgcctgctccacagcttgggcaccaccggcaccctcgtgtgggagaggggagttcttcagatgaggagtctggaggcacactgccccctccagactttccacctccaccactgccggactcagccatcttcctgccccccagcctggatcctttaccagggccagtggtccggggccgtggtggggctgaggcccgtggcccaccacctcccaaggcccatccaaggcctccactgcccccaggcccctcaccagccagcactttcctgggggaagtggccagtggggatgaccggtcctgctcggtgctgcagatggccaagacgctgagcgaggtggactatgcccctgctgggcctgcacgctcagcgctcctcccaggccccctggagctgcagcccccccggggactgccctcggactatggccggcccctcagcttccctccaccccgcatccgggagagcatccaggaagacctggcagaggaggctccgtgcctgcagggcgggcgggccagcgggctgggcgaggcaggcatgagtgcctggctgcgggccatcggcttggagcgctatgaggagggcctggtgcataatggctgggacgacctggagtttctcagtgacatcaccgaggaggacttggaggaggctggggtgcaggacccggctcacaagcgcctccttctggacaccctgcagctcagcaagtgatagcggaggcaccacgaagctgtgaactcagagcccctccctgctaccaaggcccagctatggccccagggttgaaaagttatgagggtcagggcagtatctctctgcctatttattggggtgcctatttattggggatctgcattccccgctgcccaatcatttgcaatgccctaattagggcatcctgcccctcgccttttaggctcaggacggaaggtcagttgccatggttaccgaggaccctggttactctggtgctgtcctgttttactggaccccgcctcccagccccaggggtgcctgtgggggtccatttgggtacgtctgggcccccactttcaccagtttctgcggccttccaccgggcctgaaccacagcggaggagctccgctaagacctccccacccccgctgggggtgggggcgggtgtccgtccggaaatgaaggaatagcccgaggaccgggctggggtttatttaaactgttctgtgtgggtctggggagggagagcaccttaatattattggggttggttggggtggggcaggatctcagccataaagtgccagtttgcttagttctcactgtctcctggtctgtgctgccctgctctggggatgcacggcggcagggtgggggagggaggttcctcgcaggtctcagcccgggacagggtcttgcaagcagcctcctgggcagtcgtaagggttgcggcgtgatgtcttcaataaattaagttttatttgga

SEQ ID NO: 296872 - DNA, 5133 bp, Homo sapiens
agtgtttgtaatagtctacaaaggaacacctggtgacagacactcacccagcataagcagccaggagagtcacctagggtgactcctgggtgactccttggggaagcatgccctgaggtgcggaggcagaggatcttccatcccccgctgattgtgcacctggctcagctgccacctgctcaactgcggctcctgtctgtcagcacccctcttgcccctccttggcttggggctcctagaggcccaggtctcccatgggggccctctttggtgggaaggcctagggtgatgcccccacactcctcggcacaagtgccctagacatacccgactccagcagagccagagagcagcataaacacaggaggcatacacacgtgttagcacgttgcccgtgtgtgcaaatgggctaaccaggcttctgaagactcttactctggcggggagcccagactggtaccacagcccagaggggctgtttagacagctgtggaggccacaaaagagctccctgttgcttctcaggccctgccctgtggtgggtgtggagtctgtgtaggtctggtggggagacgggggtgttctggtcattcctgcccaataggcaacaccaggagggtggaagtggaccggccacatcattaaccctgtgcagcctgggcaggtggttttagggaaaccaagctgagggggttggggtgctgagcttgctggcaggaggaaggggtgctttgggtcttagaccccagcctgggggtgacagattctggccctgccttggcatcaggtatcagaagcatgtgcacacgtatcgcattctgcctgatggagaagatttcttggctgtgcagacctcgcagggtgtgcctgtgcgccgcttccagaccctgggtgagctcatcggcctgtacgcccagcccaaccagggccttgtgtgcgccctgcttcttcctgtagagggtgagcgagagccggacccaccggatgaccgggatgcctcagatggggaggatgagaagcccccgctgcccccgcgctctggctccaccagcatttctgcccccactgggcccagcagtcccctgccagctcctgagactcccacagctccagctgctgagagtgctcccaatgggctgagcaccgtctcgcacgactacctgaaaggcagctatgggctggacctggaagctgtgaggggtggagccagccacctgccccacctcacccgtaccctcgctacctcatgccggaggctgcacagtgaggtggacaaggtcctgtcaggcctggagatcctgtccaaggtgtttgaccagcagagctcgcccatggtgacccgccttttgcagcagcagaacctgccacagacaggggagcaggaactagagagcctggtgctgaagctgtcagtgctaaaggacttcctgtcaggcatccagaagaaggccctgaaggccctacaggacatgagctccacagcacccccagctccgcagccatccacacgtaaggccaagaccatccccgtgcaggcctttgaggtgaagctagatgtgaccctgggtgacctgaccaagattgggaagtcacagaagttcacgctgagcgtggatgtggagggtgggcggctggtgctgctgcggagacagcgggactcccaggaggactggaccaccttcacgcacgaccgcatccgccagctcattaagtcccagcgtgtccagaacaagctgggtgttgtgtttgagaaggagaaggaccggactcagcgcaaggacttcatctttgtcagtgcccggaagcgggaggccttctgccagctgttgcagctcatgaagaacaagcactccaagcaggacgagcccgacatgatctcagtcttcataggcacctggaacatgggaagtgtaccacctccaaaaaacgtgacatcctggttcacatcgaagggtctggggaagaccctggacgaggtcacagtgaccataccccatgacatctatgtctttgggacccaggagaactcagtgggcgaccgcgagtggctggacctactgcgcgggggcctcaaggagcttacggatctggattaccgcccgattgccatgcaatcactgtggaatatcaaggtggcagtgctggtcaagccagagcacgagaaccgtatcagccatgtcagtacgtccagtgtgaagactggcatcgccaacaccctggggaacaagggggctgtgggcgtctccttcatgtttaatggcacctcatttggctttgtgaattgtcacctcacctcgggaaatgagaagacggctcggaggaaccaaaactacttggacatcctgcggctgctctcgctgggcgaccggcagctcaatgcctttgacatctctctgcgtttcacacacctcttctggtttggggacctcaactaccgcctggacatggatatccaggagatcctgaactacatcagcaggaaagagtttgagcccctcctcagggtggaccagctcaacctggagcgggagaagcacaaggtcttccttcgattcagtgaggaggagatctccttcccacccacctaccgctatgagcggggttcccgggacacatatgcctggcacaagcagaagccaactggggtccggaccaatgtgccctcatggtgtgaccggattctgtggaaatcctaccctgaaactcacatcatctgcaattcttatggttgcactgatgacatcgtcaccagcgaccattcccccgtgtttgggacatttgaggttggagttacctcccagttcatctccaagaaagggctctcaaagacttcagaccaggcctacattgagtttgagagcatcgaggccattgtgaagacagccagccgcaccaagttcttcatcgagttctactctacctgcctggaggaatacaagaagagctttgagaatgatgcccagagcagtgacaacatcaacttcctcaaagtgcagtggtcttcacgccagctgcccacgctcaaaccaattctggctgatatcgagtacctgcaggaccagcacctcctgctcacagtcaagtccatggatggctatgaatcctatggggagtgtgtggttgcactcaaatccatgatcggcagcacggcccaacagttcctgaccttcctatcccaccgtggcgaggagacaggcaatatcagaggctccatgaaggtgcgggtgcccacggagcgcctgggcacccgtgagcggctctacgagtggatcagcattgataaggatgaggcaggagcaaagagcaaagccccctctgtgtcccgagggagccaggagcccaggtcagggagccgcaagccagccttcacagaggcctcctgcccgctctccaggttatttgaagaaccagagaaaccgccaccaacggggaggcccccagccccaccccgagcagctccccgggaggagcccttgacccccaggttgaagccagagggagctcctgaaccagaaggggtggcggccccccacccaagaacagcttcaataaccctgcctactacgtccttgaaggggtcccgcaccagctgctgcccccggagccaccctcgcctgccagggcccctgtcccatctgccaccaagaacaaagtggccattacagtgcctgctccacagcttgggcaccaccggcaccctcgtgtgggagaggggagttcttcagatgaggagtctggaggcacactgccccctccagactttccacctccaccactgccggactcagccatcttcctgccccccagcctggatcctttaccagggccagtggtccggggccgtggtggggctgaggcccgtggcccaccacctcccaaggcccatccaaggcctccactgcccccaggcccctcaccagccagcactttcctgggggaagtggccagtggggatgaccggtcctgctcggtgctgcagatggccaagacgctgagcgaggtggactatgcccctgctgggcctgcacgctcagcgctcctcccaggccccctggagctgcagcccccccggggactgccctcggactatggccggcccctcagcttccctccaccccgcatccgggagagcatccaggaagacctggcagaggaggctccgtgcctgcagggcgggcgggccagcgggctgggcgaggcaggcatgagtgcctggctgcgggccatcggcttggagcgctatgaggagggcctggtgcataatggctgggacgacctggagtttctcagtgacatcaccgaggaggacttggaggaggctggggtgcaggacccggctcacaagcgcctccttctggacaccctgcagctcagcaagtgatagcggaggcaccacgaagctgtgaactcagagcccctccctgctaccaaggcccagctatggccccagggttgaaaagttatgagggtcagggcagtatctctctgcctatttattggggtgcctatttattggggatctgcattccccgctgcccaatcatttgcaatgccctaattagggcatcctgcccctcgccttttaggctcaggacggaaggtcagttgccatggttaccgaggaccctggttactctggtgctgtcctgttttactggaccccgcctcccagccccaggggtgcctgtgggggtccatttgggtacgtctgggcccccactttcaccagtttctgcggccttccaccgggcctgaaccacagcggaggagctccgctaagacctccccacccccgctgggggtgggggcgggtgtccgtccggaaatgaaggaatagcccgaggaccgggctggggtttatttaaactgttctgtgtgggtctggggagggagagcaccttaatattattggggttggttggggtggggcaggatctcagccataaagtgccagtttgcttagttctcactgtctcctggtctgtgctgccctgctctggggatgcacggcggcagggtgggggagggaggttcctcgcaggtctcagcccgggacagggtcttgcaagcagcctcctgggcagtcgtaagggttgcggcgtgatgtcttcaataaattaagttttatttgga

SEQ ID NO: 296873 - DNA, 841 bp, Homo sapiens
tcgttgacaacaggacacgacggacagggcaattcaacagaagacctcacaagcgcctccttctggacaccctgcagctcagcaagtgatagcggaggcaccacgaagctgtgaactcagagcccctccctgctaccaaggcccagctatggccccagggttgaaaagttatgagggtcagggcagtatctctctgcctatttattggggtgcctatttattggggatctgcattccccgctgcccaatcatttgcaatgccctaattagggcatcctgcccctcgccttttaggctcaggacggaaggtcagttgccatggttaccgaggaccctggttactctggtgctgtcctgttttactggaccccgcctcccagccccaggggtgcctgtgggggtccatttgggtacgtctgggcccccactttcaccagtttctgcggccttccaccgggcctgaaccacagcggaggagctccgctaagacctccccacccccgctgggggtgggggcgggtgtccgtccggaaatgaaggaatagcccgaggaccgggctggggtttatttaaactgttctgtgtgggtctggggagggagagcaccttaatattattggggttggttggggtggggcaggatctcagccataaagtgccagtttgcttagttctcactgtctcctggtctgtgctgccctgctctggggatgcacggcggcagggtgggggagggaggttcctcgcaggtctcagcccgggacagggtcttgcaagcagcctcctgggcagtcgtaagggttgcggcgtgatgtcttcaataaattaagttttatttgga

SEQ ID NO: 296874 - DNA, 948 bp, Homo sapiens
acggcttacgctacgagcgctggctgaaatcggacctcacaagcgcctccttctggacaccctgcagctcagcaagtgatagcggaggcaccacgaagctgtgaactcagagcccctccctgctaccaaggcccagctatggccccagggttgaaaagttatgagggtcagggcagtatctctctgcctatttattggggtgcctatttattggggatctgcattccccgctgcccaatcatttgcaatgccctaattagggcatcctgcccctcgccttttaggctcaggacggaaggtcagttgccatggttaccgaggaccctggttactctggtgctgtcctgttttactggaccccgcctcccagccccaggggtgcctgtgggggtccatttgggtacgtctgggcccccactttcaccagtttctgcggccttccaccgggcctgaaccacagcggaggagctccgctaagacctccccacccccgctgggggtgggggcgggtgtccgtccggaaatgaaggaatagcccgaggaccgggctggggtttatttaaactgttctgtgtgggtctggggagggagagcaccttaatattattggggttggttggggtggggcaggatctcagccataaagtgccagtttgcttagttctcactgtctcctggtctgtgctgccctgctctggggatgcacggcggcagggtgggggagggaggttcctcgcaggtctcagcccgggacagggtcttgcaagcagcctcctgggcagtcgtaagggttgcggcgtgatgtcttcaataaattaagttttatttggaattcgcggatgtgagttcccagaaattcctctccctccacacacgaacaaatttgttgggggcgctctgggccccagagaaaagttttaaacaccatctctgtggggccggcgggcc

SEQ ID NO: 296875 - DNA, 598 bp, Homo sapiens
gtgaggtgactctagaggattcgggcattctggactggaagcgggaggccttctgccagctgttgcagctcatgaagaacaagcactccaagcaggacgagcccgacatgatctcagtcttcataggcacctggaacatgggaagtgtaccacctccaaaaaacgtgacatcctggttcacatcgaagggtctggggaagaccctggacgaggtcacagtgaccataccccatgacatctatgtctttgggacccaggagaactcagtgggcgaccgcgagtggctggacctactgcgcgggggcctcaaggagcttacggatctggattaccgcccgattgccatgcaatcactgtggaatatcaaggtggcagtgctggtcaagccagagcacgagaaccgtatcagccatgtcagtacgtccagtgtgaagactggcatcgccaacaccctggggaacaagggggctgtgggcgtctccttcatgtttaatggcacctcatttggctttgtgaattgtcacctcacctcgggaaatgagaagacggctcgaggaccaaactactcaacatctccagtccggtcacgctcgatcct

SEQ ID NO: 296876 - DNA, 505 bp, Homo sapiens
gccaactggcagggtatccctgtggacggggggcttcctggatgcctacccgcccctgagtggctgctgttcccccagaagcgggaggccttctgccagctgttgcagctcatgaagaacaagcactccaagcaggacgagcccgacatgatctcagtcttcataggcacctggaacatgggaagtgtaccacctccaaaaaacgtgacatcctggttcacatcgaagggtctggggaagaccctggacgaggtcacagtgaccataccccatgacatctatgtctttgggacccaggagaactcagtgggcgaccgcgagtggctggacctactgcgcgggggcctcaaggagcttacggatctggattaccgcccggtgagggggggtcatcttgtccaggaccctgtcctcacacaccacctccaaactagcctacttgacttcatgggcaaccctgggagcacagcttcactggctttttctctggtccctgagcatatcc

SEQ ID NO: 296877 - DNA, 3856 bp, Homo sapiens
agagcaagatcactgtattttggaaagagttgattgacccaagactgattattgaatctccaagtaacacatcaagtacagaacctgccacagacaggggagcaggaactagagagcctggtgctgaagctgtcagtgctaaaggacttcctgtcaggcatccagaagaaggccctgaaggccctacaggacatgagctccacagcacccccagctccgcagccatccacacgtaaggccaagaccatccccgtgcaggcctttgaggtgaagctagatgtgaccctgggtgacctgaccaagattgggaagtcacagaagttcacgctgagcgtggatgtggagggtgggcggctggtgctgctgcggagacagcgggactcccaggaggactggaccaccttcacgcacgaccgcatccgccagctcattaagtcccagcgtgtccagaacaagctgggtgttgtgtttgagaaggagaaggaccggactcagcgcaaggacttcatctttgtcagtgcccggaagcgggaggccttctgccagctgttgcagctcatgaagaacaagcactccaagcaggacgagcccgacatgatctcagtcttcataggcacctggaacatgggaagtgtaccacctccaaaaaacgtgacatcctggttcacatcgaagggtctggggaagaccctggacgaggtcacagtgaccataccccatgacatctatgtctttgggacccaggagaactcagtgggcgaccgcgagtggctggacctactgcgcgggggcctcaaggagcttacggatctggattaccgcccgattgccatgcaatcactgtggaatatcaaggtggcagtgctggtcaagccagagcacgagaaccgtatcagccatgtcagtacgtccagtgtgaagactggcatcgccaacaccctggggaacaagggggctgtgggcgtctccttcatgtttaatggcacctcatttggctttgtgaattgtcacctcacctcgggaaatgagaagacggctcggaggaaccaaaactacttggacatcctgcggctgctctcgctgggcgaccggcagctcaatgcctttgacatctctctgcgtttcacacacctcttctggtttggggacctcaactaccgcctggacatggatatccaggagatcctgaactacatcagcaggaaagagtttgagcccctcctcagggtggaccagctcaacctggagcgggagaagcacaaggtcttccttcgattcagtgaggaggagatctccttcccacccacctaccgctatgagcggggttcccgggacacatatgcctggcacaagcagaagccaactggggtccggaccaatgtgccctcatggtgtgaccggattctgtggaaatcctaccctgaaactcacatcatctgcaattcttatggttgcactgatgacatcgtcaccagcgaccattcccccgtgtttgggacatttgaggttggagttacctcccagttcatctccaagaaagggctctcaaagacttcagaccaggcctacattgagtttgagagcatcgaggccattgtgaagacagccagccgcaccaagttcttcatcgagttctactctacctgcctggaggaatacaagaagagctttgagaatgatgcccagagcagtgacaacatcaacttcctcaaagtgcagtggtcttcacgccagctgcccacgctcaaaccaattctggctgatatcgagtacctgcaggaccagcacctcctgctcacagtcaagtccatggatggctatgaatcctatggggagtgtgtggttgcactcaaatccatgatcggcagcacggcccaacagttcctgaccttcctatcccaccgtggcgaggagacaggcaatatcagaggctccatgaaggtgcgggtgcccacggagcgcctgggcacccgtgagcggctctacgagtggatcagcattgataaggatgaggcaggagcaaagagcaaagccccctctgtgtcccgagggagccaggagcccaggtcagggagccgcaagccagccttcacagaggcctcctgcccgctctccaggttatttgaagaaccagagaaaccgccaccaacggggaggcccccagccccaccccgagcagctccccgggaggagcccttgacccccaggttgaagccagagggagctcctgaaccagaaggggtggcggccccccacccaagaacagcttcaataaccctgcctactacgtccttgaaggggtcccgcaccagctgctgcccccggagccaccctcgcctgccagggcccctgtcccatctgccaccaagaacaaagtggccattacagtgcctgctccacagcttgggcaccaccggcaccctcgtgtgggagaggggagttcttcagatgaggagtctggaggcacactgccccctccagactttccacctccaccactgccggactcagccatcttcctgccccccagcctggatcctttaccagggccagtggtccggggccgtggtggggctgaggcccgtggcccaccacctcccaaggcccatccaaggcctccactgcccccaggcccctcaccagccagcactttcctgggggaagtggccagtggggatgaccggtcctgctcggtgctgcagatggccaagacgctgagcgaggtggactatgcccctgctgggcctgcacgctcagcgctcctcccaggccccctggagctgcagcccccccggggactgccctcggactatggccggcccctcagcttccctccaccccgcatccgggagagcatccaggaagacctggcagaggaggctccgtgcctgcagggcgggcgggccagcgggctgggcgaggcaggcatgagtgcctggctgcgggccatcggcttggagcgctatgaggagggcctggtgcataatggctgggacgacctggagtttctcagtgacatcaccgaggaggacttggaggaggctggggtgcaggacccggctcacaagcgcctccttctggacaccctgcagctcagcaagtgatagcggaggcaccacgaagctgtgaactcagagcccctccctgctaccaaggcccagctatggccccagggttgaaaagttatgagggtcagggcagtatctctctgcctatttattggggtgcctatttattggggatctgcattccccgctgcccaatcatttgcaatgccctaattagggcatcctgcccctcgccttttaggctcaggacggaaggtcagttgccatggttaccgaggaccctggttactctggtgctgtcctgttttactggaccccgcctcccagccccaggggtgcctgtgggggtccatttgggtacgtctgggcccccactttcaccagtttctgcggccttccaccgggcctgaaccacagcggaggagctccgctaagacctccccacccccgctgggggtgggggcgggtgtccgtccggaaatgaaggaatagcccgaggaccgggctggggtttatttaaactgttctgtgtgggtctggggagggagagcaccttaatattattggggttggttggggtggggcaggatctcagccataaagtgccagtttgcttagttctcactgtctcctggtctgtgctgccctgctctggggatgcacggcggcagggtgggggagggaggttcctcgcaggtctcagcccgggacagggtcttgcaagcagcctcctgggcagtcgtaagggttgcggcgtgatgtcttcaataaattaagttttatttgga

SEQ ID NO: 296878 - DNA, 3369 bp, Homo sapiens
gtgaggtgactctagaggattcgggcattctggactggaagcgggaggccttctgccagctgttgcagctcatgaagaacaagcactccaagcaggacgagcccgacatgatctcagtcttcataggcacctggaacatgggaagtgtaccacctccaaaaaacgtgacatcctggttcacatcgaagggtctggggaagaccctggacgaggtcacagtgaccataccccatgacatctatgtctttgggacccaggagaactcagtgggcgaccgcgagtggctggacctactgcgcgggggcctcaaggagcttacggatctggattaccgcccgattgccatgcaatcactgtggaatatcaaggtggcagtgctggtcaagccagagcacgagaaccgtatcagccatgtcagtacgtccagtgtgaagactggcatcgccaacaccctggggaacaagggggctgtgggcgtctccttcatgtttaatggcacctcatttggctttgtgaattgtcacctcacctcgggaaatgagaagacggctcggaggaaccaaaactacttggacatcctgcggctgctctcgctgggcgaccggcagctcaatgcctttgacatctctctgcgtttcacacacctcttctggtttggggacctcaactaccgcctggacatggatatccaggagatcctgaactacatcagcaggaaagagtttgagcccctcctcagggtggaccagctcaacctggagcgggagaagcacaaggtcttccttcgattcagtgaggaggagatctccttcccacccacctaccgctatgagcggggttcccgggacacatatgcctggcacaagcagaagccaactggggtccggaccaatgtgccctcatggtgtgaccggattctgtggaaatcctaccctgaaactcacatcatctgcaattcttatggttgcactgatgacatcgtcaccagcgaccattcccccgtgtttgggacatttgaggttggagttacctcccagttcatctccaagaaagggctctcaaagacttcagaccaggcctacattgagtttgagagcatcgaggccattgtgaagacagccagccgcaccaagttcttcatcgagttctactctacctgcctggaggaatacaagaagagctttgagaatgatgcccagagcagtgacaacatcaacttcctcaaagtgcagtggtcttcacgccagctgcccacgctcaaaccaattctggctgatatcgagtacctgcaggaccagcacctcctgctcacagtcaagtccatggatggctatgaatcctatggggagtgtgtggttgcactcaaatccatgatcggcagcacggcccaacagttcctgaccttcctatcccaccgtggcgaggagacaggcaatatcagaggctccatgaaggtgcgggtgcccacggagcgcctgggcacccgtgagcggctctacgagtggatcagcattgataaggatgaggcaggagcaaagagcaaagccccctctgtgtcccgagggagccaggagcccaggtcagggagccgcaagccagccttcacagaggcctcctgcccgctctccaggttatttgaagaaccagagaaaccgccaccaacggggaggcccccagccccaccccgagcagctccccgggaggagcccttgacccccaggttgaagccagagggagctcctgaaccagaaggggtggcggccccccacccaagaacagcttcaataaccctgcctactacgtccttgaaggggtcccgcaccagctgctgcccccggagccaccctcgcctgccagggcccctgtcccatctgccaccaagaacaaagtggccattacagtgcctgctccacagcttgggcaccaccggcaccctcgtgtgggagaggggagttcttcagatgaggagtctggaggcacactgccccctccagactttccacctccaccactgccggactcagccatcttcctgccccccagcctggatcctttaccagggccagtggtccggggccgtggtggggctgaggcccgtggcccaccacctcccaaggcccatccaaggcctccactgcccccaggcccctcaccagccagcactttcctgggggaagtggccagtggggatgaccggtcctgctcggtgctgcagatggccaagacgctgagcgaggtggactatgcccctgctgggcctgcacgctcagcgctcctcccaggccccctggagctgcagcccccccggggactgccctcggactatggccggcccctcagcttccctccaccccgcatccgggagagcatccaggaagacctggcagaggaggctccgtgcctgcagggcgggcgggccagcgggctgggcgaggcaggcatgagtgcctggctgcgggccatcggcttggagcgctatgaggagggcctggtgcataatggctgggacgacctggagtttctcagtgacatcaccgaggaggacttggaggaggctggggtgcaggacccggctcacaagcgcctccttctggacaccctgcagctcagcaagtgatagcggaggcaccacgaagctgtgaactcagagcccctccctgctaccaaggcccagctatggccccagggttgaaaagttatgagggtcagggcagtatctctctgcctatttattggggtgcctatttattggggatctgcattccccgctgcccaatcatttgcaatgccctaattagggcatcctgcccctcgccttttaggctcaggacggaaggtcagttgccatggttaccgaggaccctggttactctggtgctgtcctgttttactggaccccgcctcccagccccaggggtgcctgtgggggtccatttgggtacgtctgggcccccactttcaccagtttctgcggccttccaccgggcctgaaccacagcggaggagctccgctaagacctccccacccccgctgggggtgggggcgggtgtccgtccggaaatgaaggaatagcccgaggaccgggctggggtttatttaaactgttctgtgtgggtctggggagggagagcaccttaatattattggggttggttggggtggggcaggatctcagccataaagtgccagtttgcttagttctcactgtctcctggtctgtgctgccctgctctggggatgcacggcggcagggtgggggagggaggttcctcgcaggtctcagcccgggacagggtcttgcaagcagcctcctgggcagtcgtaagggttgcggcgtgatgtcttcaataaattaagttttatttgga

SEQ ID NO: 296879 - DNA, 4887 bp, Homo sapiens
ggcaagtggccgcctggagcccagggccgctgtccggggaagggggcgccggagcagcccggaattcctgaggccggcgctgcaggcagcggcggctgcgcggtgaacgaggcggcctgcgcggcggagtgctgagtcccgatccccggctctgtccggcccacggatcctcaagcccgggccccgggcccggccccagcctcagccctgagcgtctcggggcggatggcgcggggcggcgggggcgggcggtgctgagccctgcgcgggccatggcctcggcctgcggggcgccgggcccggggggcgccctgggcagccaggccccctcctggtaccaccgcgacctgagccgggcggccgcggaggagctgctggcccgggcgggccgcgatggcagcttcctggtccgagacagcgagagcgtggcgggggccttcgcgctctgcgtcctgtatcagaagcatgtgcacacgtatcgcattctgcctgatggagaagatttcttggctgtgcagacctcgcagggtgtgcctgtgcgccgcttccagaccctgggtgagctcatcggcctgtacgcccagcccaaccagggccttgtgtgcgccctgcttcttcctgtagagggtgagcgagagccggacccaccggatgaccgggatgcctcagatggggaggatgagaagcccccgctgcccccgcgctctggctccaccagcatttctgcccccactgggcccagcagtcccctgccagctcctgagactcccacagctccagctgctgagagtgctcccaatgggctgagcaccgtctcgcacgactacctgaaaggcagctatgggctggacctggaagctgtgaggggtggagccagccacctgccccacctcacccgtaccctcgctacctcatgccggaggctgcacagtgaggtggacaaggtcctgtcaggcctggagatcctgtccaaggtgtttgaccagcagagctcgcccatggtgacccgccttttgcagcagcagaacctgccacagacaggggagcaggaactagagagcctggtgctgaagctgtcagtgctaaaggacttcctgtcaggcatccagaagaaggccctgaaggccctacaggacatgagctccacagcacccccagctccgcagccatccacacgtaaggccaagaccatccccgtgcaggcctttgaggtgaagctagatgtgaccctgggtgacctgaccaagattgggaagtcacagaagttcacgctgagcgtggatgtggagggtgggcggctggtgctgctgcggagacagcgggactcccaggaggactggaccaccttcacgcacgaccgcatccgccagctcattaagtcccagcgtgtccagaacaagctgggtgttgtgtttgagaaggagaaggaccggactcagcgcaaggacttcatctttgtcagtgcccggaagcgggaggccttctgccagctgttgcagctcatgaagaacaagcactccaagcaggacgagcccgacatgatctcagtcttcataggcacctggaacatgggaagtgtaccacctccaaaaaacgtgacatcctggttcacatcgaagggtctggggaagaccctggacgaggtcacagtgaccataccccatgacatctatgtctttgggacccaggagaactcagtgggcgaccgcgagtggctggacctactgcgcgggggcctcaaggagcttacggatctggattaccgcccgattgccatgcaatcactgtggaatatcaaggtggcagtgctggtcaagccagagcacgagaaccgtatcagccatgtcagtacgtccagtgtgaagactggcatcgccaacaccctggggaacaagggggctgtgggcgtctccttcatgtttaatggcacctcatttggctttgtgaattgtcacctcacctcgggaaatgagaagacggctcggaggaaccaaaactacttggacatcctgcggctgctctcgctgggcgaccggcagctcaatgcctttgacatctctctgcgtttcacacacctcttctggtttggggacctcaactaccgcctggacatggatatccaggagatcctgaactacatcagcaggaaagagtttgagcccctcctcagggtggaccagctcaacctggagcgggagaagcacaaggtcttccttcgattcagtgaggaggagatctccttcccacccacctaccgctatgagcggggttcccgggacacatatgcctggcacaagcagaagccaactggggtccggaccaatgtgccctcatggtgtgaccggattctgtggaaatcctaccctgaaactcacatcatctgcaattcttatggttgcactgatgacatcgtcaccagcgaccattcccccgtgtttgggacatttgaggttggagttacctcccagttcatctccaagaaagggctctcaaagacttcagaccaggcctacattgagtttgagagcatcgaggccattgtgaagacagccagccgcaccaagttcttcatcgagttctactctacctgcctggaggaatacaagaagagctttgagaatgatgcccagagcagtgacaacatcaacttcctcaaagtgcagtggtcttcacgccagctgcccacgctcaaaccaattctggctgatatcgagtacctgcaggaccagcacctcctgctcacagtcaagtccatggatggctatgaatcctatggggagtgtgtggttgcactcaaatccatgatcggcagcacggcccaacagttcctgaccttcctatcccaccgtggcgaggagacaggcaatatcagaggctccatgaaggtgcgggtgcccacggagcgcctgggcacccgtgagcggctctacgagtggatcagcattgataaggatgaggcaggagcaaagagcaaagccccctctgtgtcccgagggagccaggagcccaggtcagggagccgcaagccagccttcacagaggcctcctgcccgctctccaggttatttgaagaaccagagaaaccgccaccaacggggaggcccccagccccaccccgagcagctccccgggaggagcccttgacccccaggttgaagccagagggagctcctgaaccagaaggggtggcggccccccacccaagaacagcttcaataaccctgcctactacgtccttgaaggggtcccgcaccagctgctgcccccggagccaccctcgcctgccagggcccctgtcccatctgccaccaagaacaaagtggccattacagtgcctgctccacagcttgggcaccaccggcaccctcgtgtgggagaggggagttcttcagatgaggagtctggaggcacactgccccctccagactttccacctccaccactgccggactcagccatcttcctgccccccagcctggatcctttaccagggccagtggtccggggccgtggtggggctgaggcccgtggcccaccacctcccaaggcccatccaaggcctccactgcccccaggcccctcaccagccagcactttcctgggggaagtggccagtggggatgaccggtcctgctcggtgctgcagatggccaagacgctgagcgaggtggactatgcccctgctgggcctgcacgctcagcgctcctcccaggccccctggagctgcagcccccccggggactgccctcggactatggccggcccctcagcttccctccaccccgcatccgggagagcatccaggaagacctggcagaggaggctccgtgcctgcagggcgggcgggccagcgggctgggcgaggcaggcatgagtgcctggctgcgggccatcggcttggagcgctatgaggagggcctggtgcataatggctgggacgacctggagtttctcaggtgggggaggggctggccccgggggcggagctggggccctcaggatccccttgcccatctcacttcccagcctgttttactccacagtgacatcaccgaggaggacttggaggaggctggggtgcaggacccggctcacaagcgcctccttctggacaccctgcagctcagcaagtgatagcggaggcaccacgaagctgtgaactcagagcccctccctgctaccaaggcccagctatggccccagggttgaaaagttatgagggtcagggcagtatctctctgcctatttattggggtgcctatttattggggatctgcattccccgctgcccaatcatttgcaatgccctaattagggcatcctgcccctcgccttttaggctcaggacggaaggtcagttgccatggttaccgaggaccctggttactctggtgctgtcctgttttactggaccccgcctcccagccccaggggtgcctgtgggggtccatttgggtacgtctgggcccccactttcaccagtttctgcggccttccaccgggcctgaaccacagcggaggagctccgctaagacctccccacccccgctgggggtgggggcgggtgtccgtccggaaatgaaggaatagcccgaggaccgggctggggtttatttaaactgttctgtgtgggtctggggagggagagcaccttaatattattggggttggttggggtggggcaggatctcagccataaagtgccagtttgcttagttctcactgtctcctggtctgtgctgccctgctctggggatgcacggcggcagggtgggggagggaggttcctcgcaggtctcagcccgggacagggtcttgcaagcagcctcctgggcagtcgtaagggttgcggcgtgatgtcttcaataaattaagttttatttgga

SEQ ID NO: 296880 - DNA, 5088 bp, Homo sapiens
ggcaagtggccgcctggagcccagggccgctgtccggggaagggggcgccggagcagcccggaattcctgaggccggcgctgcaggcagcggcggctgcgcggtgaacgaggcggcctgcgcggcggagtgctgagtcccgatccccggctctgtccggcccacggatcctcaagcccgggccccgggcccggccccagcctcagccctgagcgtctcggggcggatggcgcggggcggcgggggcgggcggtgctgagccctgcgcgggccatggcctcggcctgcggggcgccgggcccggggggcgccctgggcagccaggccccctcctggtaccaccgcgacctgagccgggcggccgcggaggagctgctggcccgggcgggccgcgatggcagcttcctggtccgagacagcgagagcgtggcgggggccttcgcgctctgcgtcctgtatcagaagcatgtgcacacgtatcgcattctgcctgatggagaagatttcttggctgtgcagacctcgcagggtgtgcctgtgcgccgcttccagaccctgggtgagctcatcggcctgtacgcccagcccaaccagggccttgtgtgcgccctgcttcttcctgtagagggtgagcgagagccggacccaccggatgaccgggatgcctcagatggggaggatgagaagcccccgctgcccccgcgctctggctccaccagcatttctgcccccactgggcccagcagtcccctgccagctcctgagactcccacagctccagctgctgagagtgctcccaatgggctgagcaccgtctcgcacgactacctgaaaggcagctatgggctggacctggaagctgtgaggggtggagccagccacctgccccacctcacccgtaccctcgctacctcatgccggaggctgcacagtgaggtggacaaggtcctgtcaggcctggagatcctgtccaaggtgtttgaccagcagagctcgcccatggtgacccgccttttgcagcagcagaacctgccacagacaggggagcaggaactagagagcctggtgctgaagctgtcagtgctaaaggacttcctgtcaggcatccagaagaaggccctgaaggccctacaggacatgagctccacagcacccccagctccgcagccatccacacgtaaggccaagaccatccccgtgcaggcctttgaggtgaagctagatgtgaccctgggtgacctgaccaagattgggaagtcacagaagttcacgctgagcgtggatgtggagggtgggcggctggtgctgctgcggagacagcgggactcccaggaggactggaccaccttcacgcacgaccgcatccgccagctcattaagtcccagcgtgtccagaacaagctgggtgttgtgtttgagaaggagaaggaccggactcagcgcaaggacttcatctttgtcagtgcccggaagcgggaggccttctgccagctgttgcagctcatgaagaacaagcactccaagcaggacgagcccgacatgatctcagtcttcataggcacctggaacatgggaagtgtaccacctccaaaaaacgtgacatcctggttcacatcgaagggtctggggaagaccctggacgaggtcacagtgaccataccccatgacatctatgtctttgggacccaggagaactcagtgggcgaccgcgagtggctggacctactgcgcgggggcctcaaggagcttacggatctggattaccgcccgattgccatgcaatcactgtggaatatcaaggtggcagtgctggtcaagccagagcacgagaaccgtatcagccatgtcagtacgtccagtgtgaagactggcatcgccaacaccctggggaacaagggggctgtgggcgtctccttcatgtttaatggcacctcatttggctttgtgaattgtcacctcacctcgggaaatgagaagacggctcggaggaaccaaaactacttggacatcctgcggctgctctcgctgggcgaccggcagctcaatgcctttgacatctctctgcgtttcacacacctcttctggtttggggacctcaactaccgcctggacatggatatccaggagatcctgaactacatcagcaggaaagagtttgagcccctcctcagggtggaccagctcaacctggagcgggagaagcacaaggtcttccttcgattcagtgaggaggagatctccttcccacccacctaccgctatgagcggggttcccgggacacatatgcctggcacaagcagaagccaactggggtccggaccaatgtgccctcatggtgtgaccggattctgtggaaatcctaccctgaaactcacatcatctgcaattcttatggttgcactgatgacatcgtcaccagcgaccattcccccgtgtttgggacatttgaggttggagttacctcccagttcatctccaagaaagggctctcaaagacttcagaccaggcctacattgagtttgagagcatcgaggccattgtgaagacagccagccgcaccaagttcttcatcgagttctactctacctgcctggaggaatacaagaagagctttgagaatgatgcccagagcagtgacaacatcaacttcctcaaagtgcagtggtcttcacgccagctgcccacgctcaaaccaattctggctgatatcgagtacctgcaggaccagcacctcctgctcacagtcaagtccatggatggctatgaatcctatggggagtgtgtggttgcactcaaatccatgatcggcagcacggcccaacagttcctgaccttcctatcccaccgtggcgaggagacaggcaatatcagaggctccatgaaggtgcgggtgcccacggagcgcctgggcacccgtgagcggctctacgagtggatcagcattgataaggatgaggcaggagcaaagagcaaagccccctctgtgtcccgagggagccaggagcccaggtcagggagccgcaagccagccttcacagaggcctcctgcccgctctccaggttatttgaagaaccagagaaaccgccaccaacggggaggcccccagccccaccccgagcagctccccgggaggagcccttgacccccaggttgaagccagagggagctcctgaaccagaaggggtggcggccccccacccaagaacagcttcaataaccctgcctactacgtccttgaaggggtcccgcaccagctgctgcccccggagccaccctcgcctgccagggcccctgtcccatctgccaccaagaacaaagtggccattacagtgcctgctccacagcttgggcaccaccggcaccctcgtgtgggagaggggagttcttcagatgaggagtctggaggcacactgccccctccagactttccacctccaccactgccggactcagccatcttcctgccccccagcctggatcctttaccagggccagtggtccggggccgtggtggggctgaggcccgtggcccaccacctcccaaggcccatccaaggcctccactgcccccaggcccctcaccagccagcactttcctgggggaagtggccagtggggatgaccggtcctgctcggtgctgcagatggccaagacgctgagcgaggtggactatgcccctgctgggcctgcacgctcagcgctcctcccaggccccctggagctgcagcccccccggggactgccctcggactatggccggcccctcagcttccctccaccccgcatccgggagagcatccaggaagacctggcagaggaggctccgtgcctgcagggcgggcgggccagcgggctgggcgaggcaggcatgagtgcctggctgcgggccatcggcttggagcgctatgaggagggcctggtgcataatggctgggacgacctggagtttctcagtgacatcaccgaggaggacttggaggaggctggggtgcaggacccggctcacaagcgcctccttctggacaccctgcagctcagcaagtgatagcggaggcaccacgaagctgtgaactcagagcccctccctgctaccaaggcccagctatggccccagggttgaaaagttatgagggtcagggcagtatctctctgcctatttattggggtgcctatttattggggatctgcattccccgctgcccaatcatttgcaatgccctaattagggcatcctgcccctcgccttttaggctcaggacggaaggtcagttgccatggttaccgaggaccctggttactctggtgctgtcctgttttactggaccccgcctcccagccccaggggtgcctgtgggggtccatttgggtacgtctgggcccccactttcaccagtttctgcggccttccaccgggcctgaaccacagcggaggagctccgctaagacctccccacccccgctgggggtgggggcgggtgtccgtccggaaatgaaggaatagcccgaggaccgggctggggtttatttaaactgttctgtgtgggtctggggagggagagcaccttaatattattggggttggttggggtggggcaggatctcagccataaagtgccagtttgcttagttctcactgtctcctggtctgtgctgccctgctctggggatgcacggcggcagggtgggggagggaggttcctcgcaggtctcagcccgggacagggtcttgcaagcagcctcctgggcagtcgtaagggttgcggcgtgatgtcttcaataaattaagttttatttggaaaaaaaaaaaaaaaaaaggggggcctactggcggggacccccggggggtcccccagtgaactccccccggaggacttgggacgcagaggcggggcgtcgcaagagacgcgcgggctacataaggcgggccataccgttcctgggagcacccgtgaagcctacaccgacaggtagactaggcgggaaaggcacgcacagcgacgggggacacacttcgagaagcggacaccccatagttaccgaggggcgcaacataatggcccccaagggttagccacacgtcacaat

SEQ ID NO: 296881 - DNA, 4666 bp, Homo sapiens
ggcaagtggccgcctggagcccagggccgctgtccggggaagggggcgccggagcagcccggaattcctgaggccggcgctgcaggcagcggcggctgcgcggtgaacgaggcggcctgcgcggcggagtgctgagtcccgatccccggctctgtccggcccacggatcctcaagcccgggccccgggcccggccccagcctcagccctgagcgtctcggggcggatggcgcggggcggcgggggcgggcggtgctgagccctgcgcgggccatggcctcggcctgcggggcgccgggcccggggggcgccctgggcagccaggccccctcctggtaccaccgcgacctgagccgggcggccgcggaggagctgctggcccgggcgggccgcgatggcagcttcctggtccgagacagcgagagcgtggcgggggccttcgcgctctgcgtcctgtatcagaagcatgtgcacacgtatcgcattctgcctgatggagaagatttcttggctgtgcagacctcgcagggtgtgcctgtgcgccgcttccagaccctgggtgagctcatcggcctgtacgcccagcccaaccagggccttgtgtgcgccctgcttcttcctgtagagggtgagcgagagccggacccaccggatgaccgggatgcctcagatggggaggatgagaagcccccgctgcccccgcgctctggctccaccagcatttctgcccccactgggcccagcagtcccctgccagctcctgagactcccacagctccagctgctgagagtgctcccaatgggctgagcaccgtctcgcacgactacctgaaaggcagctatgggctggacctggaagctgtgaggggtggagccagccacctgccccacctcacccgtaccctcgctacctcatgccggaggctgcacagtgaggtggacaaggtcctgtcaggcctggagatcctgtccaaggtgtttgaccagcagagctcgcccatggtgacccgccttttgcagcagcagaacctgccacagacaggggagcaggaactagagagcctggtgctgaagctgtcagtgctaaaggacttcctgtcaggcatccagaagaaggccctgaaggccctacaggacatgagctccacagcacccccagctccgcagccatccacacgtaaggccaagaccatccccgtgcaggcctttgaggtgaagctagatgtgaccctgggtgacctgaccaagattgggaagtcacagaagttcacgctgagcgtggatgtggagggtgggcggctggtgctgctgcggagacagcgggactcccaggaggactggaccaccttcacgcacgaccgcatccgccagctcattaagtcccagcgtgtccagaacaagctgggtgttgtgtttgagaaggagaaggaccggactcagcgcaaggacttcatctttgtcagtgcccggaagcgggaggccttctgccagctgttgcagctcatgaagaacaagcactccaagcaggacgagcccgacatgatctcagtcttcataggcacctggaacatgggaagtgtaccacctccaaaaaacgtgacatcctggttcacatcgaagggtctggggaagaccctggacgaggtcacagtgaccataccccatgacatctatgtctttgggacccaggagaactcagtgggcgaccgcgagtggctggacctactgcgcgggggcctcaaggagcttacggatctggattaccgcccgattgccatgcaatcactgtggaatatcaaggtggcagtgctggtcaagccagagcacgagaaccgtatcagccatgtcagtacgtccagtgtgaagactggcatcgccaacaccctggggaacaagggggctgtgggcgtctccttcatgtttaatggcacctcatttggctttgtgaattgtcacctcacctcgggaaatgagaagacggctcggaggaaccaaaactacttggacatcctgcggctgctctcgctgggcgaccggcagctcaatgcctttgacatctctctgcgtttcacacacctcttctggtttggggacctcaactaccgcctggacatggatatccaggagatcctgaactacatcagcaggaaagagtttgagcccctcctcagggtggaccagctcaacctggagcgggagaagcacaaggtcttccttcgattcagtgaggaggagatctccttcccacccacctaccgctatgagcggggttcccgggacacatatgcctggcacaagcagaagccaactggggtccggaccaatgtgccctcatggtgtgaccggattctgtggaaatcctaccctgaaactcacatcatctgcaattcttatggttgcactgatgacatcgtcaccagcgaccattcccccgtgtttgggacatttgaggttggagttacctcccagttcatctccaagaaagggctctcaaagacttcagaccaggcctacattgagtttgagagcatcgaggccattgtgaagacagccagccgcaccaagttcttcatcgagttctactctacctgcctggaggaatacaagaagagctttgagaatgatgcccagagcagtgacaacatcaacttcctcaaagtgcagtggtcttcacgccagctgcccacgctcaaaccaattctggctgatatcgagtacctgcaggaccagcacctcctgctcacagtcaagtccatggatggctatgaatcctatggggagtgtgtggttgcactcaaatccatgatcggcagcacggcccaacagttcctgaccttcctatcccaccgtggcgaggagacaggcaatatcagaggctccatgaaggtgcgggtgcccacggagcgcctgggcacccgtgagcggctctacgagtggatcagcattgataaggatgaggcaggagcaaagagcaaagccccctctgtgtcccgagggagccaggagcccaggtcagggagccgcaagccagccttcacagaggcctcctgcccgctctccaggttatttgaagaaccagagaaaccgccaccaacggggaggcccccagccccaccccgagcagctccccgggaggagcccttgacccccaggttgaagccagagggagctcctgaaccagaaggggtggcggccccccacccaagaacagcttcaataaccctgcctactacgtccttgaaggggtcccgcaccagctgctgcccccggagccaccctcgcctgccagggcccctgtcccatctgccaccaagaacaaagtggccattacagtgcctgctccacagcttgggcaccaccggcaccctcgtgtgggagaggggagttcttcagatgaggagtctggaggcacactgccccctccagactttccacctccaccactgccggactcagccatcttcctgccccccagcctggatcctttaccagggccagtggtccggggccgtggtggggctgaggcccgtggcccaccacctcccaaggcccatccaaggcctccactgcccccaggcccctcaccagccagcactttcctgggggaagtggccagtggggatgaccggtcctgctcggtgctgcagatggccaagacgctgagcgaggtggactatgcccctgctgggcctgcacgctcagcgctcctcccaggccccctggagctgcagcccccccggggactgccctcggactatggccggcccctcagcttccctccaccccgcatccgggagagcatccaggaagacctggcagaggagtgacatcaccgaggaggacttggaggaggctggggtgcaggacccggctcacaagcgcctccttctggacaccctgcagctcagcaagtgatagcggaggcaccacgaagctgtgaactcagagcccctccctgctaccaaggcccagctatggccccagggttgaaaagttatgagggtcagggcagtatctctctgcctatttattggggtgcctatttattggggatctgcattccccgctgcccaatcatttgcaatgccctaattagggcatcctgcccctcgccttttaggctcaggacggaaggtcagttgccatggttaccgaggaccctggttactctggtgctgtcctgttttactggaccccgcctcccagccccaggggtgcctgtgggggtccatttgggtacgtctgggcccccactttcaccagtttctgcggccttccaccgggcctgaaccacagcggaggagctccgctaagacctccccacccccgctgggggtgggggcgggtgtccgtccggaaatgaaggaatagcccgaggaccgggctggggtttatttaaactgttctgtgtgggtctggggagggagagcaccttaatattattggggttggttggggtggggcaggatctcagccataaagtgccagtttgcttagttctcactgtctcctggtctgtgctgccctgctctggggatgcacggcggcagggtgggggagggaggttcctcgcaggtctcagcccgggacagggtcttgcaagcagcctcctgggcagtcgtaagggttgcggcgtgatgtcttcaataaattaagttttatttgga

SEQ ID NO: 296882 - DNA, 4841 bp, Homo sapiens
ggcaagtggccgcctggagcccagggccgctgtccggggaagggggcgccggagcagcccggaattcctgaggccggcgctgcaggcagcggcggctgcgcggtgaacgaggcggcctgcgcggcggagtgctgagtcccgatccccggctctgtccggcccacggatcctcaagcccgggccccgggcccggccccagcctcagccctgagcgtctcggggcggatggcgcggggcggcgggggcgggcggtgctgagccctgcgcgggccatggcctcggcctgcggggcgccgggcccggggggcgccctgggcagccaggccccctcctggtaccaccgcgacctgagccgggcggccgcggaggagctgctggcccgggcgggccgcgatggcagcttcctggtccgagacagcgagagcgtggcgggggccttcgcgctctgcgtcctgtatcagaagcatgtgcacacgtatcgcattctgcctgatggagaagatttcttggctgtgcagacctcgcagggtgtgcctgtgcgccgcttccagaccctgggtgagctcatcggcctgtacgcccagcccaaccagggccttgtgtgcgccctgcttcttcctgtagagggtgagcgagagccggacccaccggatgaccgggatgcctcagatggggaggatgagaagcccccgctgcccccgcgctctggctccaccagcatttctgcccccactgggcccagcagtcccctgccagctcctgagactcccacagctccagctgctgagagtgctcccaatgggctgagcaccgtctcgcacgactacctgaaaggcagctatgggctggacctggaagctgtgaggggtggagccagccacctgccccacctcacccgtaccctcgctacctcatgccggaggctgcacagtgaggtggacaaggtcctgtcaggcctggagatcctgtccaaggtgtttgaccagcagagctcgcccatggtgacccgccttttgcagcagcagaacctgccacagacaggggagcaggaactagagagcctggtgctgaagctgtcagtgctaaaggacttcctgtcaggcatccagaagaaggccctgaaggccctacaggacatgagctccacagcacccccagctccgcagccatccacacgtaaggccaagaccatccccgtgcaggcctttgaggtgaagctagatgtgaccctgggtgacctgaccaagattgggaagtcacagaagttcacgctgagcgtggatgtggagggtgggcggctggtgctgctgcggagacagcgggactcccaggaggactggaccaccttcacgcacgaccgcatccgccagctcattaagtcccagcgtgtccagaacaagctgggtgttgtgtttgagaaggagaaggaccggactcagcgcaaggacttcatctttgtcagtgcccggaagcgggaggccttctgccagctgttgcagctcatgaagaacaagcactccaagcaggacgagcccgacatgatctcagtcttcataggcacctggaacatgggaagtgtaccacctccaaaaaacgtgacatcctggttcacatcgaagggtctggggaagaccctggacgaggtcacagtgaccataccccatgacatctatgtctttgggacccaggagaactcagtgggcgaccgcgagtggctggacctactgcgcgggggcctcaaggagcttacggatctggattaccgcccgattgccatgcaatcactgtggaatatcaaggtggcagtgctggtcaagccagagcacgagaaccgtatcagccatgtcagtacgtccagtgtgaagactggcatcgccaacaccctggggaacaagggggctgtgggcgtctccttcatgtttaatggcacctcatttggctttgtgaattgtcacctcacctcgggaaatgagaagacggctcggaggaaccaaaactacttggacatcctgcggctgctctcgctgggcgaccggcagctcaatgcctttgacatctctctgcgtttcacacacctcttctggtttggggacctcaactaccgcctggacatggatatccaggagatcctgaactacatcagcaggaaagagtttgagcccctcctcagggtggaccagctcaacctggagcgggagaagcacaaggtcttccttcgattcagtgaggaggagatctccttcccacccacctaccgctatgagcggggttcccgggacacatatgcctggcacaagcagaagccaactggggtccggaccaatgtgccctcatggtgtgaccggattctgtggaaatcctaccctgaaactcacatcatctgcaattcttatggttgcactgatgacatcgtcaccagcgaccattcccccgtgtttgggacatttgaggttggagttacctcccagttcatctccaagaaagggctctcaaagacttcagaccaggcctacattgagtttgagagcatcgaggccattgtgaagacagccagccgcaccaagttcttcatcgagttctactctacctgcctggaggaatacaagaagagctttgagaatgatgcccagagcagtgacaacatcaacttcctcaaagtgcagtggtcttcacgccagctgcccacgctcaaaccaattctggctgatatcgagtacctgcaggaccagcacctcctgctcacagtcaagtccatggatggctatgaatcctatggggagtgtgtggttgcactcaaatccatgatcggcagcacggcccaacagttcctgaccttcctatcccaccgtggcgaggagacaggcaatatcagaggctccatgaaggtgcgggtgcccacggagcgcctgggcacccgtgagcggctctacgagtggatcagcattgataaggatgaggcaggagcaaagagcaaagccccctctgtgtcccgagggagccaggagcccaggtcagggagccgcaagccagccttcacagaggcctcctgcccgctctccaggttatttgaagaaccagagaaaccgccaccaacggggaggcccccagccccaccccgagcagctccccgggaggagcccttgacccccaggttgaagccagagggagctcctgaaccagaaggggtggcggccccccacccaagaacagcttcaataaccctgcctactacgtccttgaaggggtcccgcaccagctgctgcccccggagccaccctcgcctgccagggcccctgtcccatctgccaccaagaacaaagtggccattacagtgcctgctccacagcttgggcaccaccggcaccctcgtgtgggagaggggagttcttcagatgaggagtctggaggcacactgccccctccagactttccacctccaccactgccggactcagccatcttcctgccccccagcctggatcctttaccagggccagtggtccggggccgtggtggggctgaggcccgtggcccaccacctcccaaggcccatccaaggcctccactgcccccaggcccctcaccagccagcactttcctgggggaagtggccagtggggatgaccggtcctgctcggtgctgcagatggccaagacgctgagcgaggtggactatgcccctgctgggcctgcacgctcagcgctcctcccaggccccctggagctgcagcccccccggggactgccctcggactatggccggcccctcagcttccctccaccccgcatccgggagagcatccaggaagacctggcagaggaggctccgtgcctgcagggcgggcgggccagcgggctgggcgaggcaggcatgagtgcctggctgcgggccatcggcttggagcgctatgaggagggcctggtgcataatggctgggacgacctggagtttctcagtgacatcaccgaggaggacttggaggaggctggggtgcaggacccggctcacaagcgcctccttctggacaccctgcagctcagcaagtgatagcggaggcaccacgaagctgtgaactcagagcccctccctgctaccaaggcccagctatggccccagggttgaaaagttatgagggtcagggcagtatctctctgcctatttattggggtgcctatttattggggatctgcattccccgctgcccaatcatttgcaatgccctaattagggcatcctgcccctcgccttttaggctcaggacggaaggtcagttgccatggttaccgaggaccctggttactctggtgctgtcctgttttactggaccccgcctcccagccccaggggtgcctgtgggggtccatttgggtacgtctgggcccccactttcaccagtttctgcggccttccaccgggcctgaaccacagcggaggagctccgctaagacctccccacccccgctgggggtgggggcgggtgtccgtccggaaatgaaggaatagcccgaggaccgggctggggtttatttaaactgttctgtgtgggtctggggagggagagcaccttaatattattggggttggttggggtggggcaggatctcagccataaagtgccagtttgcttagttctcactgtctcctggtctgtgctgccctgctctggggatgcacggcggcagggtgggggagggaggttcctcgcaggtctcagcccgggacagggtcttgcaagcagcctcctgggcagtcgtaagggttgcggcgtgatgtcttcaataaattaagttttatttggaggattgagtaaaacttcaataaattacaagtttttcaaaga

SEQ ID NO: 296883 - DNA, 2728 bp, Homo sapiens
atcgcctcattccttacgtcgttaatgtgcaatctcatttgggggctccaggagatcctgaactacatcagcaggaaagagtttgagcccctcctcagggtggaccagctcaacctggagcgggagaagcacaaggtcttccttcgattcagtgaggaggagatctccttcccacccacctaccgctatgagcggggttcccgggacacatatgcctggcacaagcagaagccaactggggtccggaccaatgtgccctcatggtgtgaccggattctgtggaaatcctaccctgaaactcacatcatctgcaattcttatggttgcactgatgacatcgtcaccagcgaccattcccccgtgtttgggacatttgaggttggagttacctcccagttcatctccaagaaagggctctcaaagacttcagaccaggcctacattgagtttgagagcatcgaggccattgtgaagacagccagccgcaccaagttcttcatcgagttctactctacctgcctggaggaatacaagaagagctttgagaatgatgcccagagcagtgacaacatcaacttcctcaaagtgcagtggtcttcacgccagctgcccacgctcaaaccaattctggctgatatcgagtacctgcaggaccagcacctcctgctcacagtcaagtccatggatggctatgaatcctatggggagtgtgtggttgcactcaaatccatgatcggcagcacggcccaacagttcctgaccttcctatcccaccgtggcgaggagacaggcaatatcagaggctccatgaaggtgcgggtgcccacggagcgcctgggcacccgtgagcggctctacgagtggatcagcattgataaggatgaggcaggagcaaagagcaaagccccctctgtgtcccgagggagccaggagcccaggtcagggagccgcaagccagccttcacagaggcctcctgcccgctctccaggttatttgaagaaccagagaaaccgccaccaacggggaggcccccagccccaccccgagcagctccccgggaggagcccttgacccccaggttgaagccagagggagctcctgaaccagaaggggtggcggccccccacccaagaacagcttcaataaccctgcctactacgtccttgaaggggtcccgcaccagctgctgcccccggagccaccctcgcctgccagggcccctgtcccatctgccaccaagaacaaagtggccattacagtgcctgctccacagcttgggcaccaccggcaccctcgtgtgggagaggggagttcttcagatgaggagtctggaggcacactgccccctccagactttccacctccaccactgccggactcagccatcttcctgccccccagcctggatcctttaccagggccagtggtccggggccgtggtggggctgaggcccgtggcccaccacctcccaaggcccatccaaggcctccactgcccccaggcccctcaccagccagcactttcctgggggaagtggccagtggggatgaccggtcctgctcggtgctgcagatggccaagacgctgagcgaggtggactatgcccctgctgggcctgcacgctcagcgctcctcccaggccccctggagctgcagcccccccggggactgccctcggactatggccggcccctcagcttccctccaccccgcatccgggagagcatccaggaagacctggcagaggaggctccgtgcctgcagggcgggcgggccagcgggctgggcgaggcaggcatgagtgcctggctgcgggccatcggcttggagcgctatgaggagggcctggtgcataatggctgggacgacctggagtttctcagtgacatcaccgaggaggacttggaggaggctggggtgcaggacccggctcacaagcgcctccttctggacaccctgcagctcagcaagtgatagcggaggcaccacgaagctgtgaactcagagcccctccctgctaccaaggcccagctatggccccagggttgaaaagttatgagggtcagggcagtatctctctgcctatttattggggtgcctatttattggggatctgcattccccgctgcccaatcatttgcaatgccctaattagggcatcctgcccctcgccttttaggctcaggacggaaggtcagttgccatggttaccgaggaccctggttactctggtgctgtcctgttttactggaccccgcctcccagccccaggggtgcctgtgggggtccatttgggtacgtctgggcccccactttcaccagtttctgcggccttccaccgggcctgaaccacagcggaggagctccgctaagacctccccacccccgctgggggtgggggcgggtgtccgtccggaaatgaaggaatagcccgaggaccgggctggggtttatttaaactgttctgtgtgggtctggggagggagagcaccttaatattattggggttggttggggtggggcaggatctcagccataaagtgccagtttgcttagttctcactgtctcctggtctgtgctgccctgctctggggatgcacggcggcagggtgggggagggaggttcctcgcaggtctcagcccgggacagggtcttgcaagcagcctcctgggcagtcgtaagggttgcggcgtgatgtcttcaataaattaagttttatttgga

SEQ ID NO: 296884 - DNA, 3197 bp, Homo sapiens
ggcaagtggccgcctggagcccagggccgctgtccggggaagggggcgccggagcagcccggaattcctgaggccggcgctgcaggcagcggcggctgcgcggtgaacgaggcggcctgcgcggcggagtgctgagtcccgatccccggctctgtccggcccacggatcctcaagcccgggccccgggcccggccccagcctcagccctgagcgtctcggggcggatggcgcggggcggcgggggcgggcggtgctgagccctgcgcgggccatggcctcggcctgcggggcgccgggcccggggggcgccctgggcagccaggccccctcctggtaccaccgcgacctgagccgggcggccgcggaggagctgctggcccgggcgggccgcgatggcagcttcctggtccgagacagcgagagcgtggcgggggccttcgcgctctgcgtcctgtatcagaagcatgtgcacacgtatcgcattctgcctgatggagaagatttcttggctgtgcagacctcgcagggtgtgcctgtgcgccgcttccagaccctgggtgagctcatcggcctgtacgcccagcccaaccagggccttgtgtgcgccctgcttcttcctgtgaggaggagatctccttcccacccacctaccgctatgagcggggttcccgggacacatatgcctggcacaagcagaagccaactggggtccggaccaatgtgccctcatggtgtgaccggattctgtggaaatcctaccctgaaactcacatcatctgcaattcttatggttgcactgatgacatcgtcaccagcgaccattcccccgtgtttgggacatttgaggttggagttacctcccagttcatctccaagaaagggctctcaaagacttcagaccaggcctacattgagtttgagagcatcgaggccattgtgaagacagccagccgcaccaagttcttcatcgagttctactctacctgcctggaggaatacaagaagagctttgagaatgatgcccagagcagtgacaacatcaacttcctcaaagtgcagtggtcttcacgccagctgcccacgctcaaaccaattctggctgatatcgagtacctgcaggaccagcacctcctgctcacagtcaagtccatggatggctatgaatcctatggggagtgtgtggttgcactcaaatccatgatcggcagcacggcccaacagttcctgaccttcctatcccaccgtggcgaggagacaggcaatatcagaggctccatgaaggtgcgggtgcccacggagcgcctgggcacccgtgagcggctctacgagtggatcagcattgataaggatgaggcaggagcaaagagcaaagccccctctgtgtcccgagggagccaggagcccaggtcagggagccgcaagccagccttcacagaggcctcctgcccgctctccaggttatttgaagaaccagagaaaccgccaccaacggggaggcccccagccccaccccgagcagctccccgggaggagcccttgacccccaggttgaagccagagggagctcctgaaccagaaggggtggcggccccccacccaagaacagcttcaataaccctgcctactacgtccttgaaggggtcccgcaccagctgctgcccccggagccaccctcgcctgccagggcccctgtcccatctgccaccaagaacaaagtggccattacagtgcctgctccacagcttgggcaccaccggcaccctcgtgtgggagaggggagttcttcagatgaggagtctggaggcacactgccccctccagactttccacctccaccactgccggactcagccatcttcctgccccccagcctggatcctttaccagggccagtggtccggggccgtggtggggctgaggcccgtggcccaccacctcccaaggcccatccaaggcctccactgcccccaggcccctcaccagccagcactttcctgggggaagtggccagtggggatgaccggtcctgctcggtgctgcagatggccaagacgctgagcgaggtggactatgcccctgctgggcctgcacgctcagcgctcctcccaggccccctggagctgcagcccccccggggactgccctcggactatggccggcccctcagcttccctccaccccgcatccgggagagcatccaggaagacctggcagaggaggctccgtgcctgcagggcgggcgggccagcgggctgggcgaggcaggcatgagtgcctggctgcgggccatcggcttggagcgctatgaggagggcctggtgcataatggctgggacgacctggagtttctcagtgacatcaccgaggaggacttggaggaggctggggtgcaggacccggctcacaagcgcctccttctggacaccctgcagctcagcaagtgatagcggaggcaccacgaagctgtgaactcagagcccctccctgctaccaaggcccagctatggccccagggttgaaaagttatgagggtcagggcagtatctctctgcctatttattggggtgcctatttattggggatctgcattccccgctgcccaatcatttgcaatgccctaattagggcatcctgcccctcgccttttaggctcaggacggaaggtcagttgccatggttaccgaggaccctggttactctggtgctgtcctgttttactggaccccgcctcccagccccaggggtgcctgtgggggtccatttgggtacgtctgggcccccactttcaccagtttctgcggccttccaccgggcctgaaccacagcggaggagctccgctaagacctccccacccccgctgggggtgggggcgggtgtccgtccggaaatgaaggaatagcccgaggaccgggctggggtttatttaaactgttctgtgtgggtctggggagggagagcaccttaatattattggggttggttggggtggggcaggatctcagccataaagtgccagtttgcttagttctcactgtctcctggtctgtgctgccctgctctggggatgcacggcggcagggtgggggagggaggttcctcgcaggtctcagcccgggacagggtcttgcaagcagcctcctgggcagtcgtaagggttgcggcgtgatgtcttcaataaattaagttttatttgga

SEQ ID NO: 296885 - DNA, 2677 bp, Homo sapiens
aactcgatgaagaacttggtgcggctggctgtcttcacaatggcctcgatgctctcaaactcaatgtaggcctggtctgaagtctttgagagccctttcttggagatgaactgggaggtaactcccacctaccgctatgagcggggttcccgggacacatatgcctggcacaagcagaagccaactggggtccggaccaatgtgccctcatggtgtgaccggattctgtggaaatcctaccctgaaactcacatcatctgcaattcttatggttgcactgatgacatcgtcaccagcgaccattcccccgtgtttgggacatttgaggttggagttacctcccagttcatctccaagaaagggctctcaaagacttcagaccaggcctacattgagtttgagagcatcgaggccattgtgaagacagccagccgcaccaagttcttcatcgagttctactctacctgcctggaggaatacaagaagagctttgagaatgatgcccagagcagtgacaacatcaacttcctcaaagtgcagtggtcttcacgccagctgcccacgctcaaaccaattctggctgatatcgagtacctgcaggaccagcacctcctgctcacagtcaagtccatggatggctatgaatcctatggggagtgtgtggttgcactcaaatccatgatcggcagcacggcccaacagttcctgaccttcctatcccaccgtggcgaggagacaggcaatatcagaggctccatgaaggtgcgggtgcccacggagcgcctgggcacccgtgagcggctctacgagtggatcagcattgataaggatgaggcaggagcaaagagcaaagccccctctgtgtcccgagggagccaggagcccaggtcagggagccgcaagccagccttcacagaggcctcctgcccgctctccaggttatttgaagaaccagagaaaccgccaccaacggggaggcccccagccccaccccgagcagctccccgggaggagcccttgacccccaggttgaagccagagggagctcctgaaccagaaggggtggcggccccccacccaagaacagcttcaataaccctgcctactacgtccttgaaggggtcccgcaccagctgctgcccccggagccaccctcgcctgccagggcccctgtcccatctgccaccaagaacaaagtggccattacagtgcctgctccacagcttgggcaccaccggcaccctcgtgtgggagaggggagttcttcagatgaggagtctggaggcacactgccccctccagactttccacctccaccactgccggactcagccatcttcctgccccccagcctggatcctttaccagggccagtggtccggggccgtggtggggctgaggcccgtggcccaccacctcccaaggcccatccaaggcctccactgcccccaggcccctcaccagccagcactttcctgggggaagtggccagtggggatgaccggtcctgctcggtgctgcagatggccaagacgctgagcgaggtggactatgcccctgctgggcctgcacgctcagcgctcctcccaggccccctggagctgcagcccccccggggactgccctcggactatggccggcccctcagcttccctccaccccgcatccgggagagcatccaggaagacctggcagaggaggctccgtgcctgcagggcgggcgggccagcgggctgggcgaggcaggcatgagtgcctggctgcgggccatcggcttggagcgctatgaggagggcctggtgcataatggctgggacgacctggagtttctcagtgacatcaccgaggaggacttggaggaggctggggtgcaggacccggctcacaagcgcctccttctggacaccctgcagctcagcaagtgatagcggaggcaccacgaagctgtgaactcagagcccctccctgctaccaaggcccagctatggccccagggttgaaaagttatgagggtcagggcagtatctctctgcctatttattggggtgcctatttattggggatctgcattccccgctgcccaatcatttgcaatgccctaattagggcatcctgcccctcgccttttaggctcaggacggaaggtcagttgccatggttaccgaggaccctggttactctggtgctgtcctgttttactggaccccgcctcccagccccaggggtgcctgtgggggtccatttgggtacgtctgggcccccactttcaccagtttctgcggccttccaccgggcctgaaccacagcggaggagctccgctaagacctccccacccccgctgggggtgggggcgggtgtccgtccggaaatgaaggaatagcccgaggaccgggctggggtttatttaaactgttctgtgtgggtctggggagggagagcaccttaatattattggggttggttggggtggggcaggatctcagccataaagtgccagtttgcttagttctcactgtctcctggtctgtgctgccctgctctggggatgcacggcggcagggtgggggagggaggttcctcgcaggtctcagcccgggacagggtcttgcaagcagcctcctgggcagtcgtaagggttgcggcgtgatgtcttcaataaattaagttttatttgga

SEQ ID NO: 296886 - DNA, 4917 bp, Homo sapiens
ggcaagtggccgcctggagcccagggccgctgtccggggaagggggcgccggagcagcccggaattcctgaggccggcgctgcaggcagcggcggctgcgcggtgaacgaggcggcctgcgcggcggagtgctgagtcccgatccccggctctgtccggcccacggatcctcaagcccgggccccgggcccggccccagcctcagccctgagcgtctcggggcggatggcgcggggcggcgggggcgggcggtgctgagccctgcgcgggccatggcctcggcctgcggggcgccgggcccggggggcgccctgggcagccaggccccctcctggtaccaccgcgacctgagccgggcggccgcggaggagctgctggcccgggcgggccgcgatggcagcttcctggtccgagacagcgagagcgtggcgggggccttcgcgctctgcgtcctgtatcagaagcatgtgcacacgtatcgcattctgcctgatggagaagatttcttggctgtgcagacctcgcagggtgtgcctgtgcgccgcttccagaccctgggtgagctcatcggcctgtacgcccagcccaaccagggccttgtgtgcgccctgcttcttcctgtagagggtgagcgagagccggacccaccggatgaccgggatgcctcagatggggaggatgagaagcccccgctgcccccgcgctctggctccaccagcatttctgcccccactgggcccagcagtcccctgccagctcctgagactcccacagctccagctgctgagagtgctcccaatgggctgagcaccgtctcgcacgactacctgaaaggcagctatgggctggacctggaagctgtgaggggtggagccagccacctgccccacctcacccgtaccctcgctacctcatgccggaggctgcacagtgaggtggacaaggtcctgtcaggcctggagatcctgtccaaggtgtttgaccagcagagctcgcccatggtgacccgccttttgcagcagcagaacctgccacagacaggggagcaggaactagagagcctggtgctgaagctgtcagtgctaaaggacttcctgtcaggcatccagaagaaggccctgaaggccctacaggacatgagctccacagcacccccagctccgcagccatccacacgtaaggccaagaccatccccgtgcaggcctttgaggtgaagctagatgtgaccctgggtgacctgaccaagattgggaagtcacagaagttcacgctgagcgtggatgtggagggtgggcggctggtgctgctgcggagacagcgggactcccaggaggactggaccaccttcacgcacgaccgcatccgccagctcattaagtcccagcgtgtccagaacaagctgggtgttgtgtttgagaaggagaaggaccggactcagcgcaaggacttcatctttgtcagtgcccggaagcgggaggccttctgccagctgttgcagctcatgaagaacaagcactccaagcaggacgagcccgacatgatctcagtcttcataggcacctggaacatgggaagtgtaccacctccaaaaaacgtgacatcctggttcacatcgaagggtctggggaagaccctggacgaggtcacagtgaccataccccatgacatctatgtctttgggacccaggagaactcagtgggcgaccgcgagtggctggacctactgcgcgggggcctcaaggagcttacggatctggattaccgcccgattgccatgcaatcactgtggaatatcaaggtggcagtgctggtcaagccagagcacgagaaccgtatcagccatgtcagtacgtccagtgtgaagactggcatcgccaacaccctggggaacaagggggctgtgggcgtctccttcatgtttaatggcacctcatttggctttgtgaattgtcacctcacctcgggaaatgagaagacggctcggaggaaccaaaactacttggacatcctgcggctgctctcgctgggcgaccggcagctcaatgcctttgacatctctctgcgtttcacacacctcttctggtttggggacctcaactaccgcctggacatggatatccaggagatcctgaactacatcagcaggaaagagtttgagcccctcctcagggtggaccagctcaacctggagcgggagaagcacaaggtcttccttcgattcagtgaggaggagatctccttcccacccacctaccgctatgagcggggttcccgggacacatatgcctggcacaagcagaagccaactggggtccggaccaatgtgccctcatggtgtgaccggattctgtggaaatcctaccctgaaactcacatcatctgcaattcttatggttgcactgatgacatcgtcaccagcgaccattcccccgtgtttgggacatttgaggttggagttacctcccagttcatctccaagaaagggctctcaaagacttcagaccaggcctacattgagtttgagagcatcgaggccattgtgaagacagccagccgcaccaagttcttcatcgagttctactctacctgcctggaggaatacaagaagagctttgagaatgatgcccagagcagtgacaacatcaacttcctcaaagtgcagtggtcttcacgccagctgcccacgctcaaaccaattctggctgatatcgagtacctgcaggaccagcacctcctgctcacagtcaagtccatggatggctatgaatcctatggggagtgtgtggttgcactcaaatccatgatcggcagcacggcccaacagttcctgaccttcctatcccaccgtggcgaggagacaggcaatatcagaggctccatgaaggtgcgggtgcccacggagcgcctgggcacccgtgagcggctctacgagtggatcagcattgataaggatgaggcaggagcaaagagcaaagccccctctgtgtcccgagggagccaggagcccaggtcagggagccgcaagccagccttcacagaggcctcctgcccgctctccaggttatttgaagaaccagagaaaccgccaccaacggggaggcccccagccccaccccgagcagctccccgggaggagcccttgacccccaggttgaagccagagggagctcctgaaccagaaggggtggcggccccccacccaagaacagcttcaataaccctgcctactacgtccttgaaggggtcccgcaccagctgctgcccccggagccaccctcgcctgccagggcccctgtcccatctgccaccaagaacaaagtggccattacagtgcctgctccacagcttgggcaccaccggcaccctcgtgtgggagaggggagttcttcagatgaggagtctggaggcacactgccccctccagactttccacctccaccactgccggactcagccatcttcctgccccccagcctggatcctttaccagggccagtggtccggggccgtggtggggctgaggcccgtggcccaccacctcccaaggcccatccaaggcctccactgcccccaggcccctcaccagccagcactttcctgggggaagtggccagtggggatgaccggtcctgctcggtgctgcagatggccaagacgctgagcgaggtggactatgcccctgctgggcctgcacgctcagcgctcctcccaggccccctggagctgcagcccccccggggactgccctcggactatggccggcccctcagcttccctccaccccgcatccgggagagcatccaggaagacctggcagaggaggctccgtgcctgcagggcgggcgggccagcgggctgggcgaggcaggcatgagtgcctggctgcgggccatcggcttggagcgctatgaggagggcctggtgcataatggctgggacgacctggagtttctcagtgacatcaccgaggaggacttggaggaggctggggtgcaggacccggctcacaagcgcctccttctggacaccctgcagctcagcaagtgatagcggaggcaccacgaagctgtgaactcagagcccctccctgctaccaaggcccagctatggccccagggttgaaaagttatgagggtcagggcagtatctctctgcctatttattggggtgcctatttattggggatctgcattccccgctgcccaatcatttgcaatgccctaattagggcatcctgcccctcgccttttaggctcaggacggaaggtcagttgccatggttaccgaggaccctggttactctggtgctgtcctgttttactggaccccgcctcccagccccaggggtgcctgtgggggtccatttgggtacgtctgggcccccactttcaccagtttctgcggccttccaccgggcctgaaccacagcggaggagctccgctaagacctccccacccccgctgggggtgggggcgggtgtccgtccggaaatgaaggaatagcccgaggaccgggctggggtttatttaaactgttctgtgtgggtctggggagggagagcaccttaatattattggggttggttggggtggggcaggatctcagccataaagtgccagtttgcttagttctcactgtctcctggtctgtgctgccctgctctggggatgcacggcggcagggtgggggagggaggttcctcgcaggtctcagcccgggacagggtcttgcaagcagcctcctgggcagtcgtaagggttgcggcgtgatgtcttcaataaattaagttttatttggaattcgcggatgtgagttcccagaaattcctctccctccacacacgaacaaatttgttgggggcgctctgggccccagagaaaagttttaaacaccatctctgtggggccggcgggcc

SEQ ID NO: 296887 - DNA, 2427 bp, Homo sapiens
attcctatcccctctccccaggttgcactgatgacatcgtcaccagcgaccattcccccgtgtttgggacatttgaggttggagttacctcccagttcatctccaagaaagggctctcaaagacttcagaccaggcctacattgagtttgagagcatcgaggccattgtgaagacagccagccgcaccaagttcttcatcgagttctactctacctgcctggaggaatacaagaagagctttgagaatgatgcccagagcagtgacaacatcaacttcctcaaagtgcagtggtcttcacgccagctgcccacgctcaaaccaattctggctgatatcgagtacctgcaggaccagcacctcctgctcacagtcaagtccatggatggctatgaatcctatggggagtgtgtggttgcactcaaatccatgatcggcagcacggcccaacagttcctgaccttcctatcccaccgtggcgaggagacaggcaatatcagaggctccatgaaggtgcgggtgcccacggagcgcctgggcacccgtgagcggctctacgagtggatcagcattgataaggatgaggcaggagcaaagagcaaagccccctctgtgtcccgagggagccaggagcccaggtcagggagccgcaagccagccttcacagaggcctcctgcccgctctccaggttatttgaagaaccagagaaaccgccaccaacggggaggcccccagccccaccccgagcagctccccgggaggagcccttgacccccaggttgaagccagagggagctcctgaaccagaaggggtggcggccccccacccaagaacagcttcaataaccctgcctactacgtccttgaaggggtcccgcaccagctgctgcccccggagccaccctcgcctgccagggcccctgtcccatctgccaccaagaacaaagtggccattacagtgcctgctccacagcttgggcaccaccggcaccctcgtgtgggagaggggagttcttcagatgaggagtctggaggcacactgccccctccagactttccacctccaccactgccggactcagccatcttcctgccccccagcctggatcctttaccagggccagtggtccggggccgtggtggggctgaggcccgtggcccaccacctcccaaggcccatccaaggcctccactgcccccaggcccctcaccagccagcactttcctgggggaagtggccagtggggatgaccggtcctgctcggtgctgcagatggccaagacgctgagcgaggtggactatgcccctgctgggcctgcacgctcagcgctcctcccaggccccctggagctgcagcccccccggggactgccctcggactatggccggcccctcagcttccctccaccccgcatccgggagagcatccaggaagacctggcagaggaggctccgtgcctgcagggcgggcgggccagcgggctgggcgaggcaggcatgagtgcctggctgcgggccatcggcttggagcgctatgaggagggcctggtgcataatggctgggacgacctggagtttctcagtgacatcaccgaggaggacttggaggaggctggggtgcaggacccggctcacaagcgcctccttctggacaccctgcagctcagcaagtgatagcggaggcaccacgaagctgtgaactcagagcccctccctgctaccaaggcccagctatggccccagggttgaaaagttatgagggtcagggcagtatctctctgcctatttattggggtgcctatttattggggatctgcattccccgctgcccaatcatttgcaatgccctaattagggcatcctgcccctcgccttttaggctcaggacggaaggtcagttgccatggttaccgaggaccctggttactctggtgctgtcctgttttactggaccccgcctcccagccccaggggtgcctgtgggggtccatttgggtacgtctgggcccccactttcaccagtttctgcggccttccaccgggcctgaaccacagcggaggagctccgctaagacctccccacccccgctgggggtgggggcgggtgtccgtccggaaatgaaggaatagcccgaggaccgggctggggtttatttaaactgttctgtgtgggtctggggagggagagcaccttaatattattggggttggttggggtggggcaggatctcagccataaagtgccagtttgcttagttctcactgtctcctggtctgtgctgccctgctctggggatgcacggcggcagggtgggggagggaggttcctcgcaggtctcagcccgggacagggtcttgcaagcagcctcctgggcagtcgtaagggttgcggcgtgatgtcttcaataaattaagttttatttgga

SEQ ID NO: 296888 - DNA, 2359 bp, Homo sapiens
gactctaggatccctctctgctccctcttcatctccaagaaagggctctcaaagacttcagaccaggcctacattgagtttgagagcatcgaggccattgtgaagacagccagccgcaccaagttcttcatcgagttctactctacctgcctggaggaatacaagaagagctttgagaatgatgcccagagcagtgacaacatcaacttcctcaaagtgcagtggtcttcacgccagctgcccacgctcaaaccaattctggctgatatcgagtacctgcaggaccagcacctcctgctcacagtcaagtccatggatggctatgaatcctatggggagtgtgtggttgcactcaaatccatgatcggcagcacggcccaacagttcctgaccttcctatcccaccgtggcgaggagacaggcaatatcagaggctccatgaaggtgcgggtgcccacggagcgcctgggcacccgtgagcggctctacgagtggatcagcattgataaggatgaggcaggagcaaagagcaaagccccctctgtgtcccgagggagccaggagcccaggtcagggagccgcaagccagccttcacagaggcctcctgcccgctctccaggttatttgaagaaccagagaaaccgccaccaacggggaggcccccagccccaccccgagcagctccccgggaggagcccttgacccccaggttgaagccagagggagctcctgaaccagaaggggtggcggccccccacccaagaacagcttcaataaccctgcctactacgtccttgaaggggtcccgcaccagctgctgcccccggagccaccctcgcctgccagggcccctgtcccatctgccaccaagaacaaagtggccattacagtgcctgctccacagcttgggcaccaccggcaccctcgtgtgggagaggggagttcttcagatgaggagtctggaggcacactgccccctccagactttccacctccaccactgccggactcagccatcttcctgccccccagcctggatcctttaccagggccagtggtccggggccgtggtggggctgaggcccgtggcccaccacctcccaaggcccatccaaggcctccactgcccccaggcccctcaccagccagcactttcctgggggaagtggccagtggggatgaccggtcctgctcggtgctgcagatggccaagacgctgagcgaggtggactatgcccctgctgggcctgcacgctcagcgctcctcccaggccccctggagctgcagcccccccggggactgccctcggactatggccggcccctcagcttccctccaccccgcatccgggagagcatccaggaagacctggcagaggaggctccgtgcctgcagggcgggcgggccagcgggctgggcgaggcaggcatgagtgcctggctgcgggccatcggcttggagcgctatgaggagggcctggtgcataatggctgggacgacctggagtttctcagtgacatcaccgaggaggacttggaggaggctggggtgcaggacccggctcacaagcgcctccttctggacaccctgcagctcagcaagtgatagcggaggcaccacgaagctgtgaactcagagcccctccctgctaccaaggcccagctatggccccagggttgaaaagttatgagggtcagggcagtatctctctgcctatttattggggtgcctatttattggggatctgcattccccgctgcccaatcatttgcaatgccctaattagggcatcctgcccctcgccttttaggctcaggacggaaggtcagttgccatggttaccgaggaccctggttactctggtgctgtcctgttttactggaccccgcctcccagccccaggggtgcctgtgggggtccatttgggtacgtctgggcccccactttcaccagtttctgcggccttccaccgggcctgaaccacagcggaggagctccgctaagacctccccacccccgctgggggtgggggcgggtgtccgtccggaaatgaaggaatagcccgaggaccgggctggggtttatttaaactgttctgtgtgggtctggggagggagagcaccttaatattattggggttggttggggtggggcaggatctcagccataaagtgccagtttgcttagttctcactgtctcctggtctgtgctgccctgctctggggatgcacggcggcagggtgggggagggaggttcctcgcaggtctcagcccgggacagggtcttgcaagcagcctcctgggcagtcgtaagggttgcggcgtgatgtcttcaataaattaagttttatttgga

SEQ ID NO: 296889 - DNA, 4666 bp, Homo sapiens
ggcaagtggccgcctggagcccagggccgctgtccggggaagggggcgccggagcagcccggaattcctgaggccggcgctgcaggcagcggcggctgcgcggtgaacgaggcggcctgcgcggcggagtgctgagtcccgatccccggctctgtccggcccacggatcctcaagcccgggccccgggcccggccccagcctcagccctgagcgtctcggggcggatggcgcggggcggcgggggcgggcggtgctgagccctgcgcgggccatggcctcggcctgcggggcgccgggcccggggggcgccctgggcagccaggccccctcctggtaccaccgcgacctgagccgggcggccgcggaggagctgctggcccgggcgggccgcgatggcagcttcctggtccgagacagcgagagcgtggcgggggccttcgcgctctgcgtcctgtatcagaagcatgtgcacacgtatcgcattctgcctgatggagaagatttcttggctgtgcagacctcgcagggtgtgcctgtgcgccgcttccagaccctgggtgagctcatcggcctgtacgcccagcccaaccagggccttgtgtgcgccctgcttcttcctgtagagggtgagcgagagccggacccaccggatgaccgggatgcctcagatggggaggatgagaagcccccgctgcccccgcgctctggctccaccagcatttctgcccccactgggcccagcagtcccctgccagctcctgagactcccacagctccagctgctgagagtgctcccaatgggctgagcaccgtctcgcacgactacctgaaaggcagctatgggctggacctggaagctgtgaggggtggagccagccacctgccccacctcacccgtaccctcgctacctcatgccggaggctgcacagtgaggtggacaaggtcctgtcaggcctggagatcctgtccaaggtgtttgaccagcagagctcgcccatggtgacccgccttttgcagcagcagaacctgccacagacaggggagcaggaactagagagcctggtgctgaagctgtcagtgctaaaggacttcctgtcaggcatccagaagaaggccctgaaggccctacaggacatgagctccacagcacccccagctccgcagccatccacacgtaaggccaagaccatccccgtgcaggcctttgaggtgaagctagatgtgaccctgggtgacctgaccaagattgggaagtcacagaagttcacgctgagcgtggatgtggagggtgggcggctggtgctgctgcggagacagcgggactcccaggaggactggaccaccttcacgcacgaccgcatccgccagctcattaagtcccagcgtgtccagaacaagctgggtgttgtgtttgagaaggagaaggaccggactcagcgcaaggacttcatctttgtcagtgcccggaagcgggaggccttctgccagctgttgcagctcatgaagaacaagcactccaagcaggacgagcccgacatgatctcagtcttcataggcacctggaacatgggaagtgtaccacctccaaaaaacgtgacatcctggttcacatcgaagggtctggggaagaccctggacgaggtcacagtgaccataccccatgacatctatgtctttgggacccaggagaactcagtgggcgaccgcgagtggctggacctactgcgcgggggcctcaaggagcttacggatctggattaccgcccgattgccatgcaatcactgtggaatatcaaggtggcagtgctggtcaagccagagcacgagaaccgtatcagccatgtcagtacgtccagtgtgaagactggcatcgccaacaccctggggaacaagggggctgtgggcgtctccttcatgtttaatggcacctcatttggctttgtgaattgtcacctcacctcgggaaatgagaagacggctcggaggaaccaaaactacttggacatcctgcggctgctctcgctgggcgaccggcagctcaatgcctttgacatctctctgcgtttcacacacctcttctggtttggggacctcaactaccgcctggacatggatatccaggagatcctgaactacatcagcaggaaagagtttgagcccctcctcagggtggaccagctcaacctggagcgggagaagcacaaggtcttccttcgattcagtgaggaggagatctccttcccacccacctaccgctatgagcggggttcccgggacacatatgcctggcacaagcagaagccaactggggtccggaccaatgtgccctcatggtgtgaccggattctgtggaaatcctaccctgaaactcacatcatctgcaattcttatggttgcactgatgacatcgtcaccagcgaccattcccccgtgtttgggacatttgaggttggagttacctcccagttcatctccaagaaagggctctcaaagacttcagaccaggcctacattgagtttgagagcatcgaggccattgtgaagacagccagccgcaccaagttcttcatcgagttctactctacctgcctggaggaatacaagaagagctttgagaatgatgcccagagcagtgacaacatcaacttcctcaaagtgcagtggtcttcacgccagctgcccacgctcaaaccaattctggctgatatcgagtacctgcaggaccagcacctcctgctcacagtcaagtccatggatggctatgaatcctatggggagtgtgtggttgcactcaaatccatgatcggcagcacggcccaacagttcctgaccttcctatcccaccgtggcgaggagacaggcaatatcagaggctccatgaaggtgcgggtgcccacggagcgcctgggcacccgtgagcggctctacgagtggatcagcattgataaggatgaggcaggagcaaagagcaaagccccctctgtgtcccgagggagccaggagcccaggtcagggagccgcaagccagccttcacagaggcctcctgcccgctctccaggttatttgaagaaccagagaaaccgccaccaacggggaggcccccagccccaccccgagcagctccccgggaggagcccttgacccccaggttgaagccagagggagctcctgaaccagaaggggtggcggccccccacccaagaacagcttcaataaccctgcctactacgtccttgaaggggtcccgcaccagctgctgcccccggagccaccctcgcctgccagggcccctgtcccatctgccaccaagaacaaagtggccattacagtgcctgctccacagcttgggcaccaccggcaccctcgtgtgggagaggggagttcttcagatgaggagtctggaggcacactgccccctccagactttccacctccaccactgccggactcagccatcttcctgccccccagcctggatcctttaccagggccagtggtccggggccgtggtggggctgaggcccgtggcccaccacctcccaaggcccatccaaggcctccactgcccccaggcccctcaccagccagcactttcctgggggaagtggccagtggggatgaccggtcctgctcggtgctgcagatggccaagacgctgagcgaggtggactatgcccctgctgggcctgcacgctcagcgctcctcccaggccccctggagctgcagcccccccggggactgccctcggactatggccggcccctcagcttccctccaccccgcatccgggagagcatccaggaagacctggcagaggaggctccgtgcctgcagggcgggcgggccagcgggctgggcgaggcaggcatgagtgcctggctgcgggccatcggcttggagcgctatgaggagggcctggtgcataatggctgggacgacctggagtttctcagtgacatcaccgaggaggacttggaggaggctggggtgcaggacccggctcacaagcgcctccttctggacaccctgcagctcagcaagtgatagcggaggcaccacgaagctgtgaactcagagcccctccctgctaccaaggcccagctatggccccagggttgaaaagttatgagggtcagggcagtatctctctgcctatttattggggtgcctatttattggggatctgcattccccgctgcccaatcatttgcaatgccctaattagggcatcctgcccctcgccttttaggctcaggacggaaggtcagttgccatggttaccgaggaccctggttactctggtgctgtcctgttttactggaccccgcctcccagccccaggggtgcctgtgggggtccatttgggtacgtctgggcccccactttcaccagtttctgcggccttccaccgggcctgaaccacagcggaggagctccgctaagacctccccacccccgctgggggtgggggcgggtgtccgtccggaaatgaaggaatagcccgaggaccgggctggggtttatttaaactgttctgtgtgggtctggggagggagagcaccttaatattattggggttggttggggtggggcaggatctcagccataaagtgctcagggggcaggagtgggagtcgcaagatgctcagggggggaccagga

SEQ ID NO: 296890 - DNA, 4711 bp, Homo sapiens
  misc_feature (4706)..(4707): n is a, c, g, or t
ggcaagtggccgcctggagcccagggccgctgtccggggaagggggcgccggagcagcccggaattcctgaggccggcgctgcaggcagcggcggctgcgcggtgaacgaggcggcctgcgcggcggagtgctgagtcccgatccccggctctgtccggcccacggatcctcaagcccgggccccgggcccggccccagcctcagccctgagcgtctcggggcggatggcgcggggcggcgggggcgggcggtgctgagccctgcgcgggccatggcctcggcctgcggggcgccgggcccggggggcgccctgggcagccaggccccctcctggtaccaccgcgacctgagccgggcggccgcggaggagctgctggcccgggcgggccgcgatggcagcttcctggtccgagacagcgagagcgtggcgggggccttcgcgctctgcgtcctgtatcagaagcatgtgcacacgtatcgcattctgcctgatggagaagatttcttggctgtgcagacctcgcagggtgtgcctgtgcgccgcttccagaccctgggtgagctcatcggcctgtacgcccagcccaaccagggccttgtgtgcgccctgcttcttcctgtagagggtgagcgagagccggacccaccggatgaccgggatgcctcagatggggaggatgagaagcccccgctgcccccgcgctctggctccaccagcatttctgcccccactgggcccagcagtcccctgccagctcctgagactcccacagctccagctgctgagagtgctcccaatgggctgagcaccgtctcgcacgactacctgaaaggcagctatgggctggacctggaagctgtgaggggtggagccagccacctgccccacctcacccgtaccctcgctacctcatgccggaggctgcacagtgaggtggacaaggtcctgtcaggcctggagatcctgtccaaggtgtttgaccagcagagctcgcccatggtgacccgccttttgcagcagcagaacctgccacagacaggggagcaggaactagagagcctggtgctgaagctgtcagtgctaaaggacttcctgtcaggcatccagaagaaggccctgaaggccctacaggacatgagctccacagcacccccagctccgcagccatccacacgtaaggccaagaccatccccgtgcaggcctttgaggtgaagctagatgtgaccctgggtgacctgaccaagattgggaagtcacagaagttcacgctgagcgtggatgtggagggtgggcggctggtgctgctgcggagacagcgggactcccaggaggactggaccaccttcacgcacgaccgcatccgccagctcattaagtcccagcgtgtccagaacaagctgggtgttgtgtttgagaaggagaaggaccggactcagcgcaaggacttcatctttgtcagtgcccggaagcgggaggccttctgccagctgttgcagctcatgaagaacaagcactccaagcaggacgagcccgacatgatctcagtcttcataggcacctggaacatgggaagtgtaccacctccaaaaaacgtgacatcctggttcacatcgaagggtctggggaagaccctggacgaggtcacagtgaccataccccatgacatctatgtctttgggacccaggagaactcagtgggcgaccgcgagtggctggacctactgcgcgggggcctcaaggagcttacggatctggattaccgcccgattgccatgcaatcactgtggaatatcaaggtggcagtgctggtcaagccagagcacgagaaccgtatcagccatgtcagtacgtccagtgtgaagactggcatcgccaacaccctggggaacaagggggctgtgggcgtctccttcatgtttaatggcacctcatttggctttgtgaattgtcacctcacctcgggaaatgagaagacggctcggaggaaccaaaactacttggacatcctgcggctgctctcgctgggcgaccggcagctcaatgcctttgacatctctctgcgtttcacacacctcttctggtttggggacctcaactaccgcctggacatggatatccaggagatcctgaactacatcagcaggaaagagtttgagcccctcctcagggtggaccagctcaacctggagcgggagaagcacaaggtcttccttcgattcagtgaggaggagatctccttcccacccacctaccgctatgagcggggttcccgggacacatatgcctggcacaagcagaagccaactggggtccggaccaatgtgccctcatggtgtgaccggattctgtggaaatcctaccctgaaactcacatcatctgcaattcttatggttgcactgatgacatcgtcaccagcgaccattcccccgtgtttgggacatttgaggttggagttacctcccagttcatctccaagaaagggctctcaaagacttcagaccaggcctacattgagtttgagagcatcgaggccattgtgaagacagccagccgcaccaagttcttcatcgagttctactctacctgcctggaggaatacaagaagagctttgagaatgatgcccagagcagtgacaacatcaacttcctcaaagtgcagtggtcttcacgccagctgcccacgctcaaaccaattctggctgatatcgagtacctgcaggaccagcacctcctgctcacagtcaagtccatggatggctatgaatcctatggggagtgtgtggttgcactcaaatccatgatcggcagcacggcccaacagttcctgaccttcctatcccaccgtggcgaggagacaggcaatatcagaggctccatgaaggtgcgggtgcccacggagcgcctgggcacccgtgagcggctctacgagtggatcagcattgataaggatgaggcaggagcaaagagcaaagccccctctgtgtcccgagggagccaggagcccaggtcagggagccgcaagccagccttcacagaggcctcctgcccgctctccaggttatttgaagaaccagagaaaccgccaccaacggggaggcccccagccccaccccgagcagctccccgggaggagcccttgacccccaggttgaagccagagggagctcctgaaccagaaggggtggcggccccccacccaagaacagcttcaataaccctgcctactacgtccttgaaggggtcccgcaccagctgctgcccccggagccaccctcgcctgccagggcccctgtcccatctgccaccaagaacaaagtggccattacagtgcctgctccacagcttgggcaccaccggcaccctcgtgtgggagaggggagttcttcagatgaggagtctggaggcacactgccccctccagactttccacctccaccactgccggactcagccatcttcctgccccccagcctggatcctttaccagggccagtggtccggggccgtggtggggctgaggcccgtggcccaccacctcccaaggcccatccaaggcctccactgcccccaggcccctcaccagccagcactttcctgggggaagtggccagtggggatgaccggtcctgctcggtgctgcagatggccaagacgctgagcgaggtggactatgcccctgctgggcctgcacgctcagcgctcctcccaggccccctggagctgcagcccccccggggactgccctcggactatggccggcccctcagcttccctccaccccgcatccgggagagcatccaggaagacctggcagaggaggctccgtgcctgcagggcgggcgggccagcgggctgggcgaggcaggcatgagtgcctggctgcgggccatcggcttggagcgctatgaggagggcctggtgcataatggctgggacgacctggagtttctcagtgacatcaccgaggaggacttggaggaggctggggtgcaggacccggctcacaagcgcctccttctggacaccctgcagctcagcaagtgatagcggaggcaccacgaagctgtgaactcagagcccctccctgctaccaaggcccagctatggccccagggttgaaaagttatgagggtcagggcagtatctctctgcctatttattggggtgcctatttattggggatctgcattccccgctgcccaatcatttgcaatgccctaattagggcatcctgcccctcgccttttaggctcaggacggaaggtcagttgccatggttaccgaggaccctggttactctggtgctgtcctgttttactggaccccgcctcccagccccaggggtgcctgtgggggtccatttgggtacgtctgggcccccactttcaccagtttctgcggccttccaccgggcctgaaccacagcggaggagctccgctaagacctccccacccccgctgggggtgggggcgggtgtccgtccggaaatgaaggaatagcccgaggaccgggctggggtttatttaaactgttctgtgtgggtctggggagggagagcacctttagtgagggttaattggggccccgaattaaccctcactaaaggccgaccagtttgtgagatttgactatctcttgtaggagtcagtggatatctgatcctttagtagggttaattgggggggatcctctagagtcganngcag

SEQ ID NO: 296891 - DNA, 4633 bp, Homo sapiens
ggcaagtggccgcctggagcccagggccgctgtccggggaagggggcgccggagcagcccggaattcctgaggccggcgctgcaggcagcggcggctgcgcggtgaacgaggcggcctgcgcggcggagtgctgagtcccgatccccggctctgtccggcccacggatcctcaagcccgggccccgggcccggccccagcctcagccctgagcgtctcggggcggatggcgcggggcggcgggggcgggcggtgctgagccctgcgcgggccatggcctcggcctgcggggcgccgggcccggggggcgccctgggcagccaggccccctcctggtaccaccgcgacctgagccgggcggccgcggaggagctgctggcccgggcgggccgcgatggcagcttcctggtccgagacagcgagagcgtggcgggggccttcgcgctctgcgtcctgtatcagaagcatgtgcacacgtatcgcattctgcctgatggagaagatttcttggctgtgcagacctcgcagggtgtgcctgtgcgccgcttccagaccctgggtgagctcatcggcctgtacgcccagcccaaccagggccttgtgtgcgccctgcttcttcctgtagagggtgagcgagagccggacccaccggatgaccgggatgcctcagatggggaggatgagaagcccccgctgcccccgcgctctggctccaccagcatttctgcccccactgggcccagcagtcccctgccagctcctgagactcccacagctccagctgctgagagtgctcccaatgggctgagcaccgtctcgcacgactacctgaaaggcagctatgggctggacctggaagctgtgaggggtggagccagccacctgccccacctcacccgtaccctcgctacctcatgccggaggctgcacagtgaggtggacaaggtcctgtcaggcctggagatcctgtccaaggtgtttgaccagcagagctcgcccatggtgacccgccttttgcagcagcagaacctgccacagacaggggagcaggaactagagagcctggtgctgaagctgtcagtgctaaaggacttcctgtcaggcatccagaagaaggccctgaaggccctacaggacatgagctccacagcacccccagctccgcagccatccacacgtaaggccaagaccatccccgtgcaggcctttgaggtgaagctagatgtgaccctgggtgacctgaccaagattgggaagtcacagaagttcacgctgagcgtggatgtggagggtgggcggctggtgctgctgcggagacagcgggactcccaggaggactggaccaccttcacgcacgaccgcatccgccagctcattaagtcccagcgtgtccagaacaagctgggtgttgtgtttgagaaggagaaggaccggactcagcgcaaggacttcatctttgtcagtgcccggaagcgggaggccttctgccagctgttgcagctcatgaagaacaagcactccaagcaggacgagcccgacatgatctcagtcttcataggcacctggaacatgggaagtgtaccacctccaaaaaacgtgacatcctggttcacatcgaagggtctggggaagaccctggacgaggtcacagtgaccataccccatgacatctatgtctttgggacccaggagaactcagtgggcgaccgcgagtggctggacctactgcgcgggggcctcaaggagcttacggatctggattaccgcccgattgccatgcaatcactgtggaatatcaaggtggcagtgctggtcaagccagagcacgagaaccgtatcagccatgtcagtacgtccagtgtgaagactggcatcgccaacaccctggggaacaagggggctgtgggcgtctccttcatgtttaatggcacctcatttggctttgtgaattgtcacctcacctcgggaaatgagaagacggctcggaggaaccaaaactacttggacatcctgcggctgctctcgctgggcgaccggcagctcaatgcctttgacatctctctgcgtttcacacacctcttctggtttggggacctcaactaccgcctggacatggatatccaggagatcctgaactacatcagcaggaaagagtttgagcccctcctcagggtggaccagctcaacctggagcgggagaagcacaaggtcttccttcgattcagtgaggaggagatctccttcccacccacctaccgctatgagcggggttcccgggacacatatgcctggcacaagcagaagccaactggggtccggaccaatgtgccctcatggtgtgaccggattctgtggaaatcctaccctgaaactcacatcatctgcaattcttatggttgcactgatgacatcgtcaccagcgaccattcccccgtgtttgggacatttgaggttggagttacctcccagttcatctccaagaaagggctctcaaagacttcagaccaggcctacattgagtttgagagcatcgaggccattgtgaagacagccagccgcaccaagttcttcatcgagttctactctacctgcctggaggaatacaagaagagctttgagaatgatgcccagagcagtgacaacatcaacttcctcaaagtgcagtggtcttcacgccagctgcccacgctcaaaccaattctggctgatatcgagtacctgcaggaccagcacctcctgctcacagtcaagtccatggatggctatgaatcctatggggagtgtgtggttgcactcaaatccatgatcggcagcacggcccaacagttcctgaccttcctatcccaccgtggcgaggagacaggcaatatcagaggctccatgaaggtgcgggtgcccacggagcgcctgggcacccgtgagcggctctacgagtggatcagcattgataaggatgaggcaggagcaaagagcaaagccccctctgtgtcccgagggagccaggagcccaggtcagggagccgcaagccagccttcacagaggcctcctgcccgctctccaggttatttgaagaaccagagaaaccgccaccaacggggaggcccccagccccaccccgagcagctccccgggaggagcccttgacccccaggttgaagccagagggagctcctgaaccagaaggggtggcggccccccacccaagaacagcttcaataaccctgcctactacgtccttgaaggggtcccgcaccagctgctgcccccggagccaccctcgcctgccagggcccctgtcccatctgccaccaagaacaaagtggccattacagtgcctgctccacagcttgggcaccaccggcaccctcgtgtgggagaggggagttcttcagatgaggagtctggaggcacactgccccctccagactttccacctccaccactgccggactcagccatcttcctgccccccagcctggatcctttaccagggccagtggtccggggccgtggtggggctgaggcccgtggcccaccacctcccaaggcccatccaaggcctccactgcccccaggcccctcaccagccagcactttcctgggggaagtggccagtggggatgaccggtcctgctcggtgctgcagatggccaagacgctgagcgaggtggactatgcccctgctgggcctgcacgctcagcgctcctcccaggccccctggagctgcagcccccccggggactgccctcggactatggccggcccctcagcttccctccaccccgcatccgggagagcatccaggaagacctggcagaggaggctccgtgcctgcagggcgggcgggccagcgggctgggcgaggcaggcatgagtgcctggctgcgggccatcggcttggagcgctatgaggagggcctggtgcataatggctgggacgacctggagtttctcagtgacatcaccgaggaggacttggaggaggctggggtgcaggacccggctcacaagcgcctccttctggacaccctgcagctcagcaagtgatagcggaggcaccacgaagctgtgaactcagagcccctccctgctaccaaggcccagctatggccccagggttgaaaagttatgagggtcagggcagtatctctctgcctatttattggggtgcctatttattggggatctgcattccccgctgcccaatcatttgcaatgccctaattagggcatcctgcccctcgccttttaggctcaggacggaaggtcagttgccatggttaccgaggaccctggtggggtgggggcgggtgtccgtccggaaatgaaggaatagcccgaggaccgggctggggtttatttaaactgttctgtgtgggtctggggagggagagcaccttaatattattggggttggttggggtggggcaggatctcagccataaagtgccagtttgcttagttctcactgtctcctggtctgtgctgccctgctctggggatgcacggcggcagggtgggggagggaggttcctcgcaggtctcagcccgggacagggtcttgcaagcagcctcctgggcagtcgtaagggttgcggcgtgatgtcttcaataaattaagttttatttgga

SEQ ID NO: 296892 - DNA, 4574 bp, Homo sapiens
ggcaagtggccgcctggagcccagggccgctgtccggggaagggggcgccggagcagcccggaattcctgaggccggcgctgcaggcagcggcggctgcgcggtgaacgaggcggcctgcgcggcggagtgctgagtcccgatccccggctctgtccggcccacggatcctcaagcccgggccccgggcccggccccagcctcagccctgagcgtctcggggcggatggcgcggggcggcgggggcgggcggtgctgagccctgcgcgggccatggcctcggcctgcggggcgccgggcccggggggcgccctgggcagccaggccccctcctggtaccaccgcgacctgagccgggcggccgcggaggagctgctggcccgggcgggccgcgatggcagcttcctggtccgagacagcgagagcgtggcgggggccttcgcgctctgcgtcctgtatcagaagcatgtgcacacgtatcgcattctgcctgatggagaagatttcttggctgtgcagacctcgcagggtgtgcctgtgcgccgcttccagaccctgggtgagctcatcggcctgtacgcccagcccaaccagggccttgtgtgcgccctgcttcttcctgtagagggtgagcgagagccggacccaccggatgaccgggatgcctcagatggggaggatgagaagcccccgctgcccccgcgctctggctccaccagcatttctgcccccactgggcccagcagtcccctgccagctcctgagactcccacagctccagctgctgagagtgctcccaatgggctgagcaccgtctcgcacgactacctgaaaggcagctatgggctggacctggaagctgtgaggggtggagccagccacctgccccacctcacccgtaccctcgctacctcatgccggaggctgcacagtgaggtggacaaggtcctgtcaggcctggagatcctgtccaaggtgtttgaccagcagagctcgcccatggtgacccgccttttgcagcagcagaacctgccacagacaggggagcaggaactagagagcctggtgctgaagctgtcagtgctaaaggacttcctgtcaggcatccagaagaaggccctgaaggccctacaggacatgagctccacagcacccccagctccgcagccatccacacgtaaggccaagaccatccccgtgcaggcctttgaggtgaagctagatgtgaccctgggtgacctgaccaagattgggaagtcacagaagttcacgctgagcgtggatgtggagggtgggcggctggtgctgctgcggagacagcgggactcccaggaggactggaccaccttcacgcacgaccgcatccgccagctcattaagtcccagcgtgtccagaacaagctgggtgttgtgtttgagaaggagaaggaccggactcagcgcaaggacttcatctttgtcagtgcccggaagcgggaggccttctgccagctgttgcagctcatgaagaacaagcactccaagcaggacgagcccgacatgatctcagtcttcataggcacctggaacatgggaagtgtaccacctccaaaaaacgtgacatcctggttcacatcgaagggtctggggaagaccctggacgaggtcacagtgaccataccccatgacatctatgtctttgggacccaggagaactcagtgggcgaccgcgagtggctggacctactgcgcgggggcctcaaggagcttacggatctggattaccgcccgattgccatgcaatcactgtggaatatcaaggtggcagtgctggtcaagccagagcacgagaaccgtatcagccatgtcagtacgtccagtgtgaagactggcatcgccaacaccctggggaacaagggggctgtgggcgtctccttcatgtttaatggcacctcatttggctttgtgaattgtcacctcacctcgggaaatgagaagacggctcggaggaaccaaaactacttggacatcctgcggctgctctcgctgggcgaccggcagctcaatgcctttgacatctctctgcgtttcacacacctcttctggtttggggacctcaactaccgcctggacatggatatccaggagatcctgaactacatcagcaggaaagagtttgagcccctcctcagggtggaccagctcaacctggagcgggagaagcacaaggtcttccttcgattcagtgaggaggagatctccttcccacccacctaccgctatgagcggggttcccgggacacatatgcctggcacaagcagaagccaactggggtccggaccaatgtgccctcatggtgtgaccggattctgtggaaatcctaccctgaaactcacatcatctgcaattcttatggttgcactgatgacatcgtcaccagcgaccattcccccgtgtttgggacatttgaggttggagttacctcccagttcatctccaagaaagggctctcaaagacttcagaccaggcctacattgagtttgagagcatcgaggccattgtgaagacagccagccgcaccaagttcttcatcgagttctactctacctgcctggaggaatacaagaagagctttgagaatgatgcccagagcagtgacaacatcaacttcctcaaagtgcagtggtcttcacgccagctgcccacgctcaaaccaattctggctgatatcgagtacctgcaggaccagcacctcctgctcacagtcaagtccatggatggctatgaatcctatggggagtgtgtggttgcactcaaatccatgatcggcagcacggcccaacagttcctgaccttcctatcccaccgtggcgaggagacaggcaatatcagaggctccatgaaggtgcgggtgcccacggagcgcctgggcacccgtgagcggctctacgagtggatcagcattgataaggatgaggcaggagcaaagagcaaagccccctctgtgtcccgagggagccaggagcccaggtcagggagccgcaagccagccttcacagaggcctcctgcccgctctccaggttatttgaagaaccagagaaaccgccaccaacggggaggcccccagccccaccccgagcagctccccgggaggagcccttgacccccaggttgaagccagagggagctcctgaaccagaaggggtggcggccccccacccaagaacagcttcaataaccctgcctactacgtccttgaaggggtcccgcaccagctgctgcccccggagccaccctcgcctgccagggcccctgtcccatctgccaccaagaacaaagtggccattacagtgcctgctccacagcttgggcaccaccggcaccctcgtgtgggagaggggagttcttcagatgaggagtctggaggcacactgccccctccagactttccacctccaccactgccggactcagccatcttcctgccccccagcctggatcctttaccagggccagtggtccggggccgtggtggggctgaggcccgtggcccaccacctcccaaggcccatccaaggcctccactgcccccaggcccctcaccagccagcactttcctgggggaagtggccagtggggatgaccggtcctgctcggtgctgcagatggccaagacgctgagcgaggtggactatgcccctgctgggcctgcacgctcagcgctcctcccaggccccctggagctgcagcccccccggggactgccctcggactatggccggcccctcagcttccctccaccccgcatccgggagagcatccaggaagacctggcagaggaggctccgtgcctgcagggcgggcgggccagcgggctgggcgaggcaggcatgagtgcctggctgcgggccatcggcttggagcgctatgaggagggcctggtgcataatggctgggacgacctggagtttctcagtgacatcaccgaggaggacttggaggaggctggggtgcaggacccggctcacaagcgcctccttctggacaccctgcagctcagcaagtgatagcggaggcaccacgaagctgtgaactcagagcccctccctgctaccaaggcccagctatggccccagggttgaaaagttatgagggtcagggcagtatctctctgcctatttattggggtgcctatttattggggatctgcattccccgctgcccaatcatttgcaatgccctaattagggcatcctgcccctcgccttttaggctcaggacggaaggtcagttgccatggttaccgaggaccctggttactctggtgctgtcctgttttactggaccccgcctcccagccccaggggtgcctgtgggggtccatttgggtacgtctgggcccccactttcacactccgatgtggtttcacccgagccaggaggcggccatcatgggaagttgggacatcccggccatttacaagggacccaacaagagttcgggcgcacaggagccccacagaaggccaggatagtctacttgagggcggcggtccagttattacagggtcctggccagaaagaaccaattcc

SEQ ID NO: 296893 - DNA, 4431 bp, Homo sapiens
ggcaagtggccgcctggagcccagggccgctgtccggggaagggggcgccggagcagcccggaattcctgaggccggcgctgcaggcagcggcggctgcgcggtgaacgaggcggcctgcgcggcggagtgctgagtcccgatccccggctctgtccggcccacggatcctcaagcccgggccccgggcccggccccagcctcagccctgagcgtctcggggcggatggcgcggggcggcgggggcgggcggtgctgagccctgcgcgggccatggcctcggcctgcggggcgccgggcccggggggcgccctgggcagccaggccccctcctggtaccaccgcgacctgagccgggcggccgcggaggagctgctggcccgggcgggccgcgatggcagcttcctggtccgagacagcgagagcgtggcgggggccttcgcgctctgcgtcctgtatcagaagcatgtgcacacgtatcgcattctgcctgatggagaagatttcttggctgtgcagacctcgcagggtgtgcctgtgcgccgcttccagaccctgggtgagctcatcggcctgtacgcccagcccaaccagggccttgtgtgcgccctgcttcttcctgtagagggtgagcgagagccggacccaccggatgaccgggatgcctcagatggggaggatgagaagcccccgctgcccccgcgctctggctccaccagcatttctgcccccactgggcccagcagtcccctgccagctcctgagactcccacagctccagctgctgagagtgctcccaatgggctgagcaccgtctcgcacgactacctgaaaggcagctatgggctggacctggaagctgtgaggggtggagccagccacctgccccacctcacccgtaccctcgctacctcatgccggaggctgcacagtgaggtggacaaggtcctgtcaggcctggagatcctgtccaaggtgtttgaccagcagagctcgcccatggtgacccgccttttgcagcagcagaacctgccacagacaggggagcaggaactagagagcctggtgctgaagctgtcagtgctaaaggacttcctgtcaggcatccagaagaaggccctgaaggccctacaggacatgagctccacagcacccccagctccgcagccatccacacgtaaggccaagaccatccccgtgcaggcctttgaggtgaagctagatgtgaccctgggtgacctgaccaagattgggaagtcacagaagttcacgctgagcgtggatgtggagggtgggcggctggtgctgctgcggagacagcgggactcccaggaggactggaccaccttcacgcacgaccgcatccgccagctcattaagtcccagcgtgtccagaacaagctgggtgttgtgtttgagaaggagaaggaccggactcagcgcaaggacttcatctttgtcagtgcccggaagcgggaggccttctgccagctgttgcagctcatgaagaacaagcactccaagcaggacgagcccgacatgatctcagtcttcataggcacctggaacatgggaagtgtaccacctccaaaaaacgtgacatcctggttcacatcgaagggtctggggaagaccctggacgaggtcacagtgaccataccccatgacatctatgtctttgggacccaggagaactcagtgggcgaccgcgagtggctggacctactgcgcgggggcctcaaggagcttacggatctggattaccgcccgattgccatgcaatcactgtggaatatcaaggtggcagtgctggtcaagccagagcacgagaaccgtatcagccatgtcagtacgtccagtgtgaagactggcatcgccaacaccctggggaacaagggggctgtgggcgtctccttcatgtttaatggcacctcatttggctttgtgaattgtcacctcacctcgggaaatgagaagacggctcggaggaaccaaaactacttggacatcctgcggctgctctcgctgggcgaccggcagctcaatgcctttgacatctctctgcgtttcacacacctcttctggtttggggacctcaactaccgcctggacatggatatccaggagatcctgaactacatcagcaggaaagagtttgagcccctcctcagggtggaccagctcaacctggagcgggagaagcacaaggtcttccttcgattcagtgaggaggagatctccttcccacccacctaccgctatgagcggggttcccgggacacatatgcctggcacaagcagaagccaactggggtccggaccaatgtgccctcatggtgtgaccggattctgtggaaatcctaccctgaaactcacatcatctgcaattcttatggttgcactgatgacatcgtcaccagcgaccattcccccgtgtttgggacatttgaggttggagttacctcccagttcatctccaagaaagggctctcaaagacttcagaccaggcctacattgagtttgagagcatcgaggccattgtgaagacagccagccgcaccaagttcttcatcgagttctactctacctgcctggaggaatacaagaagagctttgagaatgatgcccagagcagtgacaacatcaacttcctcaaagtgcagtggtcttcacgccagctgcccacgctcaaaccaattctggctgatatcgagtacctgcaggaccagcacctcctgctcacagtcaagtccatggatggctatgaatcctatggggagtgtgtggttgcactcaaatccatgatcggcagcacggcccaacagttcctgaccttcctatcccaccgtggcgaggagacaggcaatatcagaggctccatgaaggtgcgggtgcccacggagcgcctgggcacccgtgagcggctctacgagtggatcagcattgataaggatgaggcaggagcaaagagcaaagccccctctgtgtcccgagggagccaggagcccaggtcagggagccgcaagccagccttcacagaggcctcctgcccgctctccaggttatttgaagaaccagagaaaccgccaccaacggggaggcccccagccccaccccgagcagctccccgggaggagcccttgacccccaggttgaagccagagggagctcctgaaccagaaggggtggcggccccccacccaagaacagcttcaataaccctgcctactacgtccttgaaggggtcccgcaccagctgctgcccccggagccaccctcgcctgccagggcccctgtcccatctgccaccaagaacaaagtggccattacagtgcctgctccacagcttgggcaccaccggcaccctcgtgtgggagaggggagttcttcagatgaggagtctggaggcacactgccccctccagactttccacctccaccactgccggactcagccatcttcctgccccccagcctggatcctttaccagggccagtggtccggggccgtggtggggctgaggcccgtggcccaccacctcccaaggcccatccaaggcctccactgcccccaggcccctcaccagccagcactttcctgggggaagtggccagtggggatgaccggtcctgctcggtgctgcagatggccaagacgctgagcgaggtggactatgcccctgctgggcctgcacgctcagcgctcctcccaggccccctggagctgcagcccccccggggactgccctcggactatggccggcccctcagcttccctccaccccgcatccgggagagcatccaggaagacctggcagaggaggctccgtgcctgcagggcgggcgggccagcgggctgggcgaggcaggcatgagtgcctggctgcgggccatcggcttggagcgctatgaggagggcctggtgcataatggctgggacgacctggagtttctcagtgacatcaccgaggaggacttggaggaggctggggtgcaggacccggctcacaagcgcctccttctggacaccctgcagctcagcaagtgatagcggaggcaccacgaagctgtgaactcagagcccctccctgctaccaaggcccagctatggccccagggttgaaaagttatgagggtcagggcagtatctctctgcctatttattggggtgcctatttattggggatctgcattccccgctgcccaatcatttgcaatgccctaattagggcatcctgcccctcgccttttaggctcaggacggaaggtcagttgccatggttaccgaggaccctggttactctggtgctgtcctgttttactggaccccgcctcccagccccaggggtgcctgtgggggtccatttgggtacgtctgggcccccactttcacacgcttcgtcgtaagggatcgtctagaacacagcaatt

SEQ ID NO: 296894 - DNA, 5226 bp, Homo sapiens
  misc_feature (4397)..(4397): n is a, c, g, or t
  misc_feature (4417)..(4417): n is a, c, g, or t
  misc_feature (4419)..(4419): n is a, c, g, or t
ggcaagtggccgcctggagcccagggccgctgtccggggaagggggcgccggagcagcccggaattcctgaggccggcgctgcaggcagcggcggctgcgcggtgaacgaggcggcctgcgcggcggagtgctgagtcccgatccccggctctgtccggcccacggatcctcaagcccgggccccgggcccggccccagcctcagccctgagcgtctcggggcggatggcgcggggcggcgggggcgggcggtgctgagccctgcgcgggccatggcctcggcctgcggggcgccgggcccggggggcgccctgggcagccaggccccctcctggtaccaccgcgacctgagccgggcggccgcggaggagctgctggcccgggcgggccgcgatggcagcttcctggtccgagacagcgagagcgtggcgggggccttcgcgctctgcgtcctgtatcagaagcatgtgcacacgtatcgcattctgcctgatggagaagatttcttggctgtgcagacctcgcagggtgtgcctgtgcgccgcttccagaccctgggtgagctcatcggcctgtacgcccagcccaaccagggccttgtgtgcgccctgcttcttcctgtagagggtgagcgagagccggacccaccggatgaccgggatgcctcagatggggaggatgagaagcccccgctgcccccgcgctctggctccaccagcatttctgcccccactgggcccagcagtcccctgccagctcctgagactcccacagctccagctgctgagagtgctcccaatgggctgagcaccgtctcgcacgactacctgaaaggcagctatgggctggacctggaagctgtgaggggtggagccagccacctgccccacctcacccgtaccctcgctacctcatgccggaggctgcacagtgaggtggacaaggtcctgtcaggcctggagatcctgtccaaggtgtttgaccagcagagctcgcccatggtgacccgccttttgcagcagcagaacctgccacagacaggggagcaggaactagagagcctggtgctgaagctgtcagtgctaaaggacttcctgtcaggcatccagaagaaggccctgaaggccctacaggacatgagctccacagcacccccagctccgcagccatccacacgtaaggccaagaccatccccgtgcaggcctttgaggtgaagctagatgtgaccctgggtgacctgaccaagattgggaagtcacagaagttcacgctgagcgtggatgtggagggtgggcggctggtgctgctgcggagacagcgggactcccaggaggactggaccaccttcacgcacgaccgcatccgccagctcattaagtcccagcgtgtccagaacaagctgggtgttgtgtttgagaaggagaaggaccggactcagcgcaaggacttcatctttgtcagtgcccggaagcgggaggccttctgccagctgttgcagctcatgaagaacaagcactccaagcaggacgagcccgacatgatctcagtcttcataggcacctggaacatgggaagtgtaccacctccaaaaaacgtgacatcctggttcacatcgaagggtctggggaagaccctggacgaggtcacagtgaccataccccatgacatctatgtctttgggacccaggagaactcagtgggcgaccgcgagtggctggacctactgcgcgggggcctcaaggagcttacggatctggattaccgcccgattgccatgcaatcactgtggaatatcaaggtggcagtgctggtcaagccagagcacgagaaccgtatcagccatgtcagtacgtccagtgtgaagactggcatcgccaacaccctggggaacaagggggctgtgggcgtctccttcatgtttaatggcacctcatttggctttgtgaattgtcacctcacctcgggaaatgagaagacggctcggaggaaccaaaactacttggacatcctgcggctgctctcgctgggcgaccggcagctcaatgcctttgacatctctctgcgtttcacacacctcttctggtttggggacctcaactaccgcctggacatggatatccaggagatcctgaactacatcagcaggaaagagtttgagcccctcctcagggtggaccagctcaacctggagcgggagaagcacaaggtcttccttcgattcagtgaggaggagatctccttcccacccacctaccgctatgagcggggttcccgggacacatatgcctggcacaagcagaagccaactggggtccggaccaatgtgccctcatggtgtgaccggattctgtggaaatcctaccctgaaactcacatcatctgcaattcttatggttgcactgatgacatcgtcaccagcgaccattcccccgtgtttgggacatttgaggttggagttacctcccagttcatctccaagaaagggctctcaaagacttcagaccaggcctacattgagtttgagagcatcgaggccattgtgaagacagccagccgcaccaagttcttcatcgagttctactctacctgcctggaggaatacaagaagagctttgagaatgatgcccagagcagtgacaacatcaacttcctcaaagtgcagtggtcttcacgccagctgcccacgctcaaaccaattctggctgatatcgagtacctgcaggaccagcacctcctgctcacagtcaagtccatggatggctatgaatcctatggggagtgtgtggttgcactcaaatccatgatcggcagcacggcccaacagttcctgaccttcctatcccaccgtggcgaggagacaggcaatatcagaggctccatgaaggtgcgggtgcccacggagcgcctgggcacccgtgagcggctctacgagtggatcagcattgataaggatgaggcaggagcaaagagcaaagccccctctgtgtcccgagggagccaggagcccaggtcagggagccgcaagccagccttcacagaggcctcctgcccgctctccaggttatttgaagaaccagagaaaccgccaccaacggggaggcccccagccccaccccgagcagctccccgggaggagcccttgacccccaggttgaagccagagggagctcctgaaccagaaggggtggcggccccccacccaagaacagcttcaataaccctgcctactacgtccttgaaggggtcccgcaccagctgctgcccccggagccaccctcgcctgccagggcccctgtcccatctgccaccaagaacaaagtggccattacagtgcctgctccacagcttgggcaccaccggcaccctcgtgtgggagaggggagttcttcagatgaggagtctggaggcacactgccccctccagactttccacctccaccactgccggactcagccatcttcctgccccccagcctggatcctttaccagggccagtggtccggggccgtggtggggctgaggcccgtggcccaccacctcccaaggcccatccaaggcctccactgcccccaggcccctcaccagccagcactttcctgggggaagtggccagtggggatgaccggtcctgctcggtgctgcagatggccaagacgctgagcgaggtggactatgcccctgctgggcctgcacgctcagcgctcctcccaggccccctggagctgcagcccccccggggactgccctcggactatggccggcccctcagcttccctccaccccgcatccgggagagcatccaggaagacctggcagaggaggctccgtgcctgcagggcgggcgggccagcgggctgggcgaggcaggcatgagtgcctggctgcgggccatcggcttggagcgctatgaggagggcctggtgcataatggctgggacgacctggagtttctcagtgacatcaccgaggaggacttggaggaggctggggtgcaggacccggctcacaagcgcctccttctggacaccctgcagctcagcaagtgatagcggaggcaccacgaagctgtgaactcagagcccctccctgctaccaaggcccagctatggccccagggttgaaaagttatgagggtcagggcagtatctctctgcctatttattggggtgcctatttattggggatctgcattccccgctgcccaatcatttgcaatgccctaattagggcatcctgcccctcgccttttaggctcaggacggaaggtcagttgccatggttaccgaggaccctggttactctggtgctgtcctgttttactggaccagcacctcctgcccacagtcaagtccatggatggctatgaatcctatggggagtgtgtggttgcactcnaatccatgatcggcagcacngnccaacagttcctgaccttcctatcccaccgtggcgaggagacaggcaatatcagaggctccatgaaggtgcgggtgcccacggagcgcctgggcacccgtgagcggctctacgagtggatcagcattgataaggattgaggcaggagacaaagagcaaagccccctctgtgtccctgagggacgccaggagcccaaggtcagggagccgcaagccagccttcacagagggcctcacttgcccgctctccaagaggttactatgaacgaacgcagagaaaacccgacgatcatacggggggaaggccctccagagggcccgacccgccggacccagctcccccgagggatgcgacgggcccatatgcacctcccacaagggatacgaatggcgccacgaccgggcagcgctacctggaccagcccgagccaatgggcggttgggccggcgtcccccaacacccaagtcaatagttcgtacgtcgaaccccttttgacgcattagccaccctgttcgataagactcaaagagattaccctggtgaaaacagagaggataccccagcagccaggagcctttatcttggcccaccacgcgaagtcaccgccccttcatcgccctgtccaagtggtgagccacacacatgcatatcacaacatcatatgtggcagctccatcaatcaaaatcgacacagtttgacacaactatgaacaatgataggccacttgacatacacgacgaacagcacttcggacgaacagccaccacgaagccaatcaacattagaatgaatgctgcagtagcaag

SEQ ID NO: 296895 - DNA, 1600 bp, Homo sapiens
gcccccttcaaggacgtagtaggcagtactacgtccttgaaggggtcccgcaccagctgctgcccccggagccaccctcgcctgccagggcccctgtcccatctgccaccaagaacaaagtggccattacagtgcctgctccacagcttgggcaccaccggcaccctcgtgtgggagaggggagttcttcagatgaggagtctggaggcacactgccccctccagactttccacctccaccactgccggactcagccatcttcctgccccccagcctggatcctttaccagggccagtggtccggggccgtggtggggctgaggcccgtggcccaccacctcccaaggcccatccaaggcctccactgcccccaggcccctcaccagccagcactttcctgggggaagtggccagtggggatgaccggtcctgctcggtgctgcagatggccaagacgctgagcgaggtggactatgcccctgctgggcctgcacgctcagcgctcctcccaggccccctggagctgcagcccccccggggactgccctcggactatggccggcccctcagcttccctccaccccgcatccgggagagcatccaggaagacctggcagaggaggctccgtgcctgcagggcgggcgggccagcgggctgggcgaggcaggcatgagtgcctggctgcgggccatcggcttggagcgctatgaggagggcctggtgcataatggctgggacgacctggagtttctcagtgacatcaccgaggaggacttggaggaggctggggtgcaggacccggctcacaagcgcctccttctggacaccctgcagctcagcaagtgatagcggaggcaccacgaagctgtgaactcagagcccctccctgctaccaaggcccagctatggccccagggttgaaaagttatgagggtcagggcagtatctctctgcctatttattggggtgcctatttattggggatctgcattccccgctgcccaatcatttgcaatgccctaattagggcatcctgcccctcgccttttaggctcaggacggaaggtcagttgccatggttaccgaggaccctggttactctggtgctgtcctgttttactggaccccgcctcccagccccaggggtgcctgtgggggtccatttgggtacgtctgggcccccactttcaccagtttctgcggccttccaccgggcctgaaccacagcggaggagctccgctaagacctccccacccccgctgggggtgggggcgggtgtccgtccggaaatgaaggaatagcccgaggaccgggctggggtttatttaaactgttctgtgtgggtctggggagggagagcaccttaatattattggggttggttggggtggggcaggatctcagccataaagtgccagtttgcttagttctcactgtctcctggtctgtgctgccctgctctggggatgcacggcggcagggtgggggagggaggttcctcgcaggtctcagcccgggacagggtcttgcaagcagcctcctgggcagtcgtaagggttgcggcgtgatgtcttcaataaattaagttttatttgga

SEQ ID NO: 296896 - DNA, 5313 bp, Homo sapiens
  misc_feature (4484)..(4484): n is a, c, g, or t
  misc_feature (4504)..(4504): n is a, c, g, or t
  misc_feature (4506)..(4506): n is a, c, g, or t
ggcaagtggccgcctggagcccagggccgctgtccggggaagggggcgccggagcagcccggaattcctgaggccggcgctgcaggcagcggcggctgcgcggtgaacgaggcggcctgcgcggcggagtgctgagtcccgatccccggctctgtccggcccacggatcctcaagcccgggccccgggcccggccccagcctcagccctgagcgtctcggggcggatggcgcggggcggcgggggcgggcggtgctgagccctgcgcgggccatggcctcggcctgcggggcgccgggcccggggggcgccctgggcagccaggccccctcctggtaccaccgcgacctgagccgggcggccgcggaggagctgctggcccgggcgggccgcgatggcagcttcctggtccgagacagcgagagcgtggcgggggccttcgcgctctgcgtcctgtatcagaagcatgtgcacacgtatcgcattctgcctgatggagaagatttcttggctgtgcagacctcgcagggtgtgcctgtgcgccgcttccagaccctgggtgagctcatcggcctgtacgcccagcccaaccagggccttgtgtgcgccctgcttcttcctgtagagggtgagcgagagccggacccaccggatgaccgggatgcctcagatggggaggatgagaagcccccgctgcccccgcgctctggctccaccagcatttctgcccccactgggcccagcagtcccctgccagctcctgagactcccacagctccagctgctgagagtgctcccaatgggctgagcaccgtctcgcacgactacctgaaaggcagctatgggctggacctggaagctgtgaggggtggagccagccacctgccccacctcacccgtaccctcgctacctcatgccggaggctgcacagtgaggtggacaaggtcctgtcaggcctggagatcctgtccaaggtgtttgaccagcagagctcgcccatggtgacccgccttttgcagcagcagaacctgccacagacaggggagcaggaactagagagcctggtgctgaagctgtcagtgctaaaggacttcctgtcaggcatccagaagaaggccctgaaggccctacaggacatgagctccacagcacccccagctccgcagccatccacacgtaaggccaagaccatccccgtgcaggcctttgaggtgaagctagatgtgaccctgggtgacctgaccaagattgggaagtcacagaagttcacgctgagcgtggatgtggagggtgggcggctggtgctgctgcggagacagcgggactcccaggaggactggaccaccttcacgcacgaccgcatccgccagctcattaagtcccagcgtgtccagaacaagctgggtgttgtgtttgagaaggagaaggaccggactcagcgcaaggacttcatctttgtcagtgcccggaagcgggaggccttctgccagctgttgcagctcatgaagaacaagcactccaagcaggacgagcccgacatgatctcagtcttcataggcacctggaacatgggaagtgtaccacctccaaaaaacgtgacatcctggttcacatcgaagggtctggggaagaccctggacgaggtcacagtgaccataccccatgacatctatgtctttgggacccaggagaactcagtgggcgaccgcgagtggctggacctactgcgcgggggcctcaaggagcttacggatctggattaccgcccgattgccatgcaatcactgtggaatatcaaggtggcagtgctggtcaagccagagcacgagaaccgtatcagccatgtcagtacgtccagtgtgaagactggcatcgccaacaccctggggaacaagggggctgtgggcgtctccttcatgtttaatggcacctcatttggctttgtgaattgtcacctcacctcgggaaatgagaagacggctcggaggaaccaaaactacttggacatcctgcggctgctctcgctgggcgaccggcagctcaatgcctttgacatctctctgcgtttcacacacctcttctggtttggggacctcaactaccgcctggacatggatatccaggagatcctgaactacatcagcaggaaagagtttgagcccctcctcagggtggaccagctcaacctggagcgggagaagcacaaggtcttccttcgattcagtgaggaggagatctccttcccacccacctaccgctatgagcggggttcccgggacacatatgcctggcacaagcagaagccaactggggtccggaccaatgtgccctcatggtgtgaccggattctgtggaaatcctaccctgaaactcacatcatctgcaattcttatggttgcactgatgacatcgtcaccagcgaccattcccccgtgtttgggacatttgaggttggagttacctcccagttcatctccaagaaagggctctcaaagacttcagaccaggcctacattgagtttgagagcatcgaggccattgtgaagacagccagccgcaccaagttcttcatcgagttctactctacctgcctggaggaatacaagaagagctttgagaatgatgcccagagcagtgacaacatcaacttcctcaaagtgcagtggtcttcacgccagctgcccacgctcaaaccaattctggctgatatcgagtacctgcaggaccagcacctcctgctcacagtcaagtccatggatggctatgaatcctatggggagtgtgtggttgcactcaaatccatgatcggcagcacggcccaacagttcctgaccttcctatcccaccgtggcgaggagacaggcaatatcagaggctccatgaaggtgcgggtgcccacggagcgcctgggcacccgtgagcggctctacgagtggatcagcattgataaggatgaggcaggagcaaagagcaaagccccctctgtgtcccgagggagccaggagcccaggtcagggagccgcaagccagccttcacagaggcctcctgcccgctctccaggttatttgaagaaccagagaaaccgccaccaacggggaggcccccagccccaccccgagcagctccccgggaggagcccttgacccccaggttgaagccagagggagctcctgaaccagaaggggtggcggccccccacccaagaacagcttcaataaccctgcctactacgtccttgaaggggtcccgcaccagctgctgcccccggagccaccctcgcctgccagggcccctgtcccatctgccaccaagaacaaagtggccattacagtgcctgctccacagcttgggcaccaccggcaccctcgtgtgggagaggggagttcttcagatgaggagtctggaggcacactgccccctccagactttccacctccaccactgccggactcagccatcttcctgccccccagcctggatcctttaccagggccagtggtccggggccgtggtggggctgaggcccgtggcccaccacctcccaaggcccatccaaggcctccactgcccccaggcccctcaccagccagcactttcctgggggaagtggccagtggggatgaccggtcctgctcggtgctgcagatggccaagacgctgagcgaggtggactatgcccctgctgggcctgcacgctcagcgctcctcccaggccccctggagctgcagcccccccggggactgccctcggactatggccggcccctcagcttccctccaccccgcatccgggagagcatccaggaagacctggcagaggaggctccgtgcctgcagggcgggcgggccagcgggctgggcgaggcaggcatgagtgcctggctgcgggccatcggcttggagcgctatgaggagggcctggtgcataatggctgggacgacctggagtttctcaggtgggggaggggctggccccgggggcggagctggggccctcaggatccccttgcccatctcacttcccagcctgttttactccacagtgacatcaccgaggaggacttggaggaggctggggtgcaggacccggctcacaagcgcctccttctggacaccctgcagctcagcaagtgatagcggaggcaccacgaagctgtgaactcagagcccctccctgctaccaaggcccagctatggccccagggttgaaaagttatgagggtcagggcagtatctctctgcctatttattggggtgcctatttattggggatctgcattccccgctgcccaatcatttgcaatgccctaattagggcatcctgcccctcgccttttaggctcaggacggaaggtcagttgccatggttaccgaggaccctggttactctggtgctgtcctgttttactggaccagcacctcctgcccacagtcaagtccatggatggctatgaatcctatggggagtgtgtggttgcactcnaatccatgatcggcagcacngnccaacagttcctgaccttcctatcccaccgtggcgaggagacaggcaatatcagaggctccatgaaggtgcgggtgcccacggagcgcctgggcacccgtgagcggctctacgagtggatcagcattgataaggattgaggcaggagacaaagagcaaagccccctctgtgtccctgagggacgccaggagcccaaggtcagggagccgcaagccagccttcacagagggcctcacttgcccgctctccaagaggttactatgaacgaacgcagagaaaacccgacgatcatacggggggaaggccctccagagggcccgacccgccggacccagctcccccgagggatgcgacgggcccatatgcacctcccacaagggatacgaatggcgccacgaccgggcagcgctacctggaccagcccgagccaatgggcggttgggccggcgtcccccaacacccaagtcaatagttcgtacgtcgaaccccttttgacgcattagccaccctgttcgataagactcaaagagattaccctggtgaaaacagagaggataccccagcagccaggagcctttatcttggcccaccacgcgaagtcaccgccccttcatcgccctgtccaagtggtgagccacacacatgcatatcacaacatcatatgtggcagctccatcaatcaaaatcgacacagtttgacacaactatgaacaatgataggccacttgacatacacgacgaacagcacttcggacgaacagccaccacgaagccaatcaacattagaatgaatgctgcagtagcaag

SEQ ID NO: 296897 - DNA, 1693 bp, Homo sapiens
ggcaagtggccgcctggagcccagggccgctgtccggggaagggggcgccggagcagcccggaattcctgaggccggcgctgcaggcagcggcggctgcgcggtgaacgaggcggcctgcgcggcggagtgctgagtcccgatccccggctctgtccggcccacggatcctcaagcccgggcccctcaccagccagcactttcctggggaaagtggccattacagtgcctgctccacagcttgggcaccaccggcaccctcgtgtgggagaggggagttcttcagatgaggagtctggaggcacactgccccctccagactttccacctccaccactgccggactcagccatcttcctgccccccagcctggatcctttaccagggccagtggtccggggccgtggtggggctgaggcccgtggcccaccacctcccaaggcccatccaaggcctccactgcccccaggcccctcaccagccagcactttcctgggggaagtggccagtggggatgaccggtcctgctcggtgctgcagatggccaagacgctgagcgaggtggactatgcccctgctgggcctgcacgctcagcgctcctcccaggccccctggagctgcagcccccccggggactgccctcggactatggccggcccctcagcttccctccaccccgcatccgggagagcatccaggaagacctggcagaggaggctccgtgcctgcagggcgggcgggccagcgggctgggcgaggcaggcatgagtgcctggctgcgggccatcggcttggagcgctatgaggagggcctggtgcataatggctgggacgacctggagtttctcagtgacatcaccgaggaggacttggaggaggctggggtgcaggacccggctcacaagcgcctccttctggacaccctgcagctcagcaagtgatagcggaggcaccacgaagctgtgaactcagagcccctccctgctaccaaggcccagctatggccccagggttgaaaagttatgagggtcagggcagtatctctctgcctatttattggggtgcctatttattggggatctgcattccccgctgcccaatcatttgcaatgccctaattagggcatcctgcccctcgccttttaggctcaggacggaaggtcagttgccatggttaccgaggaccctggttactctggtgctgtcctgttttactggaccccgcctcccagccccaggggtgcctgtgggggtccatttgggtacgtctgggcccccactttcaccagtttctgcggccttccaccgggcctgaaccacagcggaggagctccgctaagacctccccacccccgctgggggtgggggcgggtgtccgtccggaaatgaaggaatagcccgaggaccgggctggggtttatttaaactgttctgtgtgggtctggggagggagagcaccttaatattattggggttggttggggtggggcaggatctcagccataaagtgccagtttgcttagttctcactgtctcctggtctgtgctgccctgctctggggatgcacggcggcagggtgggggagggaggttcctcgcaggtctcagcccgggacagggtcttgcaagcagcctcctgggcagtcgtaagggttgcggcgtgatgtcttcaataaattaagttttatttgga

SEQ ID NO: 296898 - DNA, 3728 bp, Homo sapiens
ggcaagtggccgcctggagcccagggccgctgtccggggaagggggcgccggagcagcccggaattcctgaggccggcgctgcaggcagcggcggctgcgcggtgaacgaggcggcctgcgcggcggagtgctgagtcccgatccccggctctgtccggcccacggatcctcaagcccgggccccgggcccggccccagcctcagccctgagcgtctcggggcggatggcgcggggcggcgggggcgggcggtgctgagccctgcgcgggccatggcctcggcctgcggggcgccgggcccggggggcgccctgggcagccaggccccctcctggtaccaccgcgacctgagccgggcggccgcggaggagctgctggcccgggcgggccgcgatggcagcttcctggtccgagacagcgagagcgtggcgggggccttcgcgctctgcgtcctgtatcagaagcatgtgcacacgtatcgcattctgcctgatggagaagatttcttggctgtgcagacctcgcagggtgtgcctgtgcgccgcttccagaccctgggtgagctcatcggcctgtacgcccagcccaaccagggccttgtgtgcgccctgcttcttcctgtagagggtgagcgagagccggacccaccggatgaccgggatgcctcagatggggaggatgagaagcccccgctgcccccgcgctctggctccaccagcatttctgcccccactgggcccagcagtcccctgccagctcctgagactcccacagctccagctgctgagagtgctcccaatgggctgagcaccgtctcgcacgactacctgaaaggcagctatgggctggacctggaagctgtgaggggtggagccagccacctgccccacctcacccgtaccctcgctacctcatgccggaggctgcacagtgaggtggacaaggtcctgtcaggcctggagatcctgtccaaggtgtttgaccagcagagctcgcccatggtgacccgccttttgcagcagcagaacctgccacagacaggggagcaggaactagagagcctggtgctgaagctgtcagtgctaaaggacttcctgtcaggcatccagaagaaggccctgaaggccctacaggacatgagctccacagcacccccagctccgcagccatccacacgtaaggccaagaccatccccgtgcaggcctttgaggtgaagctagatgtgaccctgggtgacctgaccaagattgggaagtcacagaagttcacgctgagcgtggatgtggagggtgggcggctggtgctgctgcggagacagcgggactcccaggaggactggaccaccttcacgcacgaccgcatccgccagctcattaagtcccagcgtgtccagaacaagctgggtgttgtgtttgagaaggagaaggaccggactcagcgcaaggacttcatctttgtcagtgcccggaagcgggaggccttctgccagctgttgcagctcatgaagaacaagcactccaagcaggacgagcccgacatgatctcagtcttcataggcacctggaacatgggaagtgtaccacctccaaaaaacgtgacatcctggttcacatcgaagggtctggggaagaccctggacgaggtcacagtgaccataccccatgacatctatgtctttgggacccaggagaactcagtgggcgaccgcgagtggctggacctactgcgcgggggcctcaaggagcttacggatctggattaccgcccgattgccatgcaatcactgtggaatatcaaggtggcagtgctggtcaagccagagcacgagaaccgtatcagccatgtcagtacgtccagtgtgaagactggcatcgccaacaccctggggaacaagggggctgtgggcgtctccttcatgtttaatggcacctcatttggctttgtgaattgtcacctcacctcgggaaatgagaagacggctcggaggaaccaaaactacttggacatcctgcggctgctctcgctgggcgaccggcagctcaatgcctttgacatctctctgcgtttcacacacctcttctggtttggggacctcaactaccgcctggacatggatatccaggagatcctgaactacatcagcaggaaagagtttgagcccctcctcagggtggaccagctcaacctggagcgggagaagcacaaggtcttccttcgattcagtgaggaggagatctccttcccacccacctaccgctatgagcggggttcccgggacacatatgcctggcacaagcagaagccaactggggtccggaccaatgtgccctcatggtgtgaccggattctgtggaaatcctaccctgaaactcacatcatctgcaattcttatggttgcactgatgacatcgtcaccagcgaccattcccccgtgtttgggacatttgaggttggagttacctcccagttcatctccaagaaagggctctcaaagacttcagaccaggcctacattgagtttgagagcatcgaggccattgtgaagacagccagccgcaccaagttcttcatcgagttctactctacctgcctggaggaatacaagaagagctttgagaatgatgcccagagcagtgacaacatcaacttcctcaaagtgcagtggtcttcacgccagctgcccacgctcaaaccaattctggctgatatcgagtacctgcaggaccagcacctcctgctcacagtcaagtccatggatggctatgaatcctatggggagtgtgtggttgcactcaaatccatgatcggcagcacggcccaacagttcctgaccttcctatcccaccgtggcgaggagacaggcaatatcagaggctccatgaaggtgcgggtgcccacggagcgcctgggcacccgtgagcggctctacgagtggatcagcattgataaggatgaggcaggagcaaagagcaaagccccctctgtgtcccgagggagccaggagcccaggtcagggagccgcaagccagccttcacagaggcctcctgcccgctctccaggttatttgaagaaccagagaaaccgccaccaacggggaggcccccagccccaccccgagcagctccccgggaggagcccttgacccccaggttgaagccagagggagctcctgaaccagaaggggtggcggccccccacccaagaacagcttcaataaccctgcctactctggtgctgtcctgttttactggaccccgcctcccagccccaggggtgcctgtgggggtccatttgggtacgtctgggcccccactttcaccagtttctgcggccttccaccgggcctgaaccacagcggaggagctccgctaagacctccccacccccgctgggggtgggggcgggtgtccgtccggaaatgaaggaatagcccgaggaccgggctggggtttatttaaactgttctgtgtgggtctggggagggagagcaccttaatattattggggttggttggggtggggcaggatctcagccataaagtgccagtttgcttagttctcactgtctcctggtctgtgctgccctgctctggggatgcacggcggcagggtgggggagggaggttcctcgcaggtctcagcccgggacagggtcttgcaagcagcctcctgggcagtcgtaagggttgcggcgtgatgtcttcaataaattaagttttatttgga

SEQ ID NO: 296899 - DNA, 3516 bp, Homo sapiens
ggcaagtggccgcctggagcccagggccgctgtccggggaagggggcgccggagcagcccggaattcctgaggccggcgctgcaggcagcggcggctgcgcggtgaacgaggcggcctgcgcggcggagtgctgagtcccgatccccggctctgtccggcccacggatcctcaagcccgggccccgggcccggccccagcctcagccctgagcgtctcggggcggatggcgcggggcggcgggggcgggcggtgctgagccctgcgcgggccatggcctcggcctgcggggcgccgggcccggggggcgccctgggcagccaggccccctcctggtaccaccgcgacctgagccgggcggccgcggaggagctgctggcccgggcgggccgcgatggcagcttcctggtccgagacagcgagagcgtggcgggggccttcgcgctctgcgtcctgtatcagaagcatgtgcacacgtatcgcattctgcctgatggagaagatttcttggctgtgcagacctcgcagggtgtgcctgtgcgccgcttccagaccctgggtgagctcatcggcctgtacgcccagcccaaccagggccttgtgtgcgccctgcttcttcctgtagagggtgagcgagagccggacccaccggatgaccgggatgcctcagatggggaggatgagaagcccccgctgcccccgcgctctggctccaccagcatttctgcccccactgggcccagcagtcccctgccagctcctgagactcccacagctccagctgctgagagtgctcccaatgggctgagcaccgtctcgcacgactacctgaaaggcagctatgggctggacctggaagctgtgaggggtggagccagccacctgccccacctcacccgtaccctcgctacctcatgccggaggctgcacagtgaggtggacaaggtcctgtcaggcctggagatcctgtccaaggtgtttgaccagcagagctcgcccatggtgacccgccttttgcagcagcagaacctgccacagacaggggagcaggaactagagagcctggtgctgaagctgtcagtgctaaaggacttcctgtcaggcatccagaagaaggccctgaaggccctacaggacatgagctccacagcacccccagctccgcagccatccacacgtaaggccaagaccatccccgtgcaggcctttgaggtgaagctagatgtgaccctgggtgacctgaccaagattgggaagtcacagaagttcacgctgagcgtggatgtggagggtgggcggctggtgctgctgcggagacagcgggactcccaggaggactggaccaccttcacgcacgaccgcatccgccagctcattaagtcccagcgtgtccagaacaagctgggtgttgtgtttgagaaggagaaggaccggactcagcgcaaggacttcatctttgtcagtgcccggaagcgggaggccttctgccagctgttgcagctcatgaagaacaagcactccaagcaggacgagcccgacatgatctcagtcttcataggcacctggaacatgggaagtgtaccacctccaaaaaacgtgacatcctggttcacatcgaagggtctggggaagaccctggacgaggtcacagtgaccataccccatgacatctatgtctttgggacccaggagaactcagtgggcgaccgcgagtggctggacctactgcgcgggggcctcaaggagcttacggatctggattaccgcccgattgccatgcaatcactgtggaatatcaaggtggcagtgctggtcaagccagagcacgagaaccgtatcagccatgtcagtacgtccagtgtgaagactggcatcgccaacaccctggggaacaagggggctgtgggcgtctccttcatgtttaatggcacctcatttggctttgtgaattgtcacctcacctcgggaaatgagaagacggctcggaggaaccaaaactacttggacatcctgcggctgctctcgctgggcgaccggcagctcaatgcctttgacatctctctgcgtttcacacacctcttctggtttggggacctcaactaccgcctggacatggatatccaggagatcctgaactacatcagcaggaaagagtttgagcccctcctcagggtggaccagctcaacctggagcgggagaagcacaaggtcttccttcgattcagtgaggaggagatctccttcccacccacctaccgctatgagcggggttcccgggacacatatgcctggcacaagcagaagccaactggggtccggaccaatgtgccctcatggtgtgaccggattctgtggaaatcctaccctgaaactcacatcatctgcaattcttatggttgcactgatgacatcgtcaccagcgaccattcccccgtgtttgggacatttgaggttggagttacctcccagttcatctccaagaaagggctctcaaagacttcagaccaggcctacattgagtttgagagcatcgaggccattgtgaagacagccagccgcaccaagttcttcatcgagttctactctacctgcctggaggaatacaagaagagctttgagaatgatgcccagagcagtgacaacatcaacttcctcaaagtgcagtggtcttcacgccagctgcccacgctcaaaccaattctggctgatatcgagtacctgcaggaccagcacctcctgctcacagtcaagtccatggatggctatgaatcctatggggagtgtgtggttgcactcaaatccatgatcggcagcacggcccaacagttcctgaccttcctatcccaccgtggcgaggagacaggcaatatcagaggctccatgaaggtgcgggtgcccacggagcgcctgggcacccgtgagcggctctacgagtggatcagcattgataaggatgaggcaggagcaaagagcaaagccccctctgtgtcccgagggagccaggagcccaggtgagctagggctgtgttgaatgtcatatgaaagggtacctgggggcatctggtcaaccccacttcatctctctcctgtgcatccctggcaggtcagggagccgcaagccagccttcacagaggcctcctgcccgctctccaggttatttgaagaaccagagaaaccgccaggggtgggggcgggtgtccgtccggaaatgaaggaatagcccgaggaccgggctggggtttatttaaactgttctgtgtgggtctggggagggagagcaccttaatattattggggttggttggggtggggcaggatctcagccataaagtgccagtttgcttagttctcactgtctcctggtctgtgctgccctgctctggggatgcacggcggcagggtgggggagggaggttcctcgcaggtctcagcccgggacagggtcttgcaagcagcctcctgggcagtcgtaagggttgcggcgtgatgtcttcaataaattaagttttatttgga

SEQ ID NO: 296900 - DNA, 3049 bp, Homo sapiens
ggcaagtggccgcctggagcccagggccgctgtccggggaagggggcgccggagcagcccggaattcctgaggccggcgctgcaggcagcggcggctgcgcggtgaacgaggcggcctgcgcggcggagtgctgagtcccgatccccggctctgtccggcccacggatcctcaagcccgggccccgggcccggccccagcctcagccctgagcgtctcggggcggatggcgcggggcggcgggggcgggcggtgctgagccctgcgcgggccatggcctcggcctgcggggcgccgggcccggggggcgccctgggcagccaggccccctcctggtaccaccgcgacctgagccgggcggccgcggaggagctgctggcccgggcgggccgcgatggcagcttcctggtccgagacagcgagagcgtggcgggggccttcgcgctctgcgtcctgtatcagaagcatgtgcacacgtatcgcattctgcctgatggagaagatttcttggctgtgcagacctcgcagggtgtgcctgtgcgccgcttccagaccctgggtgagctcatcggcctgtacgcccagcccaaccagggccttgtgtgcgccctgcttcttcctgtagagggtgagcgagagccggacccaccggatgaccgggatgcctcagatggggaggatgagaagcccccgctgcccccgcgctctggctccaccagcatttctgcccccactgggcccagcagtcccctgccagctcctgagactcccacagctccagctgctgagagtgctcccaatgggctgagcaccgtctcgcacgactacctgaaaggcagctatgggctggacctggaagctgtgaggggtggagccagccacctgccccacctcacccgtaccctcgctacctcatgccggaggctgcacagtgaggtggacaaggtcctgtcaggcctggagatcctgtccaaggtgtttgaccagcagagctcgcccatggtgacccgccttttgcagcagcagaacctgccacagacaggggagcaggaactagagagcctggtgctgaagctgtcagtgctaaaggacttcctgtcaggcatccagaagaaggccctgaaggccctacaggacatgagctccacagcacccccagctccgcagccatccacacgtaaggccaagaccatccccgtgcaggcctttgaggtgaagctagatgtgaccctgggtgacctgaccaagattgggaagtcacagaagttcacgctgagcgtggatgtggagggtgggcggctggtgctgctgcggagacagcgggactcccaggaggactggaccaccttcacgcacgaccgcatccgccagctcattaagtcccagcgtgtccagaacaagctgggtgttgtgtttgagaaggagaaggaccggactcagcgcaaggacttcatctttgtcagtgcccggaagcgggaggccttctgccagctgttgcagctcatgaagaacaagcactccaagcaggacgagcccgacatgatctcagtcttcataggcacctggaacatgggaagtgtaccacctccaaaaaacgtgacatcctggttcacatcgaagggtctggggaagaccctggacgaggtcacagtgaccataccccatgacatctatgtctttgggacccaggagaactcagtgggcgaccgcgagtggctggacctactgcgcgggggcctcaaggagcttacggatctggattaccgcccgattgccatgcaatcactgtggaatatcaaggtggcagtgctggtcaagccagagcacgagaaccgtatcagccatgtcagtacgtccagtgtgaagactggcatcgccaacaccctggggaacaagggggctgtgggcgtctccttcatgtttaatggcacctcatttggctttgtgaattgtcacctcacctcgggaaatgagaagacggctcggaggaaccaaaactacttggacatcctgcggctgctctcgctgggcgaccggcagctcaatgcctttgacatctctctgcgtttcacacacctcttctggtttggggacctcaactaccgcctggacatggatatccaggagatcctgaactacatcagcaggaaagagtttgagcccctcctcagggtggaccagctcaacctggagcgggagaagcacaaggtcttccttcgattcagtgaggaggagatctccttcccacccacctaccgctatgagcggggttcccgggacacatatgcctggcacaagcagaagccaactggggtccggaccaatgtgccctcatggtgtgaccggattctgtggaaatcctaccctgaaactcacatcatctgcaattcttatggttgcactgatgacatcgtcaccagcgaccattcccccgtgtttgggacatttgaggttggagttacctcccagttcatctccaagaaagggctctcaaagacttcagaccaggcctacattgagtttgagagcatcgaggccattgtgaagacagccagccgcaccaagttcttcatcgagttctactctacctgcctggaggaatacaagaagagctttgagaatgatgcccagagcagtgacaacatcaacttcctcaaagtgcagtggtcttcacgccagctgcccacgctcaaaccaattctggctgatatcgagtacctgcaggaccagcacctcctgctcacagtcaagtccatggatggctatgaatcctatgtcatagccatccatggcagaaagagcaagagggcagggagggagcacaggggtggccagcgtagggtccagcacgtggggtggtaccccaggcctgggtcagacagggacatggcaggggacacaggacagaggggtccccagctgccacctcaccaacgaatacatttagtagcaggcacaggggcagctccggaacgattctcaggctatgcggagctcgaggcttgaaagcggagacaggcggctcggagttgagaggagtcccagaggga

SEQ ID NO: 296901 - DNA, 2772 bp, Homo sapiens
ggcaagtggccgcctggagcccagggccgctgtccggggaagggggcgccggagcagcccggaattcctgaggccggcgctgcaggcagcggcggctgcgcggtgaacgaggcggcctgcgcggcggagtgctgagtcccgatccccggctctgtccggcccacggatcctcaagcccgggccccgggcccggccccagcctcagccctgagcgtctcggggcggatggcgcggggcggcgggggcgggcggtgctgagccctgcgcgggccatggcctcggcctgcggggcgccgggcccggggggcgccctgggcagccaggccccctcctggtaccaccgcgacctgagccgggcggccgcggaggagctgctggcccgggcgggccgcgatggcagcttcctggtccgagacagcgagagcgtggcgggggccttcgcgctctgcgtcctgtatcagaagcatgtgcacacgtatcgcattctgcctgatggagaagatttcttggctgtgcagacctcgcagggtgtgcctgtgcgccgcttccagaccctgggtgagctcatcggcctgtacgcccagcccaaccagggccttgtgtgcgccctgcttcttcctgtagagggtgagcgagagccggacccaccggatgaccgggatgcctcagatggggaggatgagaagcccccgctgcccccgcgctctggctccaccagcatttctgcccccactgggcccagcagtcccctgccagctcctgagactcccacagctccagctgctgagagtgctcccaatgggctgagcaccgtctcgcacgactacctgaaaggcagctatgggctggacctggaagctgtgaggggtggagccagccacctgccccacctcacccgtaccctcgctacctcatgccggaggctgcacagtgaggtggacaaggtcctgtcaggcctggagatcctgtccaaggtgtttgaccagcagagctcgcccatggtgacccgccttttgcagcagcagaacctgccacagacaggggagcaggaactagagagcctggtgctgaagctgtcagtgctaaaggacttcctgtcaggcatccagaagaaggccctgaaggccctacaggacatgagctccacagcacccccagctccgcagccatccacacgtaaggccaagaccatccccgtgcaggcctttgaggtgaagctagatgtgaccctgggtgacctgaccaagattgggaagtcacagaagttcacgctgagcgtggatgtggagggtgggcggctggtgctgctgcggagacagcgggactcccaggaggactggaccaccttcacgcacgaccgcatccgccagctcattaagtcccagcgtgtccagaacaagctgggtgttgtgtttgagaaggagaaggaccggactcagcgcaaggacttcatctttgtcagtgcccggaagcgggaggccttctgccagctgttgcagctcatgaagaacaagcactccaagcaggacgagcccgacatgatctcagtcttcataggcacctggaacatgggaagtgtaccacctccaaaaaacgtgacatcctggttcacatcgaagggtctggggaagaccctggacgaggtcacagtgaccataccccatgacatctatgtctttgggacccaggagaactcagtgggcgaccgcgagtggctggacctactgcgcgggggcctcaaggagcttacggatctggattaccgcccgattgccatgcaatcactgtggaatatcaaggtggcagtgctggtcaagccagagcacgagaaccgtatcagccatgtcagtacgtccagtgtgaagactggcatcgccaacaccctggggaacaagggggctgtgggcgtctccttcatgtttaatggcacctcatttggctttgtgaattgtcacctcacctcgggaaatgagaagacggctcggaggaaccaaaactacttggacatcctgcggctgctctcgctgggcgaccggcagctcaatgcctttgacatctctctgcgtttcacacacctcttctggtttggggacctcaactaccgcctggacatggatatccaggagatcctgaactacatcagcaggaaagagtttgagcccctcctcagggtggaccagctcaacctggagcgggagaagcacaaggtcttccttcgattcagtgaggaggagatctccttcccacccacctaccgctatgagcggggttcccgggacacatatgcctggcacaagcagaagccaactggggtccggaccaatgtgccctcatggtgtgaccggattctgtggaaatcctaccctgaaactcacatcatctgcaattcttatggttgcactgatgacatcgtcaccagcgaccattcccccgtgtttgggacatttgaggttggagttacctcccagttcatctccaagaaagggctctcaaagacttcagaccaggcctacattgagtttgagagcatcgaggccattgtgaagacagccagccgcaccaagttcttcatcgagttctactctacctgcctggaggaatacaagaagagctttgagaatgatgcccagagcagtgacaacatcaacttcctcaaagtgcagtggtcttcacgccagctgcccacgcccgggacagggtcttgcaagcagcctcctgggcagtcgtaagggttgcggcgtgatgtcttcaataaattaagttttatttgga

SEQ ID NO: 296902 - DNA, 1229 bp, Homo sapiens
aaaaataggctaaggtcgaggctgccggttaatcggcagagggtaagacagccagccgcaccaagttcttcatcgagttctactctacctgcctggaggaatacaagaagagctttgagaatgatgcccagagcagtgacaacatcaacttcctcaaagtgcagtggtcttcacgccagctgcccacgctcaaaccaattctggctgatatcgagtacctgcaggaccagcacctcctgctcacagtcaagtccatggatggctatgaatcctatggggagtgtgtggttgcactcaaatccatgatcggcagcacggcccaacagttcctgaccttcctatcccaccgtggcgaggagacaggcaatatcagaggctccatgaaggtgcgggtgcccacggagcgcctgggcacccgtgagcggctctacgagtggatcagcattgataaggatgaggcaggagcaaagagcaaagccccctctgtgtcccgagggagccaggagcccaggtcagggagccgcaagccagccttcacagaggcctcctgcccgctctccaggttatttgaagaaccagagaaaccgccaccaacggggaggcccccagccccaccccgagcagctccccgggaggagcccttgacccccaggttgaagccagagggagctcctgaaccagaaggggtggcggccccccacccaagaacagcttcaataaccctgcctactctggtgctgtcctgttttactggaccccgcctcccagccccaggggtgcctgtgggggtccatttgggtacgtctgggcccccactttcaccagtttctgcggccttccaccgggcctgaaccacagcggaggagctccgctaagacctccccacccccgctgggggtgggggcgggtgtccgtccggaaatgaaggaatagcccgaggaccgggctggggtttatttaaactgttctgtgtgggtctggggagggagagcaccttaatattattggggttggttggggtggggcaggatctcagccataaagtgccagtttgcttagttctcactgtctcctggtctgtgctgccctgctctggggatgcacggcggcagggtgggggagggaggttcctcgcaggtctcagcccgggacagggtcttgcaagcagcctcctgggcagtcgtaagggttgcggcgtgatgtcttcaataaattaagttttatttgga

SEQ ID NO: 296903 - DNA, 2705 bp, Homo sapiens
ggcaagtggccgcctggagcccagggccgctgtccggggaagggggcgccggagcagcccggaattcctgaggccggcgctgcaggcagcggcggctgcgcggtgaacgaggcggcctgcgcggcggagtgctgagtcccgatccccggctctgtccggcccacggatcctcaagcccgggccccgggcccggccccagcctcagccctgagcgtctcggggcggatggcgcggggcggcgggggcgggcggtgctgagccctgcgcgggccatggcctcggcctgcggggcgccgggcccggggggcgccctgggcagccaggccccctcctggtaccaccgcgacctgagccgggcggccgcggaggagctgctggcccgggcgggccgcgatggcagcttcctggtccgagacagcgagagcgtggcgggggccttcgcgctctgcgtcctgtatcagaagcatgtgcacacgtatcgcattctgcctgatggagaagatttcttggctgtgcagacctcgcagggtgtgcctgtgcgccgcttccagaccctgggtgagctcatcggcctgtacgcccagcccaaccagggccttgtgtgcgccctgcttcttcctgtagagggtgagcgagagccggacccaccggatgaccgggatgcctcagatggggaggatgagaagcccccgctgcccccgcgctctggctccaccagcatttctgcccccactgggcccagcagtcccctgccagctcctgagactcccacagctccagctgctgagagtgctcccaatgggctgagcaccgtctcgcacgactacctgaaaggcagctatgggctggacctggaagctgtgaggggtggagccagccacctgccccacctcacccgtaccctcgctacctcatgccggaggctgcacagtgaggtggacaaggtcctgtcaggcctggagatcctgtccaaggtgtttgaccagcagagctcgcccatggtgacccgccttttgcagcagcagaacctgccacagacaggggagcaggaactagagagcctggtgctgaagctgtcagtgctaaaggacttcctgtcaggcatccagaagaaggccctgaaggccctacaggacatgagctccacagcacccccagctccgcagccatccacacgtaaggccaagaccatccccgtgcaggcctttgaggtgaagctagatgtgaccctgggtgacctgaccaagattgggaagtcacagaagttcacgctgagcgtggatgtggagggtgggcggctggtgctgctgcggagacagcgggactcccaggaggactggaccaccttcacgcacgaccgcatccgccagctcattaagtcccagcgtgtccagaacaagctgggtgttgtgtttgagaaggagaaggaccggactcagcgcaaggacttcatctttgtcagtgcccggaagcgggaggccttctgccagctgttgcagctcatgaagaacaagcactccaagcaggacgagcccgacatgatctcagtcttcataggcacctggaacatgggaagtgtaccacctccaaaaaacgtgacatcctggttcacatcgaagggtctggggaagaccctggacgaggtcacagtgaccataccccatgacatctatgtctttgggacccaggagaactcagtgggcgaccgcgagtggctggacctactgcgcgggggcctcaaggagcttacggatctggattaccgcccgattgccatgcaatcactgtggaatatcaaggtggcagtgctggtcaagccagagcacgagaaccgtatcagccatgtcagtacgtccagtgtgaagactggcatcgccaacaccctggggaacaagggggctgtgggcgtctccttcatgtttaatggcacctcatttggctttgtgaattgtcacctcacctcgggaaatgagaagacggctcggaggaaccaaaactacttggacatcctgcggctgctctcgctgggcgaccggcagctcaatgcctttgacatctctctgcgtttcacacacctcttctggtttggggacctcaactaccgcctggacatggatatccaggagatcctgaactacatcagcaggaaagagtttgagcccctcctcagggtggaccagctcaacctggagcgggagaagcacaaggtcttccttcgattcagtgaggaggagatctccttcccacccacctaccgctatgagcggggttcccgggacacatatgcctggcacaagcagaagccaactggggtccggaccaatgtgccctcatggtgtgaccggattctgtggaaatcctaccctgaaactcacatcatctgcaattcttatggttgcactgatgacatcgtcaccagcgaccattcccccgtgtttgaaagggctctctcgtctgttggttctctctccacactggggaggtgatagcattgctttcgtgtaaattatgtaatgcaaaatttttttaatcttcgccttaatacttttttattttgttttattttgaatgatgagccttcgtgcccccccttcccccttttttgtcccccgacttgagatgtatgaaggcttttggtctcctgggagtgggtggaggcagccgggcttacctgtacctgacttgagcaccgtgtggagcctgtc

SEQ ID NO: 296904 - DNA, 1033 bp, Homo sapiens
ggcaagtggccgcctggagcccagggccgctgtccggggaagggggcgccggagcagcccggaattcctgaggccggcgctgcaggcagcggcggctgcgcggtgaacgaggcggcctgcgcggcggagtgctgagtcccgatccccggctctgtccggcccacggatcctcaagcccgggccccgggcccggccccagcctcagccctgagcgtctcggggcggatggcgcggggcggcgggggcgggcggtgctgagccctgcgcgggccatggcctcggcctgcggggcgccgggcccggggggcgccctgggcagccaggccccctcctggtaccaccgcgacctgagccgggcggccgcggaggagctgctggcccgggcgggccgcgatggcagcttcctggtccgagacagcgagagcgtggcgggggccttcgcgctctgcgtcctgtatcagaagcatgtgcacacgtatcgcattctgcctgatggagaagatttcttggctgtgcagacctcgcagggtgtgcctgtgcgccgcttccagaccctgggtgagctcatcggcctgtacgcccagcccaaccagggccttgtgtgcgccctgcttcttcctgtagagggtgagcgagagccggacccaccggatgaccgggatgcctcagatggggaggatgagaagcccccgctgcccccgcgctctggctccaccagcatttctgcccccactgggcccagcagtcccctgccagctcctgagactcccacagctccagctgctgagaggtgagacccccatcccatccactgaacaggagaccctttctcctctgagaactatttccctaccaaaggtggggaggccttctaagaccccaccagggacccccaccccacctcagcccagaggcagataacctgatccatcccgccctggttgccacaggtactatctcctctagggatggggcagaggtgctgggacaggtcagcaggacctctcgataacgcctcaggcttacgtacgcc

SEQ ID NO: 296905 - DNA, 620 bp, Homo sapiens
gttctcctccctttctcctcagggctctcaaagacttcagaccaggcctacattgagtttgagagcatcgaggccattgtgaagacagccagccgcaccaagttcttcatcgagttctactctacctgcctggaggaatacaagaagagctttgagaatgatgcccagagcagtgacaacatcaacttcctcaaagtgcagtggtcttcacgccagctgcccacgctcaaaccaattctggctgatatcgagtacctgcaggaccagcacctcctgctcacagtcaagtccatggatggctatgaatcctatgtgttctgtgtgggtctggggagggagagcaccttaatattattggggttggttggggtggggcaggatctcagccataaagtgccagtttgcttagttctcactgtctcctggtctgtgctgccctgctctggggatgcacggcggcagggtgggggagggaggttcctcgcaggtctcagcccgggacagggtcttgcaagcagcctcctgggcagtcgtaagggttgcggcgtgatgtcttcaataaattaagttttatttggaggattgagtaaaacttcaataaattacaagtttttcaaaga

SEQ ID NO: 296906 - DNA, 886 bp, Homo sapiens
ggcaagtggccgcctggagcccagggccgctgtccggggaagggggcgccggagcagcccggaattcctgaggccggcgctgcaggcagcggcggctgcgcggtgaacgaggcggcctgcgcggcggagtgctgagtcccgatccccggctctgtccggcccacggatcctcaagcccgggccccgggcccggccccagcctcagccctgagcgtctcggggcggatggcgcggggcggcgggggcgggcggtgctgagccctgcgcgggccatggcctcggcctgcggggcgccgggcccggggggcgccctgggcagccaggccccctcctggtaccaccgcgacctgagccgggcggccgcggaggagctgctggcccgggcgggccgcgatggcagcttcctggtccgagacagcgagagcgtggcgggggccttcgcgctctgcgtcctgtatcagaagcatgtgcacacgtatcgcattctgcctgatggagaagatttcttggctgtgcagacctcgcagggtgtgcctgtgcgccgcttccagaccctgggtgagctcatcggcctgtacgcccagcccaaccagggccttgtgtgcgccctgcttcttcctgtagagggtgagcgagagccggacccaccggatgaccgggatgcctcaggtacttcccagtgtgcaggtcccctccctgcccctgtcccttggctctacctgcctcttcccatccccccttctcaaccccacctctcctgtaaccccctttcccttggccatgatgccggggccctttaaccctctttccatggaagtcactttacagctgcatcgtgcctcctactccactgagtgtgggaggcccaaacggctgcccactgacc

SEQ ID NO: 296907 - DNA, 346 bp, Homo sapiens
gggcagtggtgaccatgcactctctacccagattgccatgcaatcactgtggaatatcaaggtggcagtgctggtcaagccagagcacgagaaccgtatcagccatgtcagtacgtccagtgtgaagactggcatcgccaacaccctgggtaagtggggctggcaggtgcccaagagtggcagcgtctctctgtccatggcttctgcttcctctcaagcctaggattgccccatttttggtgatcttagtttccccatatatagggtactttgaactttgaaaaacatattcatattctaaatctctcccagcaccactgggaaggcaaggccaggataattaccc

SEQ ID NO: 296908 - DNA, 3543 bp, Homo sapiens
  misc_feature (22)..(22): n is a, c, g, or t
  misc_feature (82)..(83): n is a, c, g, or t
  misc_feature (2826)..(2826): n is a, c, g, or t
  misc_feature (2890)..(2890): n is a, c, g, or t
ctgactggtgctccctctcttncatcttgggctgtctgcatgtgtctcattcccccactctctcctgtgcctcccctctacnntaataatcaggtccaggtttctctgtactgggagaagacctgtggctggagcaggcagggatgcaccctatctgttccccattcctccaggtgggagggagaaggagtaacccactttattggccacagatgcaggggagaaaggagaaagcatgctgggagctggaaagagccctaagatcacctggtttctagagagtggagcctgcttcctgggccctaggcccctcccacaatgcttgtcgccggtcttcttctctgggcttccctactgaccggggcctggccatccttccccacccaggaccacctcccggccacgccccgggtccggctctcattcaaagagctgaaggccacaggcaccgcccacttcttcaacttcctgctcaacacaaccgactaccgaatcttgctcaaggacgaggaccacgaccgcatgtacgtgggcagcaaggactacgtgctgtccctggacctgcacgacatcaaccgcgagcccctcattatacactgggcagcctccccacagcgcatcgaggaatgcgtgctctcaggcaaggatgtcaacggcgagtgtgggaacttcgtcaggctcatccagccctggaaccgaacacacctgtatgtgtgcgggacaggtgcctacaaccccatgtgcacctatgtgaaccgcggacgccgcgcccaggattacatcttctacctggagcctgagcgactcgagtcagggaagggcaagtgtccgtacgatcccaagctggacacagcatcggccctcatcaatgaggagctctatgctggtgtgtacatcgattttatgggcactgatgcagccatcttccgcacacttggaaagcagacagccatgcgcacggatcagtacaactcccggtggctgaacgacccgtcgttcatccatgctgagctcattcctgacagtgcggagcgcaatgatgataagctttacttcttcttccgtgagcggtcggcagaggcgccgcagagccccgcggtgtacgcccgcatcgggcgcatttgcctgaacgatgacggtggtcactgttgcctggtcaacaagtggagcacattcctgaaggcgcggctcgtctgctctgtcccgggcgaggatggcattgagactcactttgatgagctccaggacgtgtttgtccagcagacccaggacgtgaggaaccctgtcatttacgctgtctttacctcctctggctccgtgttccgaggctctgccgtgtgtgtctactccatggctgatattcgcatggtcttcaacgggccctttgcccacaaagaggggcccaactaccagtggatgcccttctcagggaagatgccctacccacggccgggcacgtgccctggtggaaccttcacgccatctatgaagtccaccaaggattatcctgatgaggtgatcaacttcatgcgcagccacccactcatgtaccaggccgtgtaccctctgcagcggcggcccctggtagtccgcacaggtgctccctaccgccttaccactattgccgtggaccaggtggatgcagccgacgggcgctatgaggtgcttttcctgggcacagaccgcgggacagtgcagaaggtcattgtgctgcccaaggatgaccaggagatggaggagctcatgctggaggaggtggaggtcttcaaggatccagcacccgtcaagaccatgaccatctcttctaagaggcaacaactctacgtggcgtcagccgtgggtgtcacacacctgagcctgcaccgctgccaggcgtatggggctgcctgtgctgactgctgccttgcccgggacccttactgtgcctgggatggccaggcctgctcccgctatacagcatcctccaagaggcggagccgccggcaggacgtccggcacggaaaccccatcaggcagtgccgtgggttcaactccaatgccaacaagaatgccgtggagtctgtgcagtatggcgtggccggcagcgcagccttccttgagtgccagccccgctcgccccaagccactgttaagtggctgttccagcgagatcctggtgaccggcgccgagagattcgtgcagaggaccgcttcctgcgcacagagcagggcttgttgctccgtgcactgcagctcagcgatcgtggcctctactcctgcacagccactgagaacaactttaagcacgtcgtcacacgagtgcagctgcatgtactgggccgggacgccgtccatgctgccctcttcccaccactgtccatgagcgccccgccacccccaggcgcaggccccccaacgcctccttaccaggagttagcccagctgctggcccagccagaagtgggcctcatccaccagtactgccagggttactggcgccatgtgccccccagccccagggaggctccaggggcaccccggtctcctgagccccaggaccagaaaaagccccggaaccgccggcaccaccctccggacacatgaggccagctgcctgtgcctgccatgggccagcctagcccttgtcccttttaatataaaagatatatatatatatatatatatatataaaatatctatattctatacacaccctgcccctgcaaagacagtatttattggtgggttgaatatagcctgcctcagtggcagcatcctccaaaacttagacccatgctggtcagagacggcagaaaacagagcctgcctaaccaggccagccagttngtggggccaggccaggaccacacagtccccagactcagctggagtctacctgctggacagcctncgccaagatctacaggacaaagggagggagcaagccctactcggatggggcacggactgtccaccttttctgatgtgtgttgtcagcctgtgctgtggcatagacatggatgcgaggaccactttggagactggggtggcctcaagagcacacagagaagggaagaaggggccatcacaggatgccagcccctgcctgggttgggggcactcagccacgaccagccccttcctgggtatttattctctatttattggggataggagaagaggcatcctgcctgggtgggacagccccttcagccccttctcccctccccgcctggccagggcagggccaccccactctacctccttagctttccctgtgccactttgactcagaggctgggagcatagcagaggggccaggcccaggcagagctgacgggaggccccagctctgaggggagggggtccgtggtagaggcctggggccggtagaggctccccagggctcccttatgtccaccacttcaggggatgggtgtggatgtaattagctctggggggcagttgggtagatgggtgggggctcctggtggccttctgctgcccaggccacagccgcctttgggttccatcttgctaataaacactggctctgggactaga

SEQ ID NO: 296909 - DNA, 2844 bp, Homo sapiens
gcggccgcggcgccgatcccggctgaggcgcagcggcgagaggtcgcgggcagggccatggccccggggggccgctagcgcggaccggcccaacgggagccgctccgtgccgccgccgccgcccgggcgcccaggccccgccgctgcggaagaggtttctagagagtggagcctgcttcctgggccctaggcccctcccacaatgcttgtcgccggtcttcttctctgggcttccctactgaccggggcctggccatccttccccacccaggaccacctcccggccacgccccgggtccggctctcattcaaagagctgaaggccacaggcaccgcccacttcttcaacttcctgctcaacacaaccgactaccgaatcttgctcaaggacgaggaccacgaccgcatgtacgtgggcagcaaggactacgtgctgtccctggacctgcacgacatcaaccgcgagcccctcattatacactgggcagcctccccacagcgcatcgaggaatgcgtgctctcaggcaaggatgtcaacggcgagtgtgggaacttcgtcaggctcatccagccctggaaccgaacacacctgtatgtgtgcgggacaggtgcctacaaccccatgtgcacctatgtgaaccgcggacgccgcgcccaggccacaccatggacccagactcaggcggtcagaggccgcggcagcagagccacggatggtgccctccgcccgatgcccacagccccacgccaggattacatcttctacctggagcctgagcgactcgagtcagggaagggcaagtgtccgtacgatcccaagctggacacagcatcggccctcatcaatgaggagctctatgctggtgtgtacatcgattttatgggcactgatgcagccatcttccgcacacttggaaagcagacagccatgcgcacggatcagtacaactcccggtggctgaacgacccgtcgttcatccatgctgagctcattcctgacagtgcggagcgcaatgatgataagctttacttcttcttccgtgagcggtcggcagaggcgccgcagagccccgcggtgtacgcccgcatcgggcgcatttgcctgaacgatgacggtggtcactgttgcctggtcaacaagtggagcacattcctgaaggcgcggctcgtctgctctgtcccgggcgaggatggcattgagactcactttgatgagctccaggacgtgtttgtccagcagacccaggacgtgaggaaccctgtcatttacgctgtctttacctcctctggctccgtgttccgaggctctgccgtgtgtgtctactccatggctgatattcgcatggtcttcaacgggccctttgcccacaaagaggggcccaactaccagtggatgcccttctcagggaagatgccctacccacggccgggcacgtgccctggtggaaccttcacgccatctatgaagtccaccaaggattatcctgatgaggtgatcaacttcatgcgcagccacccactcatgtaccaggccgtgtaccctctgcagcggcggcccctggtagtccgcacaggtgctccctaccgccttaccactattgccgtggaccaggtggatgcagccgacgggcgctatgaggtgcttttcctgggcacagaccgcgggacagtgcagaaggtcattgtgctgcccaaggatgaccaggagatggaggagctcatgctggaggaggtggaggtcttcaaggatccagcacccgtcaagaccatgaccatctcttctaagaggcaacaactctacgtggcgtcagccgtgggtgtcacacacctgagcctgcaccgctgccaggcgtatggggctgcctgtgctgactgctgccttgcccgggacccttactgtgcctgggatggccaggcctgctcccgctatacagcatcctccaagaggcggagccgccggcaggacgtccggcacggaaaccccatcaggcagtgccgtgggttcaactccaatgccaacaagaatgccgtggagtctgtgcagtatggcgtggccggcagcgcagccttccttgagtgccagccccgctcgccccaagccactgttaagtggctgttccagcgagatcctggtgaccggcgccgagagattcgtgcagaggaccgcttcctgcgcacagagcagggcttgttgctccgtgcactgcagctcagcgatcgtggcctctactcctgcacagccactgagaacaactttaagcacgtcgtcacacgagtgcagctgcatgtactgggccgggacgccgtccatgctgccctcttcccaccactgtccatgagcgccccgccacccccaggcgcaggccccccaacgcctccttaccaggagttagcccagctgctggcccagccagaagtgggcctcatccaccagtactgccagggttactggcgccatgtgccccccagccccagggaggctccaggggcaccccggtctcctgagccccaggaccagaaaaagccccggaaccgccggcaccaccctccggacacatgaggccagctgcctgtgcctgccatgggccagcctagcccttgtcccttttaatataaaagatatatatatatatatatatatatatattaaaatatcggggtggggggtgattggaagggagggaggtggccttcccaatgcgcgttattcggggttattgaagaataatattgcaagtgacagccagaagtagactttctgtcctcacaccgaagaacccgagtgagcaggagggagggagagacgcgaagagaccttttttcctttttggagaccttgtccgc

SEQ ID NO: 296910 - DNA, 1826 bp, Homo sapiens
  misc_feature (1109)..(1109): n is a, c, g, or t
  misc_feature (1173)..(1173): n is a, c, g, or t
tctagaggatccctcggtgtctaatgatcggggtctcatggatcggggtcctcaggatcagcacccgtcaagacatgaccatctcttctaagaggcaacaactctacgtggcgtcagccgtgggtgtcacacacctgagcctgcaccgctgccaggcgtatggggctgcctgtgctgactgctgccttgcccgggacccttactgtgcctgggatggccaggcctgctcccgctatacagcatcctccaagaggcggagccgccggcaggacgtccggcacggaaaccccatcaggcagtgccgtgggttcaactccaatgccaacaagaatgccgtggagtctgtgcagtatggcgtggccggcagcgcagccttccttgagtgccagccccgctcgccccaagccactgttaagtggctgttccagcgagatcctggtgaccggcgccgagagattcgtgcagaggaccgcttcctgcgcacagagcagggcttgttgctccgtgcactgcagctcagcgatcgtggcctctactcctgcacagccactgagaacaactttaagcacgtcgtcacacgagtgcagctgcatgtactgggccgggacgccgtccatgctgccctcttcccaccactgtccatgagcgccccgccacccccaggcgcaggccccccaacgcctccttaccaggagttagcccagctgctggcccagccagaagtgggcctcatccaccagtactgccagggttactggcgccatgtgccccccagccccagggaggctccaggggcaccccggtctcctgagccccaggaccagaaaaagccccggaaccgccggcaccaccctccggacacatgaggccagctgcctgtgcctgccatgggccagcctagcccttgtcccttttaatataaaagatatatatatatatatatatatatataaaatatctatattctatacacaccctgcccctgcaaagacagtatttattggtgggttgaatatagcctgcctcagtggcagcatcctccaaaacttagacccatgctggtcagagacggcagaaaacagagcctgcctaaccaggccagccagttngtggggccaggccaggaccacacagtccccagactcagctggagtctacctgctggacagcctncgccaagatctacaggacaaagggagggagcaagccctactcggatggggcacggactgtccaccttttctgatgtgtgttgtcagcctgtgctgtggcatagacatggatgcgaggaccactttggagactggggtggcctcaagagcacacagagaagggaagaaggggccatcacaggatgccagcccctgcctgggttgggggcactcagccacgaccagccccttcctgggtatttattctctatttattggggataggagaagaggcatcctgcctgggtgggacagccccttcagccccttctcccctccccgcctggccagggcagggccaccccactctacctccttagctttccctgtgccactttgactcagaggctgggagcatagcagaggggccaggcccaggcagagctgacgggaggccccagctctgaggggagggggtccgtggtagaggcctggggccggtagaggctccccagggctcccttatgtccaccacttcaggggatgggtgtggatgtaattagctctggggggcagttgggtagatgggtgggggctcctggtggccttctgctgcccaggccacagccgcctttgggttccatcttgctaataaacactggctctgggactaga

SEQ ID NO: 296911 - DNA, 541 bp, Homo sapiens
gcggccgcggcgccgatcccggctgaggcgcagcggcgagaggtcgcgggcagggccatggccccggggggccgctagcgcggaccggcccaacgggagccgctccgtgccgccgccgccgcccgggcgcccaggccccgccgctgcggaagaggtttctagagagtggagcctgcttcctgggcctcagccccttctcccctccccgcctggccagggcagggccaccccactctacctccttagctttccctgtgccactttgactcagaggctgggagcatagcagaggggccaggcccaggcagagctgacgggaggccccagctctgaggggagggggtccgtggtagaggcctggggccggtagaggctccccagggctcccttatgtccaccacttcaggggatgggtgtggatgtaattagctctggggggcagttgggtagatgggtgggggctcctggtggccttctgctgcccaggccacagccgcctttgggttccatcttgctaataaacactggctctgggactaga

SEQ ID NO: 296912 - DNA, 771 bp, Homo sapiens
gcggccgcggcgccgatcccggctgaggcgcagcggcgagaggtcgcgggcagggccatggccccggggggccgctagcgcggaccggcccaacgggagccgctccgtgccgccgccgccgcccgggcgcccaggccccgccgctgcggaagaggtgagtgcagcgggaaccgggagggagcgggcaggcggccgggccaccccgcgacccctctgggacccgcggcactgcaactccgcagaagtgtccggggagcgggtctcgtcgagccggggggctgcccgcggacataggggcaacaaggctggggtgggattcttacctgtcctggaggcccggaccccttacctacggggcggcgtatggatgtgtggatgatgtggcctgcggggtcacccatgtgcaaagcaactttttcctgcaaggttctgggtttctagagagtggagcctgcttcctgggccctaggcccctcccacaatgcttgtcgccggtcttcttctctgggcttccctactgaccggggcctggccatccttccccacccaggaccacctcccggccacgccccgggtccggctctcattcaaagagctgaaggccacaggcaccgcccacttcttcaacttcctgctcaacacaaccgactaccgaatcttgctcaaggacgaggaccacgaccgcatgtacgtgggcagcaaggactacgtgctgtccctggacctgcacgacatcaaccgcgagcccctcattgtaagggctggccctga

SEQ ID NO: 296913 - DNA, 1347 bp, Homo sapiens
  misc_feature (630)..(630): n is a, c, g, or t
  misc_feature (694)..(694): n is a, c, g, or t
gcggccgcggcgccgatcccggctgaggcgcagcggcgagaggtcgcgggcagggccatggccccggggggccgctagcgcggaccggcccaacgggagccgctccgtgccgccgccgccgcccgggcgcccaggccccgccgctgcggaagaggtttctagagagtggagcctgcttcctgggccctaggcccctcccacaatgcttgtcgccggtcttcttctctgggcttccctactgaccggggcctggccatccttccccacccaggaccacctcccggccacgccccgggtccggctctcattcaaagagctgaaggccacaggcaccgcccacttcttcaacttcctgctcaacacaaccgactaccgaatcttgctcaaggccagctgcctgtgcctgccatgggccagcctagcccttgtcccttttaatataaaagatatatatatatatatatatatatataaaatatctatattctatacacaccctgcccctgcaaagacagtatttattggtgggttgaatatagcctgcctcagtggcagcatcctccaaaacttagacccatgctggtcagagacggcagaaaacagagcctgcctaaccaggccagccagttngtggggccaggccaggaccacacagtccccagactcagctggagtctacctgctggacagcctncgccaagatctacaggacaaagggagggagcaagccctactcggatggggcacggactgtccaccttttctgatgtgtgttgtcagcctgtgctgtggcatagacatggatgcgaggaccactttggagactggggtggcctcaagagcacacagagaagggaagaaggggccatcacaggatgccagcccctgcctgggttgggggcactcagccacgaccagccccttcctgggtatttattctctatttattggggataggagaagaggcatcctgcctgggtgggacagccccttcagccccttctcccctccccgcctggccagggcagggccaccccactctacctccttagctttccctgtgccactttgactcagaggctgggagcatagcagaggggccaggcccaggcagagctgacgggaggccccagctctgaggggagggggtccgtggtagaggcctggggccggtagaggctccccagggctcccttatgtccaccacttcaggggatgggtgtggatgtaattagctctggggggcagttgggtagatgggtgggggctcctggtggccttctgctgcccaggccacagccgcctttgggttccatcttgctaataaacactggctctgggactaga

SEQ ID NO: 296914 - DNA, 296 bp, Homo sapiens
ggcatgtgtgagaatgactggatctgaggggcacctgtgtgtgcaggtgtgtgccaagcctgtgtgtatgtatgtacacacgcatagacgtgctctggggggcccacgtgttcacgtgtgttcctggcctgtgtggtgttagaggctggcagcccgagcccgctcccccagcccctgccacccccagctctaaccccttttcctcgtcttctcaggccacaccatggacccagactcaggcggtcagaggccgcggcagcagagccacggatggtgccctccgcccgatgcccaca

SEQ ID NO: 296915 - DNA, 2996 bp, Homo sapiens
ctgccgcccgccaccgccagtgccactgatgctgaagggaccgccccgcggccgccgcctctggccgccgccatcgccgcttcagacttcagaaccagcgtcgtcctcaaccacctggccgagaagtggtttccgggccagcgcgagcgggcccgggcggccggcaggctcggggagctactgcaccaggggcgctaccgggaggccctggccgccgcctgcgaggcgctgcgagcagaacccagtgacttgattgtaaaaatttacagagcggaatcatatgctggtctccaagagtttaaagcagccatagaagatttaaatgcagttctttttcaacttccagattggcctgaggtctacttcaggaaaggaaaagtactctgcgatgctggttttttaggtgatgccttacaactctttcttcagtgcttagcccttgatgaagattttgcacctgcaaagctgcaagtacaaaagattttatgtgatttattattacctgaaaacttaaaagaaggcctgaaggaatcttcctggagttcattaccatgtactaaaaacagaccttttgattttcattcagtgatggaagagtctcagtctctcaatgaacctagcccaaagcagagtgaagaaataccagaggtcacttcagagcctgtcaaaggaagcttaaaccgtgctcagtcagcacagtctataaattcaacagaaatgcctgccagagaggactgtttaaaaagagtgtcctcagaacctgttctgtcagttcaagaaaaaggtgttctgctgaaaagaaagttgtctcttttagaacaggatgtgattgtaaatgaagatggaagaaataagctgaaaaaacaaggagcttatggtgatattccagaagaattaatcgatgtctcagatttcgagtgttctctctgcatgaggttgttttttgagccagtaacaaccccttgcggacattcgttctgtaagaattgtcttgagcgttgtttagatcatgcaccatattgtcctctttgcaaagaaagcttaaaagagtatctagcagataggaggtactgtgtcacacagctgttggaagaattaatagtgaagtatctgcctgatgaactgtctgagagaaaaaaaatatatgatgaagaaactgctgaactctcacacttgaccaagaatgttccaatatttgtttgcactatggcctaccccactgtgccttgccctctccatgtatttgagccaagatacagattgatgattcgaagaagtatacagactggaaccaaacagtttggcatgtgtgtcagtgatacacaaaatagttttgcagattatggttgtatgttacaaattagaaacgtgcatttcttaccggacggaaggtctgtggttgatacagttggaggaaagcggtttagggttttaaaaagaggaatgaaagatggatattgcactgccgacattgaatatctggaagatgttaaggttgagaatgaagatgagattaagaatctcagagagcttcatgatttggtttactctcaagcctgcagctggtttcagaatttaagagacagatttcgaagccaaattcttcagcatttcggatcaatgcccgagagggaggaaaaccttcaggcagcccctaatggacctgcatggtgttggtggcttcttgcagttctccctgtagacccacgataccagctgtcggttttgtcaatgaagtctttgaaagaacggttgaccaagatacagcatatactgacctatttttctagagaccaatctaagtaactaactctttggatctccctttaaagtgaccctaatctggctgcattgatggccagattgtctgctgcctttgcacatctagtgctggtttcagaaatttaatgaaacttttctttttccttcgacctcctgaatcatgtggttctgcaaatgaataccttcaactaggatttagaccactaagaacttgcacagaaaaacacgcattgaatgtgtgtcgaacctctacattgtgaagttgcactatgtaccatactctaaaatgaaataagaactctttatgtctgtgagagagtgtgtgtgtgtgtgtgcgtgcgtgtgtgcttgtgggggttgggtagtgtgtgtgtattttctctggctttaaaattttaaaacaaacaaacaaaaaagccatagagagcagaacttgccgagggtcatttattgcccaagtttacaagagtagcgatacaagtttttgcaaattgaatttgcctcagatatatctgtcctaatgcttatatttgcacaagtatgtaaaatatcgtgttgaggatcattctttgttggaaatactgctcttgctgaactgtcttgaccattgactatgacacagtttcttatttatgtaaatacttgcatcacagtggccgacaggcattggatgcagaacctagagccagttttcaggaacaattgtaaacctgacatggtactgtgcatctattcataaaacactcaaaactgtgaaaatatggtttacatttaattgtacataaaggtaaagggagaactcaattcagtaccagttagtttgtacattttagggggcttttcacattaactgcccatttgtgtaatttatagtttgacatgatgtgtttgttttaaaaaaaaatgcatagtataaacccattaaggatctgggaaaagagaagaagtttaatatagaactaagcttttaaagtttgtttttgtttttaattctggtctcggtgcaaatgttagttatgccttattcatatcacagttagatcaccatgctgcaacatggtttatattcatgctgccctagaaacttttgtaattatttgttgcaaatttgtgactgtccttattaactttcttttatgtaagtaatttgtaaaagtttcttaaaatttttgcttttgcttatttaattttgaataaaagctaaattcctaata

SEQ ID NO: 296916 - DNA, 3029 bp, Homo sapiens
ctgccgcccgccaccgccagtgccactgatgctgaagggaccgccccgcggccgccgcctctggccgccgccatcgccgcttcagacttcagaaccagcgtcgtcctcaaccacctggccgagaagtggtttccgggccagcgcgagcgggcccgggcggccggcaggctcggggagctactgcaccaggggcgctaccgggaggccctggccgccgcctgcgaggcgctgcgagcagaacccagtgacttgattgtaaaaatttacagagcggaatcatatgctggtctccaagagtttaaagcagccatagaagatttaaatgcagttctttttcaacttccagattggcctgaggtctacttcaggaaaggaaaagtactctgcgatgctggttttttaggtgatgccttacaactctttcttcagtgcttagcccttgatgaagattttgcacctgcaaagctgcaagtacaaaagattttatgtgatttattattacctgaaaacttaaaagaaggcctgaaggaatcttcctggagttcattaccatgtactaaaaacagaccttttgattttcattcagtgatggaagagtctcagtctctcaatgaacctagcccaaagcagagtgaagaaataccagaggtcacttcagagcctgtcaaaggaagcttaaaccgtgctcagtcagcacagtctataaattcaacagaaatgcctgccagagaggactgtttaaaaagagtgtcctcagaacctgttctgtcagttcaagaaaaaggtgttctgctgaaaagaaagttgtctcttttagaacaggatgtgattgtaaatgaagatggaagaaataagctgaaaaaacaaggagaaactcccaatgaagtctgtatgttttccttagcttatggtgatattccagaagaattaatcgatgtctcagatttcgagtgttctctctgcatgaggttgttttttgagccagtaacaaccccttgcggacattcgttctgtaagaattgtcttgagcgttgtttagatcatgcaccatattgtcctctttgcaaagaaagcttaaaagagtatctagcagataggaggtactgtgtcacacagctgttggaagaattaatagtgaagtatctgcctgatgaactgtctgagagaaaaaaaatatatgatgaagaaactgctgaactctcacacttgaccaagaatgttccaatatttgtttgcactatggcctaccccactgtgccttgccctctccatgtatttgagccaagatacagattgatgattcgaagaagtatacagactggaaccaaacagtttggcatgtgtgtcagtgatacacaaaatagttttgcagattatggttgtatgttacaaattagaaacgtgcatttcttaccggacggaaggtctgtggttgatacagttggaggaaagcggtttagggttttaaaaagaggaatgaaagatggatattgcactgccgacattgaatatctggaagatgttaaggttgagaatgaagatgagattaagaatctcagagagcttcatgatttggtttactctcaagcctgcagctggtttcagaatttaagagacagatttcgaagccaaattcttcagcatttcggatcaatgcccgagagggaggaaaaccttcaggcagcccctaatggacctgcatggtgttggtggcttcttgcagttctccctgtagacccacgataccagctgtcggttttgtcaatgaagtctttgaaagaacggttgaccaagatacagcatatactgacctatttttctagagaccaatctaagtaactaactctttggatctccctttaaagtgaccctaatctggctgcattgatggccagattgtctgctgcctttgcacatctagtgctggtttcagaaatttaatgaaacttttctttttccttcgacctcctgaatcatgtggttctgcaaatgaataccttcaactaggatttagaccactaagaacttgcacagaaaaacacgcattgaatgtgtgtcgaacctctacattgtgaagttgcactatgtaccatactctaaaatgaaataagaactctttatgtctgtgagagagtgtgtgtgtgtgtgtgcgtgcgtgtgtgcttgtgggggttgggtagtgtgtgtgtattttctctggctttaaaattttaaaacaaacaaacaaaaaagccatagagagcagaacttgccgagggtcatttattgcccaagtttacaagagtagcgatacaagtttttgcaaattgaatttgcctcagatatatctgtcctaatgcttatatttgcacaagtatgtaaaatatcgtgttgaggatcattctttgttggaaatactgctcttgctgaactgtcttgaccattgactatgacacagtttcttatttatgtaaatacttgcatcacagtggccgacaggcattggatgcagaacctagagccagttttcaggaacaattgtaaacctgacatggtactgtgcatctattcataaaacactcaaaactgtgaaaatatggtttacatttaattgtacataaaggtaaagggagaactcaattcagtaccagttagtttgtacattttagggggcttttcacattaactgcccatttgtgtaatttatagtttgacatgatgtgtttgttttaaaaaaaaatgcatagtataaacccattaaggatctgggaaaagagaagaagtttaatatagaactaagcttttaaagtttgtttttgtttttaattctggtctcggtgcaaatgttagttatgccttattcatatcacagttagatcaccatgctgcaacatggtttatattcatgctgccctagaaacttttgtaattatttgttgcaaatttgtgactgtccttattaactttcttttatgtaagtaatttgtaaaagtttcttaaaatttttgcttttgcttatttaattttgaataaaagctaaattcctaata

SEQ ID NO: 296917 - DNA, 2859 bp, Homo sapiens
cgggccagcgcgagcgcggagcaccggcacgtcgggggagctactgcaccaggggcgctaccgggaggccctggccgccgcctgcgaggcgctgcgagcagaacccagtgacttgattgtaaaaatttacagagcggaatcatatgctggtctccaagagtttaaagcagccatagaagatttaaatgcagttctttttcaacttccagattggcctgaggtctacttcaggaaaggaaaagtactctgcgatgctggttttttaggtgatgccttacaactctttcttcagtgcttagcccttgatgaagattttgcacctgcaaagctgcaagtacaaaagattttatgtgatttattattacctgaaaacttaaaagaaggcctgaaggaatcttcctggagttcattaccatgtactaaaaacagaccttttgattttcattcagtgatggaagagtctcagtctctcaatgaacctagcccaaagcagagtgaagaaataccagaggtcacttcagagcctgtcaaaggaagcttaaaccgtgctcagtcagcacagtctataaattcaacagaaatgcctgccagagaggactgtttaaaaagagtgtcctcagaacctgttctgtcagttcaagaaaaaggtgttctgctgaaaagaaagttgtctcttttagaacaggatgtgattgtaaatgaagatggaagaaataagctgaaaaaacaaggagcttatggtgatattccagaagaattaatcgatgtctcagatttcgagtgttctctctgcatgaggttgttttttgagccagtaacaaccccttgcggacattcgttctgtaagaattgtcttgagcgttgtttagatcatgcaccatattgtcctctttgcaaagaaagcttaaaagagtatctagcagataggaggtactgtgtcacacagctgttggaagaattaatagtgaagtatctgcctgatgaactgtctgagagaaaaaaaatatatgatgaagaaactgctgaactctcacacttgaccaagaatgttccaatatttgtttgcactatggcctaccccactgtgccttgccctctccatgtatttgagccaagatacagattgatgattcgaagaagtatacagactggaaccaaacagtttggcatgtgtgtcagtgatacacaaaatagttttgcagattatggttgtatgttacaaattagaaacgtgcatttcttaccggacggaaggtctgtggttgatacagttggaggaaagcggtttagggttttaaaaagaggaatgaaagatggatattgcactgccgacattgaatatctggaagatgttaaggttgagaatgaagatgagattaagaatctcagagagcttcatgatttggtttactctcaagcctgcagctggtttcagaatttaagagacagatttcgaagccaaattcttcagcatttcggatcaatgcccgagagggaggaaaaccttcaggcagcccctaatggacctgcatggtgttggtggcttcttgcagttctccctgtagacccacgataccagctgtcggttttgtcaatgaagtctttgaaagaacggttgaccaagatacagcatatactgacctatttttctagagaccaatctaagtaactaactctttggatctccctttaaagtgaccctaatctggctgcattgatggccagattgtctgctgcctttgcacatctagtgctggtttcagaaatttaatgaaacttttctttttccttcgacctcctgaatcatgtggttctgcaaatgaataccttcaactaggatttagaccactaagaacttgcacagaaaaacacgcattgaatgtgtgtcgaacctctacattgtgaagttgcactatgtaccatactctaaaatgaaataagaactctttatgtctgtgagagagtgtgtgtgtgtgtgtgcgtgcgtgtgtgcttgtgggggttgggtagtgtgtgtgtattttctctggctttaaaattttaaaacaaacaaacaaaaaagccatagagagcagaacttgccgagggtcatttattgcccaagtttacaagagtagcgatacaagtttttgcaaattgaatttgcctcagatatatctgtcctaatgcttatatttgcacaagtatgtaaaatatcgtgttgaggatcattctttgttggaaatactgctcttgctgaactgtcttgaccattgactatgacacagtttcttatttatgtaaatacttgcatcacagtggccgacaggcattggatgcagaacctagagccagttttcaggaacaattgtaaacctgacatggtactgtgcatctattcataaaacactcaaaactgtgaaaatatggtttacatttaattgtacataaaggtaaagggagaactcaattcagtaccagttagtttgtacattttagggggcttttcacattaactgcccatttgtgtaatttatagtttgacatgatgtgtttgttttaaaaaaaaatgcatagtataaacccattaaggatctgggaaaagagaagaagtttaatatagaactaagcttttaaagtttgtttttgtttttaattctggtctcggtgcaaatgttagttatgccttattcatatcacagttagatcaccatgctgcaacatggtttatattcatgctgccctagaaacttttgtaattatttgttgcaaatttgtgactgtccttattaactttcttttatgtaagtaatttgtaaaagtttcttaaaatttttgcttttgcttatttaattttgaataaaagctaaattcctaata

SEQ ID NO: 296918 - DNA, 1879 bp, Homo sapiens
gttcggtaatatttttcttgtatgaattctaataattaaactgtttttcccttagcttgaccaagaatgttccaatatttgtttgcactatggcctaccccactgtgccttgccctctccatgtatttgagccaagatacagattgatgattcgaagaagtatacagactggaaccaaacagtttggcatgtgtgtcagtgatacacaaaatagttttgcagattatggttgtatgttacaaattagaaacgtgcatttcttaccggacggaaggtctgtggttgatacagttggaggaaagcggtttagggttttaaaaagaggaatgaaagatggatattgcactgccgacattgaatatctggaagatgttaaggttgagaatgaagatgagattaagaatctcagagagcttcatgatttggtttactctcaagcctgcagctggtttcagaatttaagagacagatttcgaagccaaattcttcagcatttcggatcaatgcccgagagggaggaaaaccttcaggcagcccctaatggacctgcatggtgttggtggcttcttgcagttctccctgtagacccacgataccagctgtcggttttgtcaatgaagtctttgaaagaacggttgaccaagatacagcatatactgacctatttttctagagaccaatctaagtaactaactctttggatctccctttaaagtgaccctaatctggctgcattgatggccagattgtctgctgcctttgcacatctagtgctggtttcagaaatttaatgaaacttttctttttccttcgacctcctgaatcatgtggttctgcaaatgaataccttcaactaggatttagaccactaagaacttgcacagaaaaacacgcattgaatgtgtgtcgaacctctacattgtgaagttgcactatgtaccatactctaaaatgaaataagaactctttatgtctgtgagagagtgtgtgtgtgtgtgtgcgtgcgtgtgtgcttgtgggggttgggtagtgtgtgtgtattttctctggctttaaaattttaaaacaaacaaacaaaaaagccatagagagcagaacttgccgagggtcatttattgcccaagtttacaagagtagcgatacaagtttttgcaaattgaatttgcctcagatatatctgtcctaatgcttatatttgcacaagtatgtaaaatatcgtgttgaggatcattctttgttggaaatactgctcttgctgaactgtcttgaccattgactatgacacagtttcttatttatgtaaatacttgcatcacagtggccgacaggcattggatgcagaacctagagccagttttcaggaacaattgtaaacctgacatggtactgtgcatctattcataaaacactcaaaactgtgaaaatatggtttacatttaattgtacataaaggtaaagggagaactcaattcagtaccagttagtttgtacattttagggggcttttcacattaactgcccatttgtgtaatttatagtttgacatgatgtgtttgttttaaaaaaaaatgcatagtataaacccattaaggatctgggaaaagagaagaagtttaatatagaactaagcttttaaagtttgtttttgtttttaattctggtctcggtgcaaatgttagttatgccttattcatatcacagttagatcaccatgctgcaacatggtttatattcatgctgccctagaaacttttgtaattatttgttgcaaatttgtgactgtccttattaactttcttttatgtaagtaatttgtaaaagtttcttaaaatttttgcttttgcttatttaattttgaataaaagctaaattcctaata

SEQ ID NO: 296919 - DNA, 3383 bp, Homo sapiens
ctgccgcccgccaccgccagtgccactgatgctgaagggaccgccccgcggccgccgcctctggccgccgccatcgccgcttcagacttcagaaccagcgtcgtcctcaaccacctggccgagaagtggtttccgggccagcgcgagcgggcccgggcggccggcaggctcggggagctactgcaccaggggcgctaccgggaggccctggccgccgcctgcgaggcgctgcgagcagaacccagtgacttgattgtaaaaatttacagagcggaatcatatgctggtctccaagagtttaaagcagccatagaagatttaaatgcagttctttttcaacttccagattggcctgaggtctacttcaggaaaggaaaagtactctgcgatgctggttttttaggtgatgccttacaactctttcttcagtgcttagcccttgatgaagattttgcacctgcaaagctgcaagtacaaaagattttatgtgatttattattacctgaaaacttaaaagaaggcctgaaggaatcttcctggagttcattaccatgtactaaaaacagaccttttgattttcattcagtgatggaagagtctcagtctctcaatgaacctagcccaaagcagagtgaagaaataccagaggtcacttcagagcctgtcaaaggaagcttaaaccgtgctcagtcagcacagtctataaattcaacagaaatgcctgccagagaggactgtttaaaaagagtgtcctcagaacctgttctgtcagttcaagaaaaaggtgttctgctgaaaagaaagttgtctcttttagaacaggatgtgattgtaaatgaagatggaagaaataagctgaaaaaacaaggagcttatggtgatattccagaagaattaatcgatgtctcagatttcgagtgttctctctgcatgaggttgttttttgagccagtaacaaccccttgcggacattcgttctgtaagaattgtcttgagcgttgtttagatcatgcaccatattgtcctctttgcaaagaaagcttaaaagagtatctagcagataggaggtactgtgtcacacagctgttggaagaattaatagtgaagtatctgcctgatgaactgtctgagagaaaaaaaatatatgatgaagaaactgctgaactctcacacttgaccaagaatgttccaatatttgtttgcactatggcctaccccactgtgccttgccctctccatgtatttgagccaagatacagattgatgattcgaagaagtatacagactggaaccaaacagtttggcatgtgtgtcagtgatacacaaaatagttttgcagattatggttgtatgttacaaattagaaacgtgcatttcttaccggacggaaggtctgtggttgatacagttggaggaaagcggtttagggttttaaaaagaggaatgaaagatggatattgcactgccgacattgaatatctggaagatgttaaggttgagaatgaagatgagattaagaatctcagagagcttcatgatttggtttactctcaagcctgcagctggtttcagaatttaagagacagatttcgaagccaaattcttcagcatttcggatcaatgcccgagagggaggaaaaccttcaggcagcccctaatggacctgcatggtgttggtggcttcttgcagttctccctgtagacccacgataccagctgtcggttttgtcaatgaagtctttgaaagaacggttgaccaagatacagcatatactgacctatttttctagagaccaatctaagtaactaactctttggatctccctttaaagtgaccctaatctggctgcattgatggccagattgtctgctgcctttgcacatctagtgctggtttcagaaatttaatgaaacttttctttttccttcgacctcctgaatcatgtggttctgcaaatgaataccttcaactaggatttagaccactaagaacttgcacagaaaaacacgcattgaatgtgtgtcgaacctctacattgtgaagttgcactatgtaccatactctaaaatgaaataagaactctttatgtctgtgagagagtgtgtgtgtgtgtgtgcgtgcgtgtgtgcttgtgggggttgggtagtgtgtgtgtattttctctggctttaaaattttaaaacaaacaaacaaaaaagccatagagagcagaacttgccgagggtcatttattgcccaagtttacaagagtagcgatacaagtttttgcaaattgaatttgcctcagatatatctgtcctaatgcttatatttgcacaagtatgtaaaatatcgtgttgaggatcattctttgttggaaatactgctcttgctgaactgtcttgaccattgactatgacacagtttcttatttatgtaaatacttgcatcacagtggccgacaggcattggatgcagaacctagagccagttttcaggaacaattgtaaacctgacatggtactgtgcatctattcataaaacactcaaaactgtgaaaatatggtttacatttaattgtacataaaggtaaagggagaactcaattcagtaccagttagtttgtacattttagggggcttttcacattaactgcccatttgtgtaatttatagtttgacatgatgtgtttgttttaaaaaaaaatgcatagtataaacccattaaggatctgggaaaagagaagaagtttaatatagaactaagcttttaaagtttgtttttgtttttaattctggtctcggtgcaaatgttagttatgccttattcatatcacagttagatcaccatgctgcaacatggtttatattcatgctgccctagaaacttttgtaattatttgttgcaaatttgtgactgtccttattaactttcttttatgtaagtaatttgtaaaagtttcttaaaatttttgcttttgcttatttaattttgaataaaagctaaattcctaataaaaaacaataaaaaacaaaaaataaaaaaaaacaagaaacacaaaacaacaaaaaaaaaaaacaaaaaacaaaaacacaaaaacagaacaaacaaaaaaaaaagagtcggggaggccgacgacccccacccacaagaagtaattgaccaaacaaccaacaacgataaaaaaacgagaggcccgacgtactgatatggtactagaagaagtatatatagcatcacacctgggagggggcggtcgcaccaaataaggagtagaccccccaaacaaaaaaatcgcgcggagccagcgtatgtgaaggagcactcagcaaaaatacgcaacggggacaatgatatccacgacgattatatcacgcgtgtaaataaagacggcgattatcgg

SEQ ID NO: 296920 - DNA, 2942 bp, Homo sapiens
ctgccgcccgccaccgccagtgccactgatgctgaagggaccgccccgcggccgccgcctctggccgccgccatcgccgcttcagacttcagaaccagcgtcgtcctcaaccacctggccgagaagtggtttccgggccagcgcgagcgggcccgggcggccggcaggctcggggagctactgcaccaggggcgctaccgggaggccctggccgccgcctgcgaggcgctgcgagcagaacccagtgacttgattgtaaaaatttacagagcggaatcatatgctggtctccaagagtttaaagcagccatagaagatttaaatgcagttctttttcaacttccagattggcctgaggtctacttcaggaaaggaaaagtactctgcgatgctggttttttaggtgatgccttacaactctttcttcagtgcttagcccttgatgaagattttgcacctgcaaagctgcaagtacaaaagattttatgtgatttattattacctgaaaacttaaaagaaggcctgaaggaatcttcctggagttcattaccatgtactaaaaacagaccttttgattttcattcagtgatggaagagtctcagtctctcaatgaacctagcccaaagcagagtgaagaaataccagaggtcacttcagagcctgtcaaaggaagcttaaaccgtgctcagtcagcacagtctataaattcaacagaaatgcctgccagagaggactgtttaaaaagagtgtcctcagaacctgttctgtcagttcaagaaaaaggtgttctgctgaaaagaaagttgtctcttttagaacaggatgtgattgtaaatgaagatggaagaaataagctgaaaaaacaaggagcttatggtgatattccagaagaattaatcgatgtctcagatttcgagtgttctctctgcatgaggttgttttttgagccagtaacaaccccttgcggacattcgttctgtaagaattgtcttgagcgttgtttagatcatgcaccatattgtcctctttgcaaagaaagcttaaaagagtatctagcagataggaggtactgtgtcacacagctgttggaagaattaatagtgaagtatctgcctgatgaactgtctgagagaaaaaaaatatatgatgaagaaactgctgaactctcacacttgaccaagaatgttccaatatttgtttgcactatggcctaccccactgtgccttgccctctccatgtatttgagccaagatacagattgatgattcgaagaagtatacagactggaaccaaacagtttggcatgtgtgtcagtgatacacaaaatagttttgcagattatggttgtatgttacaaattagaaacgtgcatttcttaccggacggaaggtctgtggttgatacagttggaggaaagcggtttagggttttaaaaagaggaatgaaagatggatattgcactgccgacattgaatatctggaagatgttaaggttgagaatgaagatgagattaagaatctcagagagcttcatgatttggtttactctcaagcctgcagctggtttcagaatttaagagacagatttcgaagccaaattcttcagcatttcggatcaatgcccgagagggaggaaaaccttcaggcagcccctaatggacctgcatggtgttggtggcttcttgcagttctccctgtagacccacgataccagctgtcggttttgtcaatgaagtctttgaaagaacggttgaccaagatacagcatatactgacctatttttctagagaccaatctaagtaactaactctttggatctccctttaaagtgaccctaatctggctgcattgatggccagattgtctgctgcctttgcacatctagtgctggtttcagaaatttaatgaaacttttctttttccttcgacctcctgaatcatgtggttctgcaaatgaataccttcaactaggatttagaccactaagaacttgcacagaaaaacacgcattgaatgtgtgtcgaacctctacattgtgaagttgcactatgtaccatactctaaaatgaaataagaactctttatgtctgtgagagagtgtgtgtgtgtgtgtgcgtgcgtgtgtgcttgtgggggttgggtagtgtgtgtgtattttctctggctttaaaattttaaaacaaacaaacaaaaaagccatagagagcagaacttgccgagggtcatttattgcccaagtttacaagagtagcgatacaagtttttgcaaattgaatttgcctcagatatatctgtcctaatgcttatatttgcacaagtatgtaaaatatcgtgttgaggatcattctttgttggaaatactgctcttgctgaactgtcttgaccattgactatgacacagtttcttatttatgtaaatacttgcatcacagtggccgacaggcattggatgcagaacctagagccagttttcaggaacaattgtaaacctgacatggtactgtgcatctattcataaaacactcaaaactgtgaaaatatggtttacatttaattgtacataaaggtaaagggagaactcaattcagtaccagttagtttgtacattttagggggcttttcacattaactgcccatttgtgtaatttatagtttgacatgatgtgtttgttttaaaaaaaaatgcatagtataaacccattaaggatctgggaattctggtctcggtgcaaatgttagttatgccttattcatatcacagttagatcaccatgctgcaacatggtttatattcatgctgccctagaaacttttgtaattatttgttgcaaatttgtgactgtccttattaactttcttttatgtaagtaatttgtaaaagtttcttaaaatttttgcttttgcttatttaattttgaataaaagctaaattcctaata

SEQ ID NO: 296921 - DNA, 2269 bp, Homo sapiens
ctgccgcccgccaccgccagtgccactgatgctgaagggaccgccccgcggccgccgcctctggccgccgccatcgccgcttcagacttcagaaccagcgtcgtcctcaaccacctggccgagaagtggtttccgggccagcgcgagcgggcccgggcggccggcaggctcggggagctactgcaccaggggcgctaccgggaggccctggccgccgcctgcgaggcgctgcgagcagaacccagtgacttgattgtaaaaatttacagagcggaatcatatgctggtctccaagagtttaaagcagccatagaagatttaaatgcagttctttttcaacttccagattggcctgaggtctacttcaggaaaggaaaagtactctgcgatgctggttttttaggtgatgccttacaactctttcttcagtgcttagcccttgatgaagattttgcacctgcaaagctgcaagtacaaaagattttatgtgatttattattacctgaaaacttaaaagaaggcctgaaggaatcttcctggagttcattaccatgtactaaaaacagaccttttgattttcattcagtgatggaagagtctcagtctctcaatgaacctagcccaaagcagagtgaagaaataccagaggtcacttcagagcctgtcaaaggaagcttaaaccgtgctcagtcagcacagtctataaattcaacagaaatgcctgccagagaggactgtttaaaaagagtgtcctcagaacctgttctgtcagttcaagaaaaaggtgttctgctgaaaagaaagttgtctcttttagaacaggatgtgattgtaaatgaagatggaagaaataagctgaaaaaacaaggagcttatggtgatattccagaagaattaatcgatgtctcagatttcgagtgttctctctgcatgaggttgttttttgagccagtaacaaccccttgcggacattcgttctgtaagaattgtcttgagcgttgtttagatcatgcaccatattgtcctctttgcaaagaaagcttaaaagagtatctagcagataggaggtactgtgtcacacagctgttggaagaattaatagtgaagtatctgcctgatgaactgtctgagagaaaaaaaatatatgatgaagaaactgctgaactctcacacttgaccaagaatgttccaatatttgtttgcactatggcctaccccactgtgccttgccctctccatgtatttgagccaagatacagattgatgattcgaagaagtatacagactggaaccaaacagtttggcatgtgtgtcagtgatacacaaaatagttttgcagattatggttgtatgttacaaattagaaacgtgcatttcttaccggacggaaggtctgtggttgatacagttggaggaaagcggtttagggttttaaaaagaggaatgaaagatggatattgcactgccgacattgaatatctggaagatgttaaggttgagaatgaagatgagattaagaatctcagagagcttcatgatttggtttactctcaagcctgcagctggtttcagaatttaagagacagatttcgaagccaaattcttcagcatttcggatcaatgcccgagagggaggaaaaccttcaggcagcccctaatggacctgcatggtgttggtggcttcttgcagttctccctgtagacccacgataccagctgtcggttttgtcaatgaagtctttgaaagaacggttgaccaagatacagcatatactgacctatttttctagagaccaatctaagtaactaactctttggatctccctttaaagtgaccctaatctggctgcattgatggccagattgtctgctgcctttgcacatctagtgctggtttcagaaatttaatgaaacttttctttttccttcgacctcctgaatcatgtggttctgcaaatgaataccttcaactaggatttagaccactaagaacttgcacagaaaaacacgcattgaatgtgtgtcgaacctctacattgtgaagttgcactatgtaccatactctaaaatgaaataagaactctttatgtctgtgagagagtgtgtgtgtgtgtgtgcgtgcgtgtgtgcttgtgggggttgggtagtgtgtgtgtattttctctggctttaaaattttaaaacaaactacctaaaattctattgtatgcgatattttcggagtgtattttttgtcgaattttcacaaaaatattaacaaagttattcg

SEQ ID NO: 296922 - DNA, 420 bp, Homo sapiens
tatctcagttaaaatgatagtttagtgcccatgagctgtcaggtggaaaagggcctctgttgtggaagacggcagggcagggccctctgcggctaatagagaagctgtggtcacagcaggaagcagttcttctgtacagggcttggttcaggttgcagccaactatctttactgctcttgtgcaaagcctcagacaggtttttttgcttagcatcatccattgtaatgttcccctcactaattaatccagaattgatggtataagtatgtaataaaggctttaatatatcagttaactgtgttgcctgttttatactgtaggaaaaccactgctggaatgtaaaataatattgtcttttagtatctagcagataggaggtactgtgtcacacagctgttggaagaattaatagtgaagta

SEQ ID NO: 296923 - DNA, 3073 bp, Homo sapiens
agagtgggtgcagtgtctaatgcctgtaatcgcagcactttgggaggctaaggcaggaggatcacttgagctcaggtaaaagagaccagcctgggcaacaaagtgagacctcatccccacaaaaagttgtttagaaaattagctgggcgtggtgatgcatgcctgtggtcccagctacatgggaggctgaggcagaaggatcacttgagcccaaggaggttgaggctacagtgagctgtaatcatgccactgcactccagccttggggacagagtgagaccctgcctcaatcaatcaatcaatcaataacaaaaacttaaatagctattaacctcagtcttctttccttcatataaattctattctaagaccaaatagaaaaataaatgtaactaactttgcagagctattgacattgagagacctaacaacagactgcaatggggattgtaaaataacttttcagccttgcacttgctcatatatgttttgagaaaaatgtaagttaggtataacttattgtttaaactattataaggcagtgtttacataaataaatcatctctttcttggaaaacattgagacaaatttattttcagttttacttaaacatgaaacctgtattttagtgctttttgttttgtccagaaatttccagattttgtcttcattttttttcctggttaaaatctaaaccatagtgaagatagtatttatgtttacattttatctgtgaatgtggctaagcagagaagctacatggctttggtctacatattttttgaccttgtatttggttctgtagttgcagacttgtgaaggcttacatcatcatggagactttagtaaggaaggaaccaaaaggtttttggtttggggatgcaaactggaggttatgttacaagtcttcaatgcattttctgtgttcctggcagcagtgttgcctttttttttcttttccttttttttttttaaagaccaggtagggtagtgttattgaagggtaattgaagagtggtagagagtaagaggttttgaaggaggcaggtttgctgttatcacaaaataatttgggggaaacctttcgtggctgtgctgcaagaattctttatgtggctatcctctccatagttttctgaccagaattgcaagggcaaaaatagaacttctagctctatttatttgtatcctttgaaatcagaacttatccttagaaccagtcagttaaataatgcggactatgcctataatcccagcactttaggaggctgaggcaggcagatcacgaggtcaggagttcgaggccagcctggccaatgtggtgaaactccgtctctactaaaaatacaaaaattagccgggcgtggtggtgcacgcccatgcctgtagtcccagctactcgggaggctgaggcagaagaatcgcttgaacccaggaggcggaggttgcagtgagccgagatactgccactacacttcagtctgggtgacagagcgagactccatctcaaaaaaacaaaacaaaataaaataataatgtgggctattcagaagaaaaagtcagtgacagagagaccagaacccattggatcaagagacctgcagggattataactctttactctgtgagcagcggtgtttcgtgccctgtctctgcctgtgtgtttttactaagaattccagaaatcctgtaatttgtaaatgggaaacagaggaaccagattgttttatagctgataagaaacagtctgttttagaaacatctgtttggaaagtattactcatgtattcacaaagtcatatttataacactagtcttctttgactgtattcaacaaaaggcagtttcaccattaatttcatagtaagcttttttaaaggattctagatctaaattgcctaagaatgttaaccacattcttgttttaaactctctaatttaataaatgtaattattttatagtcttttatagacttacattttcttcatactaaaggtaatgataatatagtcatttgccagtactttaaggtattcaggcatttgagacaagaaagctgtcttgtagaatagtccaattgctttcttaaacagtactggtttcatttagacagtttctaagccagcaaaggtgtcaattttaatgccaacttgacagtttaacagttagtgtttgtaagcagtttagcctgaattatcccatactgctgtagaggagaattgttagtaacatcaaaggtcagaatgcttcaggtgactaataagaatggaaagagactgagtaggttttttgtttcttttccctgtctttgagtaactttgaatgactaaaattagtatgaaactaggttttggacccccttctcacctcacccggatgtaatgccaccaatttcaaataactaaaatgtgaccaattactttgcttcaagttctatacaaatatctctgaaatctgtaagccatatttcagctattctggtttttataatacattctaccctaaattaaccaaaggactttttattcagtgtattccatgtttcagcataaggaaagtttgtgcctgatatggcaggagaaagaacactatggtaatttcattgttacttcaggtctctttcaatctgaagaactgggttgtctggagaattgaacatagccaagcaatattatcaattagtaatgtcatcttaaaaatgttcacttttactaagttttattcagaggatctatgtattattagaaaaatgaagtatttctgacatggaacaaagaaagtggaaactggtacttaatgggggaagcaaaattagctgggactaaaacggacatgttttgttttgtgaattctacctaaatgtctctctatccacagagaaactagtattacttgaagatgtgaaagttcctgtggtagccataccttgaagcacagtgtttgtacataagtaaatatcttgattctaaattaaatccagatttaactaatatatattattttatatctttgttgtattaaaatgtttaaaaacactaaaaataaaacatttgaaagttggaaaaagtttc

SEQ ID NO: 296924 - DNA, 1844 bp, Homo sapiens
agagtgggtgcagtgtctaatgcctgtaatcgcagcactttgggaggctaaggcaggaggatcacttgagctcaggtaaaagagaccagcctgggcaacaaagtgagacctcatccccacaaaaagttgtttagaaaattagctgggcgtggtgatgcatgcctgtggtcccagctacatgggaggctgaggcagaaggatcacttgagcccaaggaggttgaggagccgagatactgccactacacttcagtctgggtgacagagcgagactccatctcaaaaaaacaaaacaaaataaaataataatgtgggctattcagaagaaaaagtcagtgacagagagaccagaacccattggatcaagagacctgcagggattataactctttactctgtgagcagcggtgtttcgtgccctgtctctgcctgtgtgtttttactaagaattccagaaatcctgtaatttgtaaatgggaaacagaggaaccagattgttttatagctgataagaaacagtctgttttagaaacatctgtttggaaagtattactcatgtattcacaaagtcatatttataacactagtcttctttgactgtattcaacaaaaggcagtttcaccattaatttcatagtaagcttttttaaaggattctagatctaaattgcctaagaatgttaaccacattcttgttttaaactctctaatttaataaatgtaattattttatagtcttttatagacttacattttcttcatactaaaggtaatgataatatagtcatttgccagtactttaaggtattcaggcatttgagacaagaaagctgtcttgtagaatagtccaattgctttcttaaacagtactggtttcatttagacagtttctaagccagcaaaggtgtcaattttaatgccaacttgacagtttaacagttagtgtttgtaagcagtttagcctgaattatcccatactgctgtagaggagaattgttagtaacatcaaaggtcagaatgcttcaggtgactaataagaatggaaagagactgagtaggttttttgtttcttttccctgtctttgagtaactttgaatgactaaaattagtatgaaactaggttttggacccccttctcacctcacccggatgtaatgccaccaatttcaaataactaaaatgtgaccaattactttgcttcaagttctatacaaatatctctgaaatctgtaagccatatttcagctattctggtttttataatacattctaccctaaattaaccaaaggactttttattcagtgtattccatgtttcagcataaggaaagtttgtgcctgatatggcaggagaaagaacactatggtaatttcattgttacttcaggtctctttcaatctgaagaactgggttgtctggagaattgaacatagccaagcaatattatcaattagtaatgtcatcttaaaaatgttcacttttactaagttttattcagaggatctatgtattattagaaaaatgaagtatttctgacatggaacaaagaaagtggaaactggtacttaatgggggaagcaaaattagctgggactaaaacggacatgttttgttttgtgaattctacctaaatgtctctctatccacagagaaactagtattacttgaagatgtgaaagttcctgtggtagccataccttgaagcacagtgtttgtacataagtaaatatcttgattctaaattaaatccagatttaactaatatatattattttatatctttgttgtattaaaatgtttaaaaacactaaaaataaaacatttgaaagttggaaaaagtttc

SEQ ID NO: 296925 - DNA, 2690 bp, Homo sapiens
agagtgggtgcagtgtctaatgcctgtaatcgcagcactttgggaggctaaggcaggaggatcacttgagctcaggtaaaagagaccagcctgggcaacaaagtgagacctcatccccacaaaaagttgtttagaaaattagctgggcgtggtgatgcatgcctgtggtcccagctacatgggaggctgaggcagaaggatcacttgagcccaaggaggttgaggctacagtgagctgtaatcatgccactgcactccagccttggggacagagtgagaccctgcctcaatcaatcaatcaatcaataacaaaaacttaaatagctattaacctcagtcttctttccttcatataaattctattctaagaccaaatagaaaaataaatgtaactaactttgcagagctattgacattgagagacctaacaacagactgcaatggggattgtaaaataacttttcagccttgcacttgctcatatatgttttgagaaaaatgtaagttaggtataacttattgtttaaactattataaggcagtgtttacataaataaatcatctctttcttggaaaacattgagacaaatttattttcagttttacttaaacatgaaacctgtattttagtgctttttgttttgtccagaaatttccagattttgtcttcattttttttcctggttaaaatctaaaccatagtgaagatagtatttatgtttacattttatctgtgaatgtggctaagcagagaagctacatggctttggtctacatattttttgaccttgtatttggttctgtagttgcagacttgtgaaggcttacatcatcatggagactttagtaaggaaggaaccaaaaggtttttggtttggggatgcaaactggaggttatgttacaagtcttcaatgcattttctgtgttcctggcagcagtgttgcctttttttttcttttccttttttttttttaaagaccaggtagggtagtgttattgaagggtaattgaagagtggtagagagtaagaggttttgaaggaggcaggtttgctgttatcacaaaataatttgggggaaacctttcgtggctgtgctgcaagaattctttatgtggctatcctctccatagttttctgaccagaattgcaagggcaaaaatagaacttctagctctatttatttgtatcctttgaaatcagaacttatccttagaaccagtcagttaaataatgcggactatgcctataatcccagcactttaggaggctgaggcaggcagatcacgaggtcaggagttcgaggccagcctggccaatgtggtgaaactccgtctctactaaaaatacaaaaattagccgggcgtggtggtgcacgcccatgcctgtagtcccagctactcgggaggctgaggcagaagaatcgcttgaacccaggaggcggaggttgcagtgagccgagatactgccactacacttcagtctgggtgacagagcgagactccatctcaaaaaaacaaaacaaaataaaataataatgtgggctattcagaagaaaaagtcagtgacagagagaccagaacccattggatcaagagacctgcagggattataactctttactctgtgagcagcggtgtttcgtgccctgtctctgcctgtgtgtttttactaagaattccagaaatcctgtaatttgtaaatgggaaacagtactggtttcatttagacagtttctaagccagcaaaggtgtcaattttaatgccaacttgacagtttaacagttagtgtttgtaagcagtttagcctgaattatcccatactgctgtagaggagaattgttagtaacatcaaaggtcagaatgcttcaggtgactaataagaatggaaagagactgagtaggttttttgtttcttttccctgtctttgagtaactttgaatgactaaaattagtatgaaactaggttttggacccccttctcacctcacccggatgtaatgccaccaatttcaaataactaaaatgtgaccaattactttgcttcaagttctatacaaatatctctgaaatctgtaagccatatttcagctattctggtttttataatacattctaccctaaattaaccaaaggactttttattcagtgtattccatgtttcagcataaggaaagtttgtgcctgatatggcaggagaaagaacactatggtaatttcattgttacttcaggtctctttcaatctgaagaactgggttgtctggagaattgaacatagccaagcaatattatcaattagtaatgtcatcttaaaaatgttcacttttactaagttttattcagaggatctatgtattattagaaaaatgaagtatttctgacatggaacaaagaaagtggaaactggtacttaatgggggaagcaaaattagctgggactaaaacggacatgttttgttttgtgaattctacctaaatgtctctctatccacagagaaactagtattacttgaagatgtgaaagttcctgtggtagccataccttgaagcacagtgtttgtacataagtaaatatcttgattctaaattaaatccagatttaactaatatatattattttatatctttgttgtattaaaatgtttaaaaacactaaaaataaaacatttgaaagttggaaaaagtttc

SEQ ID NO: 296926 - DNA, 5237 bp, Homo sapiens
ggcagggggtggggggggcgccctcggagccgggcggaggggaggggggaaagaggagcgcagggtgagagtgagccgcaggcttcgggaggcgagggggcggggggagcagcgccgaggccgccgcctccgcctccgccgcctaggactagggggtgggggacggacaagccccgatgccgggggagacggaagagccgagacccccggagcagcaggaccaggaagggggagaggcggccaaggcggctccggaggagccccaacaacggccccctgaggcggtcgcggcggcgcctgcagggaccactagcagccgcgtgctgaggggaggtcgggaccgaggccgggccgctgcggccgccgccgccgcagctgtgtcccgccggaggaaggccgagtatccccgccggcggaggagcagccccagcgccaggcctcccgacgtccccgggcagcagccccaggccgcgaagtccccgtctccagttcagggcaagaagagtccgcgactcctatgcatagaaaaagtaacaactgataaagatcccaaggaagaaaaagaggaagaagacgattctgccctccctcaggaagtttccattgctgcatctagacctagccggggctggcgtagtagtaggacatctgtttctcgccatcgtgatacagagaacacccgaagctctcggtccaagaccggttcattgcagctcatttgcaagtcagaaccaaatacagaccaacttgattatgatgttggagaagagcatcagtctccaggtggcattagtagtgaagaggaagaggaggaggaagaagagatgttaatcagtgaagaggagataccattcaaagatgatccaagagatgagacctacaaaccccacttagaaagggaaaccccaaagccacggagaaaatcagggaaggtaaaagaagagaaggagaagaaggaaattaaagtggaagtagaggtggaggtgaaagaagaggagaatgaaattagagaggatgaggaacctccaaggaagagaggaagaagacgaaaagatgacaaaagtccacgtttacccaaaaggagaaaaaagcctccaatccagtatgtccgttgtgagatggaaggatgtggaactgtccttgcccatcctcgctatttgcagcaccacattaaataccagcatttgctgaagaagaaatatgtatgtccccatccctcctgtggacgactcttcaggcttcagaagcaacttctgcgacatgccaaacatcatacagatcaaagggattatatctgtgaatattgtgctcgggccttcaagagttcccacaatctggcagtgcaccggatgattcacactggcgagaagccattacaatgtgagatctgtggatttacttgtcgacaaaaggcatctcttaattggcacatgaagaaacatgatgcagactccttctaccagttttcttgcaatatctgtggcaaaaaatttgagaagaaggacagcgtagtggcacacaaggcaaaaagccaccctgaggtgctgattgcagaagctctggctgccaatgcaggcgccctcatcaccagcacagatatcttgggcactaacccagagtccctgacgcagccttcagatggtcagggtcttcctcttcttcctgagcccttgggaaactcaacctctggagagtgcctactgttagaagctgaagggatgtcaaagtcatactgcagtgggacggaacgggtgagcctgatggctgatgggaagatctttgtgggaagcggcagcagtggaggcactgaagggctggttatgaactcagatatactcggtgctaccacagaggttctgattgaagattcagactctgccggaccttagtggacaggaagacttggggcatgggacagctcagactttgtatttaaaagttaaaaaggacaaaaaaaaaatctaaagcatttaaaatctagtgaaataactgaagggcctgctctttccattgtggatcacagcacacacatacatacaccctccacctccccatcccctgttctccctctgttgctccccttataaaattgatgttgtctttaccagaaaggtagacaaaaaagaagcagcagcagctcttaaagtgagggttattctcatactcggttccagccatcagcagacttcctgctcatcggcagatccccctttccaacctgtaactctgatgtgctctggatcagcttttaacttttaatcatatattactgtcttctaaatcccttctcctcctctactgctgccctatggttctggctcctaccccctgcggcacacttatcttcaaataccatagaattctaatctctggaggctggcagcttgacttggcactttagggccccttagcagggtgagctgttaaaacagcacacatctctcatcccctcttcctttattcccccctgggtttcagaaaggaaggatatatggggaccacctcccccttctttgatcccagcatctcagtccccctcccaaccctccatatggctctcaatggtgctcacttgcttggaagcaggctcccaatagggagggggctgccctctacagtctctttgactgtaagacagggctctgtatcagtgagacgatgagaaaagtcccaggctaatggcagaaatttgcactttgaacatgtgtgtttttgtgttgtggaacctgagattccttatttattaacaggaagtctgattttttttttttggagtctttgttgctatattttgtggggctgggagagagagattagattattttgacatgggatcccttccataacaggtactttgaaggcaagacatagggttgaagaagcacagccagcctctgaaatcatagctctccagtggcttttaaagaaagctggtcctcagcactaacaaaatcactacaatagcctagtgcttttttggaagcctttttagggaagaatgttaggttcatggtaactagtatgctctttgagatttttacagtgttgaaacttaagaattttgagagggtgaggagggttgttcagaatctaaattacagatagatgattgtttcttgtgaatttgtttcttttcctttttttttgtccctaccatttccttacatttcccttggggcccatctctggctccttgctttttgtttcttgctttgctttatcagttcattccagctccctgttagtgaaggacactgctgttagtgaaggaacaaagtctatgagtcctaaaattttaagtcaaagaaaactgctctgtttcccctttagtaacacttctgaagaggaaaaacttcaatagccaaagttaataatcctatataataattgctttggctttcacctaaaattctgggcatcacaatttccttgggatagaggttgtgttggggaatagattgcttattgctgttcactggagagaaaaggtagtgtttttgtacaaggtcataccgccagaagccccaaatcctattttggctcatcttcaggtaaagagtaattcctatcctgtgtgcctcagaagctagaatcgaaggcttaccctattcattgtttattgtcagaaatgcatgatggctcttggaaagaatgacgttttgctggaaaaaaaaaaaagaacagtttgtgtttcacaaacatggcttatcaattttttcaaagaattcttttttcccaaaaagaggagtaacaaaatgtcatttctgaaagaggcttactttataccaactagtgtcagcatttgggatgccagggaacagagagtgagacacctacaatcaccagtctcaaatgcgctattgtttcttttcagagtgttgcagatttgccatttctccataatatggggatagaaaatggaataaagatagaagggatgtagaatatgctttcctgccaacatggtttggagtcgactttggtatattgactagatttgaaaatacaagattgattagatgaatctacaaaaaagttgtcctcctctcaggtcccttttacactttttgactaactagcatctatattccacacttagcttttttgtcacacttatcctttgtctccgtaaatttcatttgcagtggttagtcatcagatattttagccacctacacaaaagcaaactgcatttttaaaaatctttctgagatgggagaaaatgtattctcctttcctataccgctctcccaacaaaaaaacaactagttagttctactaattagaaacttgctgtactttttcttttcttttaggggtcaaggaccctctttatagctaccatttgcctacaataaattattgcagcagtttgcaatactaaaatattttttatagactttatatttttccttttgataaagggatgctgcatagtagagttggtgtaattaaactatctcagccgtttccctgctttcccttctgctccatatgcctcattgtccttccagggagctcttttaatcttaaagttctacatttcatgctcttagtcaaattctgttacctttttaataactcttcccactgcatatttccatcttgaattggtggttctaaattctgaaactgtagttgagatacagctatttaatatttctgggagatgtgcatccctcttctttgtggttgcccaaggttgttttgcgtaactgagactccttgatatgcttcagagaatttaggcaaacactggccatggccgtgggagtactgggagtaaaataaaaatatcgaggtatagactagcatccacatagagcacttgaacctcctttgtacctgtttggggaaaaagtataatgagtgtactaccaatctaactaagattattatagtctggttgtttgaaataccatttttttctccttttgtgtttttcccactttccaatgtactcaagaaaattgaacaaatgtaatggatcaatttaaaatattttatttcttaaaagccttttttgcctgttgtaatgtgcaggacccttctcctttcatgggagagacaggtagttacctgaatataggttgaaaaggttatgtaaaaagaaattataataaaagggatactttgcttttcaaatctttgttttctcttattctaggtaaggcatattaaaaataaatatgtaaagaagaaaaataaaagttgtcttcatggaaaaaaaaaaactt

SEQ ID NO: 296927 - DNA, 2385 bp, Homo sapiens
ggcagggggtggggggggcgccctcggagccgggcggaggggaggggggaaagaggagcgcagggtgagagtgagccgcaggcttcgggaggcgagggggcggggggagcagcgccgaggccgccgcctccgcctccgccgcctaggactagggggtgggggacggacaagccccgatgccgggggagacggaagagccgagacccccggagcagcaggaccaggaagggggagaggcggccaaggcggctccggaggagccccaacaacggccccctgaggcggtcgcggcggcgcctgcagggaccactagcagccgcgtgctgaggggaggtcgggaccgaggccgggccgctgcggccgccgccgccgcagctgtgtcccgccggaggaaggccgagtatccccgccggcggaggagcagccccagcgccaggcctcccgacgtccccgggcagcagccccaggccgcgaagtccccgtctccagttcagggcaagaagagtccgcgactcctatgcatagaaaaagtaacaactgataaagatcccaaggaagaaaaagaggaagaagacgattctgccctccctcaggaagtttccattgctgcatctagacctagccggggctggcgtagtagtaggacatctgtttctcgccatcgtgatacagagaacacccgaagctctcggtccaagaccggttcattgcagctcatttgcaagtcagaaccaaatacagaccaacttgattatgatgttggagaagagcatcagtctccaggtggcattagtagtgaagaggaagaggaggaggaagaagagatgttaatcagtgaagaggagataccattcaaagatgatccaagagatgagacctacaaaccccacttagaaagggaaaccccaaagccacggagaaaatcagggaaggtaaaagaagagaaggagaagaaggaaattaaagtggaagtagaggtggaggtgaaagaagaggagaatgaaattagagaggatgaggaacctccaaggaagagaggaagaagacgaaaagatgacaaaagtccacgtttacccaaaaggagaaaaaagcctccaatccagtatgtccgttgtgagatggaaggatgtggaactgtccttgcccatcctcgctatttgcagcaccacattaaataccagcatttgctgaagaagaaatatgtatgtccccatccctcctgtggacgactcttcaggcttcagaagcaacttctgcgacatgccaaacatcatacagatcaaagggattatatctgtgaatattgtgctcgggccttcaagagttcccacaatctggcagtgcaccggatgattcacactggcgagaagccattacaatgtgagatctgtggatttacttgtcgacaaaaggcatctcttaattggcacatgaagaaacatgatgcagactccttctaccagttttcttgcaatatctgtggcaaaaaatttgagaagaaggacagcgtagtggcacacaaggcaaaaagccaccctgaggtgctgattgcagaagctctggctgccaatgcaggcgccctcatcaccagcacagatatcttgggcactaacccagagtccctgacgcagccttcagatggtcagggtcttcctcttcttcctgagcccttgggaaactcaacctctggagagtgcctactgttagaagctgaagggatgtcaaagtcatactgcagtgggacggaacggagcattcaccgctgacccctcaccgtcgggacctctgtagccgctctatctggctagcaaggaagattcgttcagacctgactgctcttacggaatcctatgtgaagcatcagggcctgaacaagaacatcaacctggactctgcggatgggatgccagtggcaagcactgatcagtggagtgagctgaccgaggcagagcgactccaagagaaccttcaagcttatcgtaccttccatgttttgttggccaggctcttagaagaccagcaggtgcattttaccccaaccgaaggtgacttccatcaagctatacatacccttcttctccaagtcgctgcctttgcataccagatagaggagttaatgatactcctggaatacaagatcccccgcaatgaggctgatgggatgcctattaatgttggagatggtggtctctttgagaagaagctgtggggcctaaaggtgctgcaggagctttcacagtggacagtaaggtccatccatgaccttcgtttcatttcttctcatcagactgggatcccagcacgtgggagccattatattgctaacaacaagaaaatgtagcagttagtcccttctctcttccttgctttctcttctaatggaat

SEQ ID NO: 296928 - DNA, 5145 bp, Homo sapiens
ggcagggggtggggggggcgccctcggagccgggcggaggggaggggggaaagaggagcgcagggtgagagtgagccgcaggcttcgggaggcgagggggcggggggagcagcgccgaggccgccgcctccgcctccgccgcctaggactagggggtgggggacggacaagccccgatgccgggggagacggaagagccgagacccccggagcagcaggaccaggaagggggagaggcggccaaggcggctccggaggagccccaacaacggccccctgaggcggtcgcggcggcgcctgcagggaccactagcagccgcgtgctgaggggaggtcgggaccgaggccgggccgctgcggccgccgccgccgcagctgtgtcccgccggaggaaggccgagtatccccgccggcggaggagcagccccagcgccaggcctcccgacgtccccgggcagcagccccaggccgcgaagtccccgtctccagttcagggcaagaagagtccgcgactcctatgcatagaaaaagtaacaactgataaagatcccaaggaagaaaaagaggaagaagacgattctgccctccctcaggaagtttccattgctgcatctagacctagccggggctggcgtagtagtaggacatctgtttctcgccatcgtgatacagagaacacccgaagctctcggtccaagaccggttcattgcagctcatttgcaagtcagaaccaaatacagaccaacttgattatgatgttggagaagagcatcagtctccaggtggcattagtagtgaagaggaagaggaggaggaagaagagatgttaatcagtgaagaggagataccattcaaagatgatccaagagatgagacctacaaaccccacttagaaagggaaaccccaaagccacggagaaaatcagggaaggtaaaagaagagaaggagaagaaggaaattaaagtggaagtagaggtggaggtgaaagaagaggagaatgaaattagagaggatgaggaacctccaaggaagagaggaagaagacgaaaagatgacaaaagtccacgtttacccaaaaggagaaaaaagcctccaatccagtatgtccgttgtgagatggaaggatgtggaactgtccttgcccatcctcgctatttgcagcaccacattaaataccagcatttgctgaagaagaaatatgtatgtccccatccctcctgtggacgactcttcaggcttcagaagcaacttctgcgacatgccaaacatcatacagatcaaagggattatatctgtgaatattgtgctcgggccttcaagagttcccacaatctggcagtgcaccggatgattcacactggcgagaagccattacaatgtgagatctgtggatttacttgtcgacaaaaggcatctcttaattggcacatgaagaaacatgatgcagactccttctaccagttttcttgcaatatctgtggcaaaaaatttgagaagaaggacagcgtagtggcacacaaggcaaaaagccaccctgaggtgctgattgcagaagctctggctgccaatgcaggcgccctcatcaccagcacagatatcttgggcactaacccagagtccctgacgcagccttcagatggtcagggtcttcctcttcttcctgagcccttgggaaactcaacctctggagagtgcctactgttagaagctgaagggatgtcaaagtcatactgcagtgggacggaacgggtgagcctgatggctgatgggaagatctttgtgggaagcggcagcagtggaggcactgaagggctggttatgaactcagatatactcggtgctaccacagaggttctgattgaagattcagactctgccggaccttagtggacaggaagacttggggcatgggacagctcagactttgtatttaaaagttaaaaaggacaaaaaaaaaatctaaagcatttaaaatctagtgaaataactgaagggcctgctctttccattgtggatcacagcacacacatacatacaccctccacctccccatcccctgttctccctctgttgctccccttataaaattgatgttgtctttaccagaaaggtagacaaaaaagaagcagcagcagctcttaaagtgagggttattctcatactcggttccagccatcagcagacttcctgctcatcggcagatccccctttccaacctgtaactctgatgtgctctggatcagcttttaacttttaatcatatattactgtcttctaaatcccttctcctcctctactgctgccctatggttctggctcctaccccctgcggcacacttatcttcaaataccatagaattctaatctctggaggctggcagcttgacttggcactttagggccccttagcagggtgagctgttaaaacagcacacatctctcatcccctcttcctttattcccccctgggtttcagaaaggaaggatatatggggaccacctcccccttctttgatcccagcatctcagtccccctcccaaccctccatatggctctcaatggtgctcacttgcttggaagcaggctcccaatagggagggggctgccctctacagtctctttgactgtaagacagggctctgtatcagtgagacgatgagaaaagtcccaggctaatggcagaaatttgcactttgaacatgtgtgtttttgtgttgtggaacctgagattccttatttattaacaggaagtctgattttttttttttggagtctttgttgctatattttgtggggctgggagagagagattagattattttgacatgggatcccttccataacaggtactttgaaggcaagacatagggttgaagaagcacagccagcctctgaaatcatagctctccagtggcttttaaagaaagctggtcctcagcactaacaaaatcactacaatagcctagtgcttttttggaagcctttttagggaagaatgttaggttcatggtaactagtatgctctttgagatttttacagtgttgaaacttaagaattttgagagggtgaggagggttgttcagaatctaaattacagatagatgattgtttcttgtgaatttgtttcttttcctttttttttgtccctaccatttccttacatttcccttggggcccatctctggctccttgctttttgtttcttgctttgctttatcagttcattccagctccctgttagtgaaggacactgctgttagtgaaggaacaaagtctatgagtcctaaaattttaagtcaaagaaaactgctctgtttcccctttagtaacacttctgaagaggaaaaacttcaatagccaaagttaataatcctatataataattgctttggctttcacctaaaattctgggcatcacaatttccttgggatagaggttgtgttggggaatagattgcttattgctgttcactggagagaaaaggtagtgtttttgtacaaggtcataccgccagaagccccaaatcctattttggctcatcttcaggtaaagagtaattcctatcctgtgtgcctcagaagctagaatcgaaggcttaccctattcattgtttattgtcagaaatgcatgatggctcttggaaagaatgacgttttgctggaaaaaaaaaaaagaacagtttgtgtttcacaaacatggcttatcaattttttcaaagaattcttttttcccaaaaagaggagtaacaaaatgtcatttctgaaagaggcttactttataccaactagtgtcagcatttgggatgccagggaacagagagtgagacacctacaatcaccagtctcaaatgcgctattgtttcttttcagagtgttgcagatttgccatttctccataatatggggatagaaaatggaataaagatagaagggatgtagaatatgctttcctgccaacatggtttggagtcgactttggtatattgactagatttgaaaatacaagattgattagatgaatctacaaaaaagttgtcctcctctcaggtcccttttacactttttgactaactagcatctatattccacacttagcttttttgtcacacttatcctttgtctccgtaaatttcatttgcagtggttagtcatcagatattttagccacctacacaaaagcaaactgcatttttaaaaatctttctgagatgggagaaaatgtattctcctttcctataccgctctcccaacaaaaaaacaactagttagttctactaattagaaacttgctgtactttttcttttcttttaggggtcaaggaccctctttatagctaccatttgcctacaataaattattgcagcagtttgcaatactaaaatattttttatagactttatatttttccttttgataaagggatgctgcatagtagagttggtgtaattaaactatctcagccgtttccctgctttcccttctgctccatatgcctcattgtccttccagggagctcttttaatcttaaagttctacatttcatgctcttagtcaaattctgttacctttttaataactcttcccactgcatatttccatcttgaattggtggttctaaattctgaaactgtagttgagatacagctatttaatatttctgggagatgtgcatccctcttctttgtggttgcccaaggttgttttgcgtaactgagactccttgatatgcttcagagaatttaggcaaacactggccatggccgtgggagtactgggagtaaaataaaaatatcgaggtatagactagcatccacatagagcacttgaacctcctttgtacctgtttggggaaaaagtataatgagtgtactaccaatctaactaagattattatagtctggttgtttgaaataccatttttttctccttttgtgtttttcccactttccaatgtactcaagaaaattgaacaaatgtaatggatcaatttaaaatattttatttcttaaaagccttttttgcctgttgtaatgtgcaggacccttctcctttcatgggagagacaggtagttacctgaatataggttgaaaaggttatgtaaaaagaaattataataaaagggatactttgcttttcaaa

SEQ ID NO: 296929 - DNA, 5093 bp, Homo sapiens
ggcagggggtggggggggcgccctcggagccgggcggaggggaggggggaaagaggagcgcagggtgagagtgagccgcaggcttcgggaggcgagggggcggggggagcagcgccgaggccgccgcctccgcctccgccgcctaggactagggggtgggggacggacaagccccgatgccgggggagacggaagagccgagacccccggagcagcaggaccaggaagggggagaggcggccaaggcggctccggaggagccccaacaacggccccctgaggcggtcgcggcggcgcctgcagggaccactagcagccgcgtgctgaggggaggtcgggaccgaggccgggccgctgcggccgccgccgccgcagctgtgtcccgccggaggaaggccgagtatccccgccggcggaggagcagccccagcgccaggcctcccgacgtccccgggcagcagccccaggccgcgaagtccccgtctccagttcagggcaagaagagtccgcgactcctatgcatagaaaaagtaacaactgataaagatcccaaggaagaaaaagaggaagaagacgattctgccctccctcaggaagtttccattgctgcatctagacctagccggggctggcgtagtagtaggacatctgtttctcgccatcgtgatacagagaacacccgaagctctcggtccaagaccggttcattgcagctcatttgcaagtcagaaccaaatacagaccaacttgattatgatgttggagaagagcatcagtctccaggtggcattagtagtgaagaggaagaggaggaggaagaagagatgttaatcagtgaagaggagataccattcaaagatgatccaagagatgagacctacaaaccccacttagaaagggaaaccccaaagccacggagaaaatcagggaaggtaaaagaagagaaggagaagaaggaaattaaagtggaagtagaggtggaggtgaaagaagaggagaatgaaattagagaggatgaggaacctccaaggaagagaggaagaagacgaaaagatgacaaaagtccacgtttacccaaaaggagaaaaaagcctccaatccagtatgtccgttgtgagatggaaggatgtggaactgtccttgcccatcctcgctatttgcagcaccacattaaataccagcatttgctgaagaagaaatatgtatgtccccatccctcctgtggacgactcttcaggcttcagaagcaacttctgcgacatgccaaacatcatacagatcaaagggattatatctgtgaatattgtgctcgggccttcaagagttcccacaatctggcagtgcaccggatgattcacactggcgagaagccattacaatgtgagatctgtggatttacttgtcgacaaaaggcatctcttaattggcacatgaagaaacatgatgcagactccttctaccagttttcttgcaatatctgtggcaaaaaatttgagaagaaggacagcgtagtggcacacaaggcaaaaagccaccctgaggtgctgattgcagaagctctggctgccaatgcaggcgccctcatcaccagcacagatatcttgggcactaacccagagtccctgacgcagccttcagatggtcagggtcttcctcttcttcctgagcccttgggaaactcaacctctggagagtgcctactgttagaagctgaagggatgtcaaagtcatactgcagtgggacggaacgggtgagcctgatggctgatgggaagatctttgtgggaagcggcagcagtggaggcactgaagggctggttatgaactcagatatactcggtgctaccacagaggttctgattgaagattcagactctgccggaccttagtggacaggaagacttggggcatgggacagctcagactttgtatttaaaagttaaaaaggacaaaaaaaaaatctaaagcatttaaaatctagtgaaataactgaagggcctgctctttccattgtggatcacagcacacacatacatacaccctccacctccccatcccctgttctccctctgttgctccccttataaaattgatgttgtctttaccagaaaggtagacaaaaaagaagcagcagcagctcttaaagtgagggttattctcatactcggttccagccatcagcagacttcctgctcatcggcagatccccctttccaacctgtaactctgatgtgctctggatcagcttttaacttttaatcatatattactgtcttctaaatcccttctcctcctctactgctgccctatggttctggctcctaccccctgcggcacacttatcttcaaataccatagaattctaatctctggaggctggcagcttgacttggcactttagggccccttagcagggtgagctgttaaaacagcacacatctctcatcccctcttcctttattcccccctgggtttcagaaaggaaggatatatggggaccacctcccccttctttgatcccagcatctcagtccccctcccaaccctccatatggctctcaatggtgctcacttgcttggaaacagggctctgtatcagtgagacgatgagaaaagtcccaggctaatggcagaaatttgcactttgaacatgtgtgtttttgtgttgtggaacctgagattccttatttattaacaggaagtctgattttttttttttggagtctttgttgctatattttgtggggctgggagagagagattagattattttgacatgggatcccttccataacaggtactttgaaggcaagacatagggttgaagaagcacagccagcctctgaaatcatagctctccagtggcttttaaagaaagctggtcctcagcactaacaaaatcactacaatagcctagtgcttttttggaagcctttttagggaagaatgttaggttcatggtaactagtatgctctttgagatttttacagtgttgaaacttaagaattttgagagggtgaggagggttgttcagaatctaaattacagatagatgattgtttcttgtgaatttgtttcttttcctttttttttgtccctaccatttccttacatttcccttggggcccatctctggctccttgctttttgtttcttgctttgctttatcagttcattccagctccctgttagtgaaggacactgctgttagtgaaggaacaaagtctatgagtcctaaaattttaagtcaaagaaaactgctctgtttcccctttagtaacacttctgaagaggaaaaacttcaatagccaaagttaataatcctatataataattgctttggctttcacctaaaattctgggcatcacaatttccttgggatagaggttgtgttggggaatagattgcttattgctgttcactggagagaaaaggtagtgtttttgtacaaggtcataccgccagaagccccaaatcctattttggctcatcttcaggtaaagagtaattcctatcctgtgtgcctcagaagctagaatcgaaggcttaccctattcattgtttattgtcagaaatgcatgatggctcttggaaagaatgacgttttgctggaaaaaaaaaaaagaacagtttgtgtttcacaaacatggcttatcaattttttcaaagaattcttttttcccaaaaagaggagtaacaaaatgtcatttctgaaagaggcttactttataccaactagtgtcagcatttgggatgccagggaacagagagtgagacacctacaatcaccagtctcaaatgcgctattgtttcttttcagagtgttgcagatttgccatttctccataatatggggatagaaaatggaataaagatagaagggatgtagaatatgctttcctgccaacatggtttggagtcgactttggtatattgactagatttgaaaatacaagattgattagatgaatctacaaaaaagttgtcctcctctcaggtcccttttacactttttgactaactagcatctatattccacacttagcttttttgtcacacttatcctttgtctccgtaaatttcatttgcagtggttagtcatcagatattttagccacctacacaaaagcaaactgcatttttaaaaatctttctgagatgggagaaaatgtattctcctttcctataccgctctcccaacaaaaaaacaactagttagttctactaattagaaacttgctgtactttttcttttcttttaggggtcaaggaccctctttatagctaccatttgcctacaataaattattgcagcagtttgcaatactaaaatattttttatagactttatatttttccttttgataaagggatgctgcatagtagagttggtgtaattaaactatctcagccgtttccctgctttcccttctgctccatatgcctcattgtccttccagggagctcttttaatcttaaagttctacatttcatgctcttagtcaaattctgttacctttttaataactcttcccactgcatatttccatcttgaattggtggttctaaattctgaaactgtagttgagatacagctatttaatatttctgggagatgtgcatccctcttctttgtggttgcccaaggttgttttgcgtaactgagactccttgatatgcttcagagaatttaggcaaacactggccatggccgtgggagtactgggagtaaaataaaaatatcgaggtatagactagcatccacatagagcacttgaacctcctttgtacctgtttggggaaaaagtataatgagtgtactaccaatctaactaagattattatagtctggttgtttgaaataccatttttttctccttttgtgtttttcccactttccaatgtactcaagaaaattgaacaaatgtaatggatcaatttaaaatattttatttcttaaaagccttttttgcctgttgtaatgtgcaggacccttctcctttcatgggagagacaggtagttacctgaatataggttgaaaaggttatgtaaaaagaaattataataaaagggatactttgcttttcaaa

SEQ ID NO: 296930 - DNA, 4432 bp, Homo sapiens
ggcagggggtggggggggcgccctcggagccgggcggaggggaggggggaaagaggagcgcagggtgagagtgagccgcaggcttcgggaggcgagggggcggggggagcagcgccgaggccgccgcctccgcctccgccgcctaggactagggggtgggggacggacaagccccgatgccgggggagacggaagagccgagacccccggagcagcaggaccaggaagggggagaggcggccaaggcggctccggaggagccccaacaacggccccctgaggcggtcgcggcggcgcctgcagggaccactagcagccgcgtgctgaggggaggtcgggaccgaggccgggccgctgcggccgccgccgccgcagctgtgtcccgccggaggaaggccgagtatccccgccggcggaggagcagccccagcgccaggcctcccgacgtccccgggcagcagccccaggccgcgaagtccccgtctccagttcagggcaagaagagtccgcgactcctatgcatagaaaaagtaacaactgataaagatcccaaggaagaaaaagaggaagaagacgattctgccctccctcaggaagtttccattgctgcatctagacctagccggggctggcgtagtagtaggacatctgtttctcgccatcgtgatacagagaacacccgaagctctcggtccaagaccggttcattgcagctcatttgcaagtcagaaccaaatacagaccaacttgattatgatgttggagaagagcatcagtctccaggtggcattagtagtgaagaggaagaggaggaggaagaagagatgttaatcagtgaagaggagataccattcaaagatgatccaagagatgagacctacaaaccccacttagaaagggaaaccccaaagccacggagaaaatcagggaaggtaaaagaagagaaggagaagaaggaaattaaagtggaagtagaggtggaggtgaaagaagaggagaatgaaattagagaggatgaggaacctccaaggaagagaggaagaagacgaaaagatgacaaaagtccacgtttacccaaaaggagaaaaaagcctccaatccagtatgtccgttgtgagatggaaggatgtggaactgtccttgcccatcctcgctatttgcagcaccacattaaataccagcatttgctgaagaagaaatatgtatgtccccatccctcctgtggacgactcttcaggcttcagaagcaacttctgcgacatgccaaacatcatacagatcaaagggattatatctgtgaatattgtgctcgggccttcaagagttcccacaatctggcagtgcaccggatgattcacactggcgagaagccattacaatgtgagatctgtggatttacttgtcgacaaaaggcatctcttaattggcacatgaagaaacatgatgcagactccttctaccagttttcttgcaatatctgtggcaaaaaatttgagaagaaggacagcgtagtggcacacaaggcaaaaagccaccctgaggtgctgattgcagaagctctggctgccaatgcaggcgccctcatcaccagcacagatatcttgggcactaacccagagtccctgacgcagccttcagatggtcagggtcttcctcttcttcctgagcccttgggaaactcaacctctggagagtgcctactgttagaagctgaagggatgtcaaagtcatactgcagtgggacggaacgggtgagcctgatggctgatgggaagatctttgtgggaagcggcagcagtggaggcactgaagggctggttatgaactcagatatactcggtgctaccacagaggttctgattgaagattcagactctgccggaccttagtggacaggaagacttggggcatgggacagctcagactttgtatttaaaagttaaaaaggacaaaaaaaaaatctaaagcatttaaaatctagtgaaataactgaagggcctgctctttccattgtggatcacagcacacacatacatacaccctccacctccccatcccctgttctccctctgttgctccccttataaaattgatgttgtctttaccagaaaggtagacaaaaaagaagcagcagcagctcttaaagtgagggttattctcatactcggttccagccatcagcagacttcctgctcatcggcagatccccctttccaacctgtcctcagcactaacaaaatcactacaatagcctagtgcttttttggaagcctttttagggaagaatgttaggttcatggtaactagtatgctctttgagatttttacagtgttgaaacttaagaattttgagagggtgaggagggttgttcagaatctaaattacagatagatgattgtttcttgtgaatttgtttcttttcctttttttttgtccctaccatttccttacatttcccttggggcccatctctggctccttgctttttgtttcttgctttgctttatcagttcattccagctccctgttagtgaaggacactgctgttagtgaaggaacaaagtctatgagtcctaaaattttaagtcaaagaaaactgctctgtttcccctttagtaacacttctgaagaggaaaaacttcaatagccaaagttaataatcctatataataattgctttggctttcacctaaaattctgggcatcacaatttccttgggatagaggttgtgttggggaatagattgcttattgctgttcactggagagaaaaggtagtgtttttgtacaaggtcataccgccagaagccccaaatcctattttggctcatcttcaggtaaagagtaattcctatcctgtgtgcctcagaagctagaatcgaaggcttaccctattcattgtttattgtcagaaatgcatgatggctcttggaaagaatgacgttttgctggaaaaaaaaaaaagaacagtttgtgtttcacaaacatggcttatcaattttttcaaagaattcttttttcccaaaaagaggagtaacaaaatgtcatttctgaaagaggcttactttataccaactagtgtcagcatttgggatgccagggaacagagagtgagacacctacaatcaccagtctcaaatgcgctattgtttcttttcagagtgttgcagatttgccatttctccataatatggggatagaaaatggaataaagatagaagggatgtagaatatgctttcctgccaacatggtttggagtcgactttggtatattgactagatttgaaaatacaagattgattagatgaatctacaaaaaagttgtcctcctctcaggtcccttttacactttttgactaactagcatctatattccacacttagcttttttgtcacacttatcctttgtctccgtaaatttcatttgcagtggttagtcatcagatattttagccacctacacaaaagcaaactgcatttttaaaaatctttctgagatgggagaaaatgtattctcctttcctataccgctctcccaacaaaaaaacaactagttagttctactaattagaaacttgctgtactttttcttttcttttaggggtcaaggaccctctttatagctaccatttgcctacaataaattattgcagcagtttgcaatactaaaatattttttatagactttatatttttccttttgataaagggatgctgcatagtagagttggtgtaattaaactatctcagccgtttccctgctttcccttctgctccatatgcctcattgtccttccagggagctcttttaatcttaaagttctacatttcatgctcttagtcaaattctgttacctttttaataactcttcccactgcatatttccatcttgaattggtggttctaaattctgaaactgtagttgagatacagctatttaatatttctgggagatgtgcatccctcttctttgtggttgcccaaggttgttttgcgtaactgagactccttgatatgcttcagagaatttaggcaaacactggccatggccgtgggagtactgggagtaaaataaaaatatcgaggtatagactagcatccacatagagcacttgaacctcctttgtacctgtttggggaaaaagtataatgagtgtactaccaatctaactaagattattatagtctggttgtttgaaataccatttttttctccttttgtgtttttcccactttccaatgtactcaagaaaattgaacaaatgtaatggatcaatttaaaatattttatttcttaaaagccttttttgcctgttgtaatgtgcaggacccttctcctttcatgggagagacaggtagttacctgaatataggttgaaaaggttatgtaaaaagaaattataataaaagggatactttgcttttcaaa

SEQ ID NO: 296931 - DNA, 5693 bp, Homo sapiens
ggcagggggtggggggggcgccctcggagccgggcggaggggaggggggaaagaggagcgcagggtgagagtgagccgcaggcttcgggaggcgagggggcggggggagcagcgccgaggccgccgcctccgcctccgccgcctaggactagggggtgggggacggacaagccccgatgccgggggagacggaagagccgagacccccggagcagcaggaccaggaagggggagaggcggccaaggcggctccggaggagccccaacaacggccccctgaggcggtcgcggcggcgcctgcagggaccactagcagccgcgtgctgaggggaggtcgggaccgaggccgggccgctgcggccgccgccgccgcagctgtgtcccgccggaggaaggccgagtatccccgccggcggaggagcagccccagcgccaggcctcccgacgtccccgggcagcagccccaggccgcgaagtccccgtctccagttcagggcaagaagagtccgcgactcctatgcatagaaaaagtaacaactgataaagatcccaaggaagaaaaagaggaagaagacgattctgccctccctcaggaagtttccattgctgcatctagacctagccggggctggcgtagtagtaggacatctgtttctcgccatcgtgatacagagaacacccgaagctctcggtccaagaccggttcattgcagctcatttgcaagtcagaaccaaatacagaccaacttgattatgatgttggagaagagcatcagtctccaggtggcattagtagtgaagaggaagaggaggaggaagaagagatgttaatcagtgaagaggagataccattcaaagatgatccaagagatgagacctacaaaccccacttagaaaggcatgtctcagattttactgcagacatgttaatgaaatataagtaggaaagcactgttgcatgcttttattttatctgttgccaagctaatgggtatagaattaattttaaatgagtaattattatgcacttcttttgtaagtctaacaccttaatataccctgataataatcctctttcccatttgtagaactttattttgattatatacaagtttttatgagtctgcatgttttatttcaacaaggtatcatgaattgcctgaatacttagaattttttaactaattgtctcgtttctctttacaattatagtgaaatttgatttacaggcatctttagtctggggagggttcattccatgagcaacatatacatatatttggatcattactatgcatgtgaggatgattggtaggaaatcacatttcatgaactgaggaaggtagttttataacaaatcagtgataactctaagctttaatttgttgtcatagtcttccttgaaaagatcttttgtctagtattgaaatgcatttgtgttttcagggaaaccccaaagccacggagaaaatcagggaaggtaaaagaagagaaggagaagaaggaaattaaagtggaagtagaggtggaggtgaaagaagaggagaatgaaattagagaggatgaggaacctccaaggaagagaggaagaagacgaaaagatgacaaaagtccacgtttacccaaaaggagaaaaaagcctccaatccagtatgtccgttgtgagatggaaggatgtggaactgtccttgcccatcctcgctatttgcagcaccacattaaataccagcatttgctgaagaagaaatatgtatgtccccatccctcctgtggacgactcttcaggcttcagaagcaacttctgcgacatgccaaacatcatacagatcaaagggattatatctgtgaatattgtgctcgggccttcaagagttcccacaatctggcagtgcaccggatgattcacactggcgagaagccattacaatgtgagatctgtggatttacttgtcgacaaaaggcatctcttaattggcacatgaagaaacatgatgcagactccttctaccagttttcttgcaatatctgtggcaaaaaatttgagaagaaggacagcgtagtggcacacaaggcaaaaagccaccctgaggtgctgattgcagaagctctggctgccaatgcaggcgccctcatcaccagcacagatatcttgggcactaacccagagtccctgacgcagccttcagatggtcagggtcttcctcttcttcctgagcccttgggaaactcaacctctggagagtgcctactgttagaagctgaagggatgtcaaagtcatactgcagtgggacggaacgggtgagcctgatggctgatgggaagatctttgtgggaagcggcagcagtggaggcactgaagggctggttatgaactcagatatactcggtgctaccacagaggttctgattgaagattcagactctgccggaccttagtggacaggaagacttggggcatgggacagctcagactttgtatttaaaagttaaaaaggacaaaaaaaaaatctaaagcatttaaaatctagtgaaataactgaagggcctgctctttccattgtggatcacagcacacacatacatacaccctccacctccccatcccctgttctccctctgttgctccccttataaaattgatgttgtctttaccagaaaggtagacaaaaaagaagcagcagcagctcttaaagtgagggttattctcatactcggttccagccatcagcagacttcctgctcatcggcagatccccctttccaacctgtaactctgatgtgctctggatcagcttttaacttttaatcatatattactgtcttctaaatcccttctcctcctctactgctgccctatggttctggctcctaccccctgcggcacacttatcttcaaataccatagaattctaatctctggaggctggcagcttgacttggcactttagggccccttagcagggtgagctgttaaaacagcacacatctctcatcccctcttcctttattcccccctgggtttcagaaaggaaggatatatggggaccacctcccccttctttgatcccagcatctcagtccccctcccaaccctccatatggctctcaatggtgctcacttgcttggaagcaggctcccaatagggagggggctgccctctacagtctctttgactgtaagacagggctctgtatcagtgagacgatgagaaaagtcccaggctaatggcagaaatttgcactttgaacatgtgtgtttttgtgttgtggaacctgagattccttatttattaacaggaagtctgattttttttttttggagtctttgttgctatattttgtggggctgggagagagagattagattattttgacatgggatcccttccataacaggtactttgaaggcaagacatagggttgaagaagcacagccagcctctgaaatcatagctctccagtggcttttaaagaaagctggtcctcagcactaacaaaatcactacaatagcctagtgcttttttggaagcctttttagggaagaatgttaggttcatggtaactagtatgctctttgagatttttacagtgttgaaacttaagaattttgagagggtgaggagggttgttcagaatctaaattacagatagatgattgtttcttgtgaatttgtttcttttcctttttttttgtccctaccatttccttacatttcccttggggcccatctctggctccttgctttttgtttcttgctttgctttatcagttcattccagctccctgttagtgaaggacactgctgttagtgaaggaacaaagtctatgagtcctaaaattttaagtcaaagaaaactgctctgtttcccctttagtaacacttctgaagaggaaaaacttcaatagccaaagttaataatcctatataataattgctttggctttcacctaaaattctgggcatcacaatttccttgggatagaggttgtgttggggaatagattgcttattgctgttcactggagagaaaaggtagtgtttttgtacaaggtcataccgccagaagccccaaatcctattttggctcatcttcaggtaaagagtaattcctatcctgtgtgcctcagaagctagaatcgaaggcttaccctattcattgtttattgtcagaaatgcatgatggctcttggaaagaatgacgttttgctggaaaaaaaaaaaagaacagtttgtgtttcacaaacatggcttatcaattttttcaaagaattcttttttcccaaaaagaggagtaacaaaatgtcatttctgaaagaggcttactttataccaactagtgtcagcatttgggatgccagggaacagagagtgagacacctacaatcaccagtctcaaatgcgctattgtttcttttcagagtgttgcagatttgccatttctccataatatggggatagaaaatggaataaagatagaagggatgtagaatatgctttcctgccaacatggtttggagtcgactttggtatattgactagatttgaaaatacaagattgattagatgaatctacaaaaaagttgtcctcctctcaggtcccttttacactttttgactaactagcatctatattccacacttagcttttttgtcacacttatcctttgtctccgtaaatttcatttgcagtggttagtcatcagatattttagccacctacacaaaagcaaactgcatttttaaaaatctttctgagatgggagaaaatgtattctcctttcctataccgctctcccaacaaaaaaacaactagttagttctactaattagaaacttgctgtactttttcttttcttttaggggtcaaggaccctctttatagctaccatttgcctacaataaattattgcagcagtttgcaatactaaaatattttttatagactttatatttttccttttgataaagggatgctgcatagtagagttggtgtaattaaactatctcagccgtttccctgctttcccttctgctccatatgcctcattgtccttccagggagctcttttaatcttaaagttctacatttcatgctcttagtcaaattctgttacctttttaataactcttcccactgcatatttccatcttgaattggtggttctaaattctgaaactgtagttgagatacagctatttaatatttctgggagatgtgcatccctcttctttgtggttgcccaaggttgttttgcgtaactgagactccttgatatgcttcagagaatttaggcaaacactggccatggccgtgggagtactgggagtaaaataaaaatatcgaggtatagactagcatccacatagagcacttgaacctcctttgtacctgtttggggaaaaagtataatgagtgtactaccaatctaactaagattattatagtctggttgtttgaaataccatttttttctccttttgtgtttttcccactttccaatgtactcaagaaaattgaacaaatgtaatggatcaatttaaaatattttatttcttaaaagccttttttgcctgttgtaatgtgcaggacccttctcctttcatgggagagacaggtagttacctgaatataggttgaaaaggttatgtaaaaagaaattataataaaagggatactttgcttttcaaa

SEQ ID NO: 296932 - DNA, 5091 bp, Homo sapiens
ggcagggggtggggggggcgccctcggagccgggcggaggggaggggggaaagaggagcgcagggtgagagtgagccgcaggcttcgggaggcgagggggcggggggagcagcgccgaggccgccgcctccgcctccgccgcctaggactagggggtgggggacggacaagccccgatgccgggggagacggaagagccgagacccccggagcagcaggaccaggaagggggagaggcggccaaggcggctccggaggagccccaacaacggccccctgaggcggtcgcggcggcgcctgcagggaccactagcagccgcgtgctgaggggaggtcgggaccgaggccgggccgctgcggccgccgccgccgcagctgtgtcccgccggaggaaggccgagtatccccgccggcggaggagcagccccagcgccaggcctcccgacgtccccgggcagcagccccaggccgcgaagtccccgtctccagttcagggcaagaagagtccgcgactcctatgcatagaaaaagtaacaactgataaagatcccaaggaagaaaaagaggaagaagacgattctgccctccctcaggaagtttccattgctgcatctagacctagccggggctggcgtagtagtaggacatctgtttctcgccatcgtgatacagagaacacccgaagctctcggtccaagaccggttcattgcagctcatttgcaagtcagaaccaaatacagaccaacttgattatgatgttggagaagagcatcagtctccaggtggcattagtagtgaagaggaagaggaggaggaagaagagatgttaatcagtgaagaggagataccattcaaagatgatccaagagatgagacctacaaaccccacttagaaagggaaaccccaaagccacggagaaaatcagggaaggtaaaagaagagaaggagaagaaggaaattaaagtggaagtagaggtggaggtgaaagaagaggagaatgaaattagagaggatgaggaacctccaaggaagagaggaagaagacgaaaagatgacaaaagtccacgtttacccaaaaggagaaaaaagcctccaatccagtatgtccgttgtgagatggaaggatgtggaactgtccttgcccatcctcgctatttgcagcaccacattaaataccagcatttgctgaagaagaaatatgtatgtccccatccctcctgtggacgactcttcaggcttcagaagcaacttctgcgacatgccaaacatcatacagatcaaagggattatatctgtgaatattgtgctcgggccttcaagagttcccacaatctggcagtgcaccggatgattcacactggcgagaagccattacaatgtgagatctgtggatttacttgtcgacaaaaggcatctcttaattggcacatgaagaaacatgatgcagactccttctaccagttttcttgcaatatctgtggcaaaaaatttgagaagaaggacagcgtagtggcacacaaggcaaaaagccaccctgaggtgctgattgcagaagctctggctgccaatgcaggcgccctcatcaccagcacagatatcttgggcactaacccagagtccctgacgcagccttcagatggtcagggtcttcctcttcttcctgagcccttgggaaactcaacctctggagagtgcctactgttagaagctgaagggatgtcaaagtcatactgcagtgggacggaacgggtgagcctgatggctgatgggaagatctttgtgggaagcggcagcagtggaggcactgaagggctggttatgaactcagatatactcggtgctaccacagaggttctgattgaagattcagactctgccggaccttagtggacaggaagacttggggcatgggacagctcagactttgtatttaaaagttaaaaaggacaaaaaaaaaatctaaagcatttaaaatctagtgaaataactgaagggcctgctctttccattgtggatcacagcacacacatacatacaccctccacctccccatcccctgttctccctctgttgctccccttataaaattgatgttgtctttaccagaaaggtagacaaaaaagaagcagcagcagctcttaaagtgagggttattctcatactcggttccagccatcagcagacttcctgctcatcggcagatccccctttccaacctgtaactctgatgtgctctggatcagcttttaacttttaatcatatattactgtcttctaaatcccttctcctcctctactgctgccctatggttctggctcctaccccctgcggcacacttatcttcaaataccatagaattctaatctctggaggctggcagcttgacttggcactttagggccccttagcagggtgagctgttaaaacagcacacatctctcatcccctcttcctttattcccccctgggtttcagaaaggaaggatatatggggaccacctcccccttctttgatcccagcatctcagtccccctcccaaccctccatatggctctcaatggtgctcacttgcttggaagcaggctcccaatagggagggggctgccctctacagtctctttgactgtaagacagggctctgtatcagtgagacgatgagaaaagtcccaggctaatggcagaaatttgcactttgaacatgtgtgtttttgtgttgtggaacctgagattccttatttattaacaggaagtctgattttttttttttggagtctttgttgctatattttgtggggctgggagagagagattagattattttgacatgggatcccttccataacaggtactttgaaggcaagacatagggttgaagaagcacagccagcctctgaaatcatagctctccagtggcttttaaagaaagctggtcctcagcactaacaaaatcactacaatagcctagtgcttttttggaagcctttttagggaagaatgttaggttcatggtaactagtatgctctttgagatttttacagtgttgaaacttaagaattttgagagggtgaggagggttgttcagaatctaaattacagatagatgattgtttcttgtgaatttgtttcttttcctttttttttgtccctaccatttccttacatttcccttggggcccatctctggctccttgctttttgtttcttgctttgctttatcagttcattccagctccctgttagtgaaggacactgctgttagtgaaggaacaaagtctatgagtcctaaaattttaagtcaaagaaaactgctctgtttcccctttagtaacacttctgaagaggaaaaacttcaatagccaaagttaataatcctatataataattgctttggctttcacctaaaattctgggcatcacaatttccttgggatagaggttgtgttggggaatagattgcttattgctgttcactggagagaaaaggtagtgtttttgtacaaggtcataccgccagaagccccaaatcctattttggctcatcttcaggtaaagagtaattcctatcctgtgtgcctcagaagctagaatcgaaggcttaccctattcattgtttattgtcagaaatgcatgatggctcttggaaagaatgacgttttgctggaaaaaaaaaaaagaacagtttgtgtttcacaaacatggcttatcaattttttcaaagaattcttttttcccaaaaagaggagtaacaaaatgtcatttctgaaagaggcttactttataccaactagtgtcagcatttgggatgccagggaacagagagtgagacacctacaatcaccagtctcaaatgcgctattgtttcttttcagagtgttgcagatttgccatttctccataatatggggatagaaaatggaataaagatagaagggatgtagaatatgctttcctgccaacatggtttggagtcgactttggtatattgactagatttgaaaatacaagattgattagatgaatctacaaaaaagttgtcctcctctcaggtcccttttacactttttgactaactagcatctatattccacacttagcttttttgtcacacttatcctttgtctccgtaaatttcatttgcagtggttagtcatcagatattttagccacctacacaaaagcaaactgcatttttaaaaatctttctgagatgggagaaaatgtattctcctttcctataccgctctcccaacaaaaaaacaactagttagttctactaattagaaacttgctgtactttttcttttcttttaggggtcaaggaccctctttatagctaccatttgcctacaataaattattgcagcagtttgcaatactatagagttggtgtaattaaactatctcagccgtttccctgctttcccttctgctccatatgcctcattgtccttccagggagctcttttaatcttaaagttctacatttcatgctcttagtcaaattctgttacctttttaataactcttcccactgcatatttccatcttgaattggtggttctaaattctgaaactgtagttgagatacagctatttaatatttctgggagatgtgcatccctcttctttgtggttgcccaaggttgttttgcgtaactgagactccttgatatgcttcagagaatttaggcaaacactggccatggccgtgggagtactgggagtaaaataaaaatatcgaggtatagactagcatccacatagagcacttgaacctcctttgtacctgtttggggaaaaagtataatgagtgtactaccaatctaactaagattattatagtctggttgtttgaaataccatttttttctccttttgtgtttttcccactttccaatgtactcaagaaaattgaacaaatgtaatggatcaatttaaaatattttatttcttaaaagccttttttgcctgttgtaatgtgcaggacccttctcctttcatgggagagacaggtagttacctgaatataggttgaaaaggttatgtaaaaagaaattataataaaagggatactttgcttttcaaa

SEQ ID NO: 296933 - DNA, 6063 bp, Homo sapiens
ggcagggggtggggggggcgccctcggagccgggcggaggggaggggggaaagaggagcgcagggtgagagtgagccgcaggcttcgggaggcgagggggcggggggagcagcgccgaggccgccgcctccgcctccgccgcctaggactagggggtgggggacggacaagccccgatgccgggggagacggaagagccgagacccccggagcagcaggaccaggaagggggagaggcggccaaggcggctccggaggagccccaacaacggccccctgaggcggtcgcggcggcgcctgcagggaccactagcagccgcgtgctgaggggaggtcgggaccgaggccgggccgctgcggccgccgccgccgcagctgtgtcccgccggaggaaggccgagtatccccgccggcggaggagcagccccagcgccaggcctcccgacgtccccgggcagcagccccaggccgcgaagtccccgtctccagttcagggcaagaagagtccgcgactcctatgcatagaaaaagtaacaactgataaagatcccaaggaagaaaaagaggaagaagacgattctgccctccctcaggaagtttccattgctgcatctagacctagccggggctggcgtagtagtaggacatctgtttctcgccatcgtgatacagagaacacccgaagctctcggtccaagaccggttcattgcagctcatttgcaagtcagaaccaaatacagaccaacttgattatgatgttggagaagagcatcagtctccaggtggcattagtagtgaagaggaagaggaggaggaagaagagatgttaatcagtgaagaggagataccattcaaagatgatccaagagatgagacctacaaaccccacttagaaagggaaaccccaaagccacggagaaaatcagggaaggtaaaagaagagaaggagaagaaggaaattaaagtggaagtagaggtggaggtgaaagaagaggagaatgaaattagagaggatgaggaacctccaaggaagagaggaagaagacgaaaagatgacaaaagtccacgtttacccaaaaggagaaaaaagcctccaatccagtatgtccgttgtgagatggaaggatgtggaactgtccttgcccatcctcgctatttgcagcaccacattaaataccagcatttgctgaagaagaaatatgtatgtccccatccctcctgtggacgactcttcaggcttcagaagcaacttctgcgacatgccaaacatcatacagatcaaagggattatatctgtgaatattgtgctcgggccttcaagagttcccacaatctggcagtgcaccggatgattcacactggcgagaagccattacaatgtgagatctgtggatttacttgtcgacaaaaggcatctcttaattggcacatgaagaaacatgatgcagactccttctaccagttttcttgcaatatctgtggcaaaaaatttgagaagaaggacagcgtagtggcacacaaggcaaaaagccaccctgaggtgctgattgcagaagctctggctgccaatgcaggcgccctcatcaccagcacagatatcttgggcactaacccagagtccctgacgcagccttcagatggtcagggtcttcctcttcttcctgagcccttgggaaactcaacctctggagagtgcctactgttagaagctgaagggatgtcaaagtcatactgcagtgggacggaacgggtgagcctgatggctgatgggaagatctttgtgggaagcggcagcagtggaggcactgaagggctggttatgaactcagatatactcggtgctaccacagaggttctgattgaagattcagactctgccggaccttagtggacaggaagacttggggcatgggacagctcagactttgtatttaaaagttaaaaaggacaaaaaaaaaatctaaagcatttaaaatctagtgaaataactgaagggcctgctctttccattgtggatcacagcacacacatacatacaccctccacctccccatcccctgttctccctctgttgctccccttataaaattgatgttgtctttaccagaaaggtagacaaaaaagaagcagcagcagctcttaaagtgagggttattctcatactcggttccagccatcagcagacttcctgctcatcggcagatccccctttccaacctgtaactctgatgtgctctggatcagcttttaacttttaatcatatattactgtcttctaaatcccttctcctcctctactgctgccctatggttctggctcctaccccctgcggcacacttatcttcaaataccatagaattctaatctctggaggctggcagcttgacttggcactttagggccccttagcagggtgagctgttaaaacagcacacatctctcatcccctcttcctttattcccccctgggtttcagaaaggaaggatatatggggaccacctcccccttctttgatcccagcatctcagtccccctcccaaccctccatatggctctcaatggtgctcacttgcttggaagcaggctcccaatagggagggggctgccctctacagtctctttgactgtaagacagggctctgtatcagtgagacgatgagaaaagtcccaggctaatggcagaaatttgcactttgaacatgtgtgtttttgtgttgtggaacctgagattccttatttattaacaggaagtctgattttttttttttggagtctttgttgctatattttgtggggctgggagagagagattagattattttgacatgggatcccttccataacaggtactttgaaggcaagacatagggttgaagaagcacagccagcctctgaaatcatagctctccagtggcttttaaagaaagctggtcctcagcactaacaaaatcactacaatagcctagtgcttttttggaagcctttttagggaagaatgttaggttcatggtaactagtatgctctttgagatttttacagtgttgaaacttaagaattttgagagggtgaggagggttgttcagaatctaaattacagatagatgattgtttcttgtgaatttgtttcttttcctttttttttgtccctaccatttccttacatttcccttggggcccatctctggctccttgctttttgtttcttgctttgctttatcagttcattccagctccctgttagtgaaggacactgctgttagtgaaggaacaaagtctatgagtcctaaaattttaagtcaaagaaaactgctctgtttcccctttagtaacacttctgaagaggaaaaacttcaatagccaaagttaataatcctatataataattgctttggctttcacctaaaattctgggcatcacaatttccttgggatagaggttgtgttggggaatagattgcttattgctgttcactggagagaaaaggtagtgtttttgtacaaggtcataccgccagaagccccaaatcctattttggctcatcttcaggtaaagagtaattcctatcctgtgtgcctcagaagctagaatcgaaggcttaccctattcattgtttattgtcagaaatgcatgatggctcttggaaagaatgacgttttgctggaaaaaaaaaaaagaacagtttgtgtttcacaaacatggcttatcaattttttcaaagaattcttttttcccaaaaagaggagtaacaaaatgtcatttctgaaagaggcttactttataccaactagtgtcagcatttgggatgccagggaacagagagtgagacacctacaatcaccagtctcaaatgcgctattgtttcttttcagagtgttgcagatttgccatttctccataatatggggatagaaaatggaataaagatagaagggatgtagaatatgctttcctgccaacatggtttggagtcgactttggtatattgactagatttgaaaatacaagattgattagatgaatctacaaaaaagttgtcctcctctcaggtcccttttacactttttgactaactagcatctatattccacacttagcttttttgtcacacttatcctttgtctccgtaaatttcatttgcagtggttagtcatcagatattttagccacctacacaaaagcaaactgcatttttaaaaatctttctgagatgggagaaaatgtattctcctttcctataccgctctcccaacaaaaaaacaactagttagttctactaattagaaacttgctgtactttttcttttcttttaggggtcaaggaccctctttatagctaccatttgcctacaataaattattgcagcagtttgcaatactaaaatattttttatagactttatatttttccttttgataaagggatgctgcatagtagagttggtgtaattaaactatctcagccgtttccctgctttcccttctgctccatatgcctcattgtccttccagggagctcttttaatcttaaagttctacatttcatgctcttagtcaaattctgttacctttttaataactcttcccactgcatatttccatcttgaattggtggttctaaattctgaaactgtagttgagatacagctatttaatatttctgggagatgtgcatccctcttctttgtggttgcccaaggttgttttgcgtaactgagactccttgatatgcttcagagaatttaggcaaacactggccatggccgtgggagtactgggagtaaaataaaaatatcgaggtatagactagcatccacatagagcacttgaacctcctttgtacctgtttggggaaaaagtataatgagtgtactaccaatctaactaagattattatagtctggttgtttgaaataccatttttttctccttttgtgtttttcccactttccaatgtactcaagaaaattgaacaaatgtaatggatcaatttaaaatattttatttcttaaaagccttttttgcctgttgtaatgtgcaggacccttctcctttcatgggagagacaggtagttacctgaatataggttgaaaaggttatgtaaaaagaaattataataaaagggatactttgcttttcaaaaaaaaaaaaaaaaaaaaaaaaaaaaaaaaaaaaaaaaaaaaaaaaaaaaaaaaaaaaaaaaaaaaaaacaaaaaaaaaaaaaaaaaaaaaaaaaaaaaaaaagaagagagagcgagagaggagactatagctactaatcacagcaagagcacagacacagagaatacacacagcaaaaaaaaaagacgatgagagagagagagagataagaacaagacaagaaaccaaggaaaaaaagaagacagaggcgagcggagaaagaagaaaggaaaaaaaagagagaggaagagaagagagggagacgaagaaagaaaaaagtatcgagccacacagggacaacaaaacaaaaaaagatagtggagacggagagaagacgaaacacacggaagaagagcaacaaacgaagaggatgaaaaggaaaagaaaacaaaacacgatgatcaagaaataaaaacaagaatatcagaacaagataaacggacagaagaaaggaagagacacgaagacaagaacaaagaatgcgaaagaaacgagaaacagaaaagagaaggcaaagaagaccaaacgaagagagaaccaagatagggggcagcaatgagaaaagaaatagaacaaagaagaagagcgagaagggagcaagaaaaccagaaacaacgaaaggaggaaacggagagactgaggaggaagggagagaaaaaaaagagaagaagggaaagacaatagaaagcaagagagaaaaagacaggtcgagaagacagaagcacagacgaagagaacaaagcagagataaaggaagagagaggacaggacgatcgatcaacgaagtgagcgcgaagagacagcaaagacaccaagagcaaagcagcgaacgcacacagcagacaggacggagcccgcgacaccgagcaaagcacacaa

SEQ ID NO: 296934 - DNA, 4740 bp, Homo sapiens
agcattttagcttggcaaacttgtttcatcagtatctgggcctggtactatgctgaactaggtggtagaaagaaaaatgagacatggccctcatcttcaaggaccttggggtatgcatagaaaaagtaacaactgataaagatcccaaggaagaaaaagaggaagaagacgattctgccctccctcaggaagtttccattgctgcatctagacctagccggggctggcgtagtagtaggacatctgtttctcgccatcgtgatacagagaacacccgaagctctcggtccaagaccggttcattgcagctcatttgcaagtcagaaccaaatacagaccaacttgattatgatgttggagaagagcatcagtctccaggtggcattagtagtgaagaggaagaggaggaggaagaagagatgttaatcagtgaagaggagataccattcaaagatgatccaagagatgagacctacaaaccccacttagaaagggaaaccccaaagccacggagaaaatcagggaaggtaaaagaagagaaggagaagaaggaaattaaagtggaagtagaggtggaggtgaaagaagaggagaatgaaattagagaggatgaggaacctccaaggaagagaggaagaagacgaaaagatgacaaaagtccacgtttacccaaaaggagaaaaaagcctccaatccagtatgtccgttgtgagatggaaggatgtggaactgtccttgcccatcctcgctatttgcagcaccacattaaataccagcatttgctgaagaagaaatatgtatgtccccatccctcctgtggacgactcttcaggcttcagaagcaacttctgcgacatgccaaacatcatacagatcaaagggattatatctgtgaatattgtgctcgggccttcaagagttcccacaatctggcagtgcaccggatgattcacactggcgagaagccattacaatgtgagatctgtggatttacttgtcgacaaaaggcatctcttaattggcacatgaagaaacatgatgcagactccttctaccagttttcttgcaatatctgtggcaaaaaatttgagaagaaggacagcgtagtggcacacaaggcaaaaagccaccctgaggtgctgattgcagaagctctggctgccaatgcaggcgccctcatcaccagcacagatatcttgggcactaacccagagtccctgacgcagccttcagatggtcagggtcttcctcttcttcctgagcccttgggaaactcaacctctggagagtgcctactgttagaagctgaagggatgtcaaagtcatactgcagtgggacggaacgggtgagcctgatggctgatgggaagatctttgtgggaagcggcagcagtggaggcactgaagggctggttatgaactcagatatactcggtgctaccacagaggttctgattgaagattcagactctgccggaccttagtggacaggaagacttggggcatgggacagctcagactttgtatttaaaagttaaaaaggacaaaaaaaaaatctaaagcatttaaaatctagtgaaataactgaagggcctgctctttccattgtggatcacagcacacacatacatacaccctccacctccccatcccctgttctccctctgttgctccccttataaaattgatgttgtctttaccagaaaggtagacaaaaaagaagcagcagcagctcttaaagtgagggttattctcatactcggttccagccatcagcagacttcctgctcatcggcagatccccctttccaacctgtaactctgatgtgctctggatcagcttttaacttttaatcatatattactgtcttctaaatcccttctcctcctctactgctgccctatggttctggctcctaccccctgcggcacacttatcttcaaataccatagaattctaatctctggaggctggcagcttgacttggcactttagggccccttagcagggtgagctgttaaaacagcacacatctctcatcccctcttcctttattcccccctgggtttcagaaaggaaggatatatggggaccacctcccccttctttgatcccagcatctcagtccccctcccaaccctccatatggctctcaatggtgctcacttgcttggaagcaggctcccaatagggagggggctgccctctacagtctctttgactgtaagacagggctctgtatcagtgagacgatgagaaaagtcccaggctaatggcagaaatttgcactttgaacatgtgtgtttttgtgttgtggaacctgagattccttatttattaacaggaagtctgattttttttttttggagtctttgttgctatattttgtggggctgggagagagagattagattattttgacatgggatcccttccataacaggtactttgaaggcaagacatagggttgaagaagcacagccagcctctgaaatcatagctctccagtggcttttaaagaaagctggtcctcagcactaacaaaatcactacaatagcctagtgcttttttggaagcctttttagggaagaatgttaggttcatggtaactagtatgctctttgagatttttacagtgttgaaacttaagaattttgagagggtgaggagggttgttcagaatctaaattacagatagatgattgtttcttgtgaatttgtttcttttcctttttttttgtccctaccatttccttacatttcccttggggcccatctctggctccttgctttttgtttcttgctttgctttatcagttcattccagctccctgttagtgaaggacactgctgttagtgaaggaacaaagtctatgagtcctaaaattttaagtcaaagaaaactgctctgtttcccctttagtaacacttctgaagaggaaaaacttcaatagccaaagttaataatcctatataataattgctttggctttcacctaaaattctgggcatcacaatttccttgggatagaggttgtgttggggaatagattgcttattgctgttcactggagagaaaaggtagtgtttttgtacaaggtcataccgccagaagccccaaatcctattttggctcatcttcaggtaaagagtaattcctatcctgtgtgcctcagaagctagaatcgaaggcttaccctattcattgtttattgtcagaaatgcatgatggctcttggaaagaatgacgttttgctggaaaaaaaaaaaagaacagtttgtgtttcacaaacatggcttatcaattttttcaaagaattcttttttcccaaaaagaggagtaacaaaatgtcatttctgaaagaggcttactttataccaactagtgtcagcatttgggatgccagggaacagagagtgagacacctacaatcaccagtctcaaatgcgctattgtttcttttcagagtgttgcagatttgccatttctccataatatggggatagaaaatggaataaagatagaagggatgtagaatatgctttcctgccaacatggtttggagtcgactttggtatattgactagatttgaaaatacaagattgattagatgaatctacaaaaaagttgtcctcctctcaggtcccttttacactttttgactaactagcatctatattccacacttagcttttttgtcacacttatcctttgtctccgtaaatttcatttgcagtggttagtcatcagatattttagccacctacacaaaagcaaactgcatttttaaaaatctttctgagatgggagaaaatgtattctcctttcctataccgctctcccaacaaaaaaacaactagttagttctactaattagaaacttgctgtactttttcttttcttttaggggtcaaggaccctctttatagctaccatttgcctacaataaattattgcagcagtttgcaatactaaaatattttttatagactttatatttttccttttgataaagggatgctgcatagtagagttggtgtaattaaactatctcagccgtttccctgctttcccttctgctccatatgcctcattgtccttccagggagctcttttaatcttaaagttctacatttcatgctcttagtcaaattctgttacctttttaataactcttcccactgcatatttccatcttgaattggtggttctaaattctgaaactgtagttgagatacagctatttaatatttctgggagatgtgcatccctcttctttgtggttgcccaaggttgttttgcgtaactgagactccttgatatgcttcagagaatttaggcaaacactggccatggccgtgggagtactgggagtaaaataaaaatatcgaggtatagactagcatccacatagagcacttgaacctcctttgtacctgtttggggaaaaagtataatgagtgtactaccaatctaactaagattattatagtctggttgtttgaaataccatttttttctccttttgtgtttttcccactttccaatgtactcaagaaaattgaacaaatgtaatggatcaatttaaaatattttatttcttaaaagccttttttgcctgttgtaatgtgcaggacccttctcctttcatgggagagacaggtagttacctgaatataggttgaaaaggttatgtaaaaagaaattataataaaagggatactttgcttttcaaa

SEQ ID NO: 296935 - DNA, 4780 bp, Homo sapiens
agcattttagcttggcaaacttgtttcatcagtatctgggcctggtactatgctgaactaggtggtagaaagaaaaatgagacatggccctcatcttcaaggaccttggggtgtaaggcaaagatgcattaattagtggagatatgtcaaatatgcatagaaaaagtaacaactgataaagatcccaaggaagaaaaagaggaagaagacgattctgccctccctcaggaagtttccattgctgcatctagacctagccggggctggcgtagtagtaggacatctgtttctcgccatcgtgatacagagaacacccgaagctctcggtccaagaccggttcattgcagctcatttgcaagtcagaaccaaatacagaccaacttgattatgatgttggagaagagcatcagtctccaggtggcattagtagtgaagaggaagaggaggaggaagaagagatgttaatcagtgaagaggagataccattcaaagatgatccaagagatgagacctacaaaccccacttagaaagggaaaccccaaagccacggagaaaatcagggaaggtaaaagaagagaaggagaagaaggaaattaaagtggaagtagaggtggaggtgaaagaagaggagaatgaaattagagaggatgaggaacctccaaggaagagaggaagaagacgaaaagatgacaaaagtccacgtttacccaaaaggagaaaaaagcctccaatccagtatgtccgttgtgagatggaaggatgtggaactgtccttgcccatcctcgctatttgcagcaccacattaaataccagcatttgctgaagaagaaatatgtatgtccccatccctcctgtggacgactcttcaggcttcagaagcaacttctgcgacatgccaaacatcatacagatcaaagggattatatctgtgaatattgtgctcgggccttcaagagttcccacaatctggcagtgcaccggatgattcacactggcgagaagccattacaatgtgagatctgtggatttacttgtcgacaaaaggcatctcttaattggcacatgaagaaacatgatgcagactccttctaccagttttcttgcaatatctgtggcaaaaaatttgagaagaaggacagcgtagtggcacacaaggcaaaaagccaccctgaggtgctgattgcagaagctctggctgccaatgcaggcgccctcatcaccagcacagatatcttgggcactaacccagagtccctgacgcagccttcagatggtcagggtcttcctcttcttcctgagcccttgggaaactcaacctctggagagtgcctactgttagaagctgaagggatgtcaaagtcatactgcagtgggacggaacgggtgagcctgatggctgatgggaagatctttgtgggaagcggcagcagtggaggcactgaagggctggttatgaactcagatatactcggtgctaccacagaggttctgattgaagattcagactctgccggaccttagtggacaggaagacttggggcatgggacagctcagactttgtatttaaaagttaaaaaggacaaaaaaaaaatctaaagcatttaaaatctagtgaaataactgaagggcctgctctttccattgtggatcacagcacacacatacatacaccctccacctccccatcccctgttctccctctgttgctccccttataaaattgatgttgtctttaccagaaaggtagacaaaaaagaagcagcagcagctcttaaagtgagggttattctcatactcggttccagccatcagcagacttcctgctcatcggcagatccccctttccaacctgtaactctgatgtgctctggatcagcttttaacttttaatcatatattactgtcttctaaatcccttctcctcctctactgctgccctatggttctggctcctaccccctgcggcacacttatcttcaaataccatagaattctaatctctggaggctggcagcttgacttggcactttagggccccttagcagggtgagctgttaaaacagcacacatctctcatcccctcttcctttattcccccctgggtttcagaaaggaaggatatatggggaccacctcccccttctttgatcccagcatctcagtccccctcccaaccctccatatggctctcaatggtgctcacttgcttggaagcaggctcccaatagggagggggctgccctctacagtctctttgactgtaagacagggctctgtatcagtgagacgatgagaaaagtcccaggctaatggcagaaatttgcactttgaacatgtgtgtttttgtgttgtggaacctgagattccttatttattaacaggaagtctgattttttttttttggagtctttgttgctatattttgtggggctgggagagagagattagattattttgacatgggatcccttccataacaggtactttgaaggcaagacatagggttgaagaagcacagccagcctctgaaatcatagctctccagtggcttttaaagaaagctggtcctcagcactaacaaaatcactacaatagcctagtgcttttttggaagcctttttagggaagaatgttaggttcatggtaactagtatgctctttgagatttttacagtgttgaaacttaagaattttgagagggtgaggagggttgttcagaatctaaattacagatagatgattgtttcttgtgaatttgtttcttttcctttttttttgtccctaccatttccttacatttcccttggggcccatctctggctccttgctttttgtttcttgctttgctttatcagttcattccagctccctgttagtgaaggacactgctgttagtgaaggaacaaagtctatgagtcctaaaattttaagtcaaagaaaactgctctgtttcccctttagtaacacttctgaagaggaaaaacttcaatagccaaagttaataatcctatataataattgctttggctttcacctaaaattctgggcatcacaatttccttgggatagaggttgtgttggggaatagattgcttattgctgttcactggagagaaaaggtagtgtttttgtacaaggtcataccgccagaagccccaaatcctattttggctcatcttcaggtaaagagtaattcctatcctgtgtgcctcagaagctagaatcgaaggcttaccctattcattgtttattgtcagaaatgcatgatggctcttggaaagaatgacgttttgctggaaaaaaaaaaaagaacagtttgtgtttcacaaacatggcttatcaattttttcaaagaattcttttttcccaaaaagaggagtaacaaaatgtcatttctgaaagaggcttactttataccaactagtgtcagcatttgggatgccagggaacagagagtgagacacctacaatcaccagtctcaaatgcgctattgtttcttttcagagtgttgcagatttgccatttctccataatatggggatagaaaatggaataaagatagaagggatgtagaatatgctttcctgccaacatggtttggagtcgactttggtatattgactagatttgaaaatacaagattgattagatgaatctacaaaaaagttgtcctcctctcaggtcccttttacactttttgactaactagcatctatattccacacttagcttttttgtcacacttatcctttgtctccgtaaatttcatttgcagtggttagtcatcagatattttagccacctacacaaaagcaaactgcatttttaaaaatctttctgagatgggagaaaatgtattctcctttcctataccgctctcccaacaaaaaaacaactagttagttctactaattagaaacttgctgtactttttcttttcttttaggggtcaaggaccctctttatagctaccatttgcctacaataaattattgcagcagtttgcaatactaaaatattttttatagactttatatttttccttttgataaagggatgctgcatagtagagttggtgtaattaaactatctcagccgtttccctgctttcccttctgctccatatgcctcattgtccttccagggagctcttttaatcttaaagttctacatttcatgctcttagtcaaattctgttacctttttaataactcttcccactgcatatttccatcttgaattggtggttctaaattctgaaactgtagttgagatacagctatttaatatttctgggagatgtgcatccctcttctttgtggttgcccaaggttgttttgcgtaactgagactccttgatatgcttcagagaatttaggcaaacactggccatggccgtgggagtactgggagtaaaataaaaatatcgaggtatagactagcatccacatagagcacttgaacctcctttgtacctgtttggggaaaaagtataatgagtgtactaccaatctaactaagattattatagtctggttgtttgaaataccatttttttctccttttgtgtttttcccactttccaatgtactcaagaaaattgaacaaatgtaatggatcaatttaaaatattttatttcttaaaagccttttttgcctgttgtaatgtgcaggacccttctcctttcatgggagagacaggtagttacctgaatataggttgaaaaggttatgtaaaaagaaattataataaaagggatactttgcttttcaaa

SEQ ID NO: 296936 - DNA, 5143 bp, Homo sapiens
ggcagggggtggggggggcgccctcggagccgggcggaggggaggggggaaagaggagcgcagggtgagagtgagccgcaggcttcgggaggcgagggggcggggggagcagcgccgaggccgccgcctccgcctccgccgcctaggactagggggtgggggacggacaagccccgatgccgggggagacggaagagccgagacccccggagcagcaggaccaggaagggggagaggcggccaaggcggctccggaggagccccaacaacggccccctgaggcggtcgcggcggcgcctgcagggaccactagcagccgcgtgctgaggggaggtcgggaccgaggccgggccgctgcggccgccgccgccgcagctgtgtcccgccggaggaaggccgagtatccccgccggcggaggagcagccccagcgccaggcctcccgacgtccccgggcagcagccccaggccgcgaagtccccgtctccagttcagggcaagaagagtccgcgactcctatgcatagaaaaagtaacaactgataaagatcccaaggaagaaaaagaggaagaagacgattctgccctccctcaggaagtttccattgctgcatctagacctagccggggctggcgtagtagtaggacatctgtttctcgccatcgtgatacagagaacacccgaagctctcggtccaagaccggttcattgcagctcatttgcaagtcagaaccaaatacagaccaacttgattatgatgttggagaagagcatcagtctccaggtggcattagtagtgaagaggaagaggaggaggaagaagagatgttaatcagtgaagaggagataccattcaaagatgatccaagagatgagacctacaaaccccacttagaaagggaaaccccaaagccacggagaaaatcagggaaggtaaaagaagagaaggagaagaaggaaattaaagtggaagtagaggtggaggtgaaagaagaggagaatgaaattagagaggatgaggaacctccaaggaagagaggaagaagacgaaaagatgacaaaagtccacgtttacccaaaaggagaaaaaagcctccaatccagtatgtccgttgtgagatggaaggatgtggaactgtccttgcccatcctcgctatttgcagcaccacattaaataccagcatttgctgaagaagaaatatgtatgtccccatccctcctgtggacgactcttcaggcttcagaagcaacttctgcgacatgccaaacatcatacagatcaaagggattatatctgtgaatattgtgctcgggccttcaagagttcccacaatctggcagtgcaccggatgattcacactggcgagaagccattacaatgtgagatctgtggatttacttgtcgacaaaaggcatctcttaattggcacatgaagaaacatgatgcagactccttctaccagttttcttgcaatatctgtggcaaaaaatttgagaagaaggacagcgtagtggcacacaaggcaaaaagccaccctgaggtgctgattgcagaagctctggctgccaatgcaggcgccctcatcaccagcacagatatcttgggcactaacccagagtccctgacgcagccttcagatggtcagggtcttcctcttcttcctgagcccttgggaaactcaacctctggagagtgcctactgttagaagctgaagggatgtcaaagtcatactgcagtgggacggaacgggtgagcctgatggctgatgggaagatctttgtgggaagcggcagcagtggaggcactgaagggctggttatgaactcagatatactcggtgctaccacagaggttctgattgaagattcagactctgccggaccttagtggacaggaagacttggggcatgggacagctcagactttgtatttaaaagttaaaaaggacaaaaaaaaaatctaaagcatttaaaatctagtgaaataactgaagggcctgctctttccattgtggatcacagcacacacatacatacaccctccacctccccatcccctgttctccctctgttgctccccttataaaattgatgttgtctttaccagaaaggtagacaaaaaagaagcagcagcagctcttaaagtgagggttattctcatactcggttccagccatcagcagacttcctgctcatcggcagatccccctttccaacctgtaactctgatgtgctctggatcagcttttaacttttaatcatatattactgtcttctaaatcccttctcctcctctactgctgccctatggttctggctcctaccccctgcggcacacttatcttcaaataccatagaattctaatctctggaggctggcagcttgacttggcactttagggccccttagcagggtgagctgttaaaacagcacacatctctcatcccctcttcctttattcccccctgggtttcagaaaggaaggatatatggggaccacctcccccttctttgatcccagcatctcagtccccctcccaaccctccatatggctctcaatggtgctcacttgcttggaagcaggctcccaatagggagggggctgccctctacagtctctttgactgtaagacagggctctgtatcagtgagacgatgagaaaagtcccaggctaatggcagaaatttgcactttgaacatgtgtgtttttgtgttgtggaacctgagattccttatttattaacaggaagtctgattttttttttttggagtctttgttgctatattttgtggggctgggagagagagattagattattttgacatgggatcccttccataacaggtactttgaaggcaagacatagggttgaagaagcacagccagcctctgaaatcatagctctccagtggcttttaaagaaagctggtcctcagcactaacaaaatcactacaatagcctagtgcttttttggaagcctttttagggaagaatgttaggttcatggtaactagtatgctctttgagatttttacagtgttgaaacttaagaattttgagagggtgaggagggttgttcagaatctaaattacagatagatgattgtttcttgtgaatttgtttcttttcctttttttttgtccctaccatttccttacatttcccttggggcccatctctggctccttgctttttgtttcttgctttgctttatcagttcattccagctccctgttagtgaaggacactgctgttagtgaaggaacaaagtctatgagtcctaaaattttaagtcaaagaaaactgctctgtttcccctttagtaacacttctgaagaggaaaaacttcaatagccaaagttaataatcctatataataattgctttggctttcacctaaaattctgggcatcacaatttccttgggatagaggttgtgttggggaatagattgcttattgctgttcactggagagaaaaggtagtgtttttgtacaaggtcataccgccagaagccccaaatcctattttggctcatcttcaggtaaagagtaattcctatcctgtgtgcctcagaagctagaatcgaaggcttaccctattcattgtttattgtcagaaatgcatgatggctcttggaaagaatgacgttttgctggaaaaaaaaaaaagaacagtttgtgtttcacaaacatggcttatcaattttttcaaagaattcttttttcccaaaaagaggagtaacaaaatgtcatttctgaaagaggcttactttataccaactagtgtcagcatttgggatgccagggaacagagagtgagacacctacaatcaccagtctcaaatgcgctattgtttcttttcagagtgttgcagatttgccatttctccataatatggggatagaaaatggaataaagatagaagggatgtagaatatgctttcctgccaacatggtttggagtcgactttggtatattgactagatttgaaaatacaagattgattagatgaatctacaaaaaagttgtcctcctctcaggtcccttttacactttttgactaactagcatctatattccacacttagcttttttgtcacacttatcctttgtctccgtaaatttcatttgcagtggttagtcatcagatattttagccacctacacaaaagcaaactgcatttttaaaaatctttctgagatgggagaaaatgtattctcctttcctataccgctctcccaacaaaaaaacaactagttagttctactaattagaaacttgctgtactttttcttttcttttaggggtcaaggaccctctttatagctaccatttgcctacaataaattattgcagcagtttgcaatactaaaatattttttatagactttatatttttccttttgataaagggatgctgcatagtagagttggtgtaattaaactatctcagccgtttccctgctttcccttctgctccatatgcctcattgtccttccagggagctcttttaatcttaaagttctacatttcatgctcttagtcaaattctgttacctttttaataactcttcccactgcatatttccatcttgaattggtggttctaaattctgaaactgtagttgagatacagctatttaatatttctgggagatgtgcatccctcttctttgtggttgcccaaggttgttttgcgtaactgagactccttgatatgcttcagagaatttaggcaaacactggccatggccgtgggagtactgggagtaaaataaaaatatcgaggtatagactagcatccacatagagcacttgaacctcctttgtacctgtttggggaaaaagtataatgagtgtactaccaatctaactaagattattatagtctggttgtttgaaataccatttttttctccttttgtgtttttcccactttccaatgtactcaagaaaattgaacaaatgtaatggcccctccccccaatccttaaatctttaaggcgaagtgggcaccccacccttcatcaggagtttcagtgttgcagggaattatagaccgacgtccaaacggccgcctcaccctctccgcacacatctggcagtctttttggactttttggtccagaa

SEQ ID NO: 296937 - DNA, 4985 bp, Homo sapiens
taccacttaaaaaattaccaaataaaatcccctcagacatgttcgctacaaccagaatgtctcatttctatttacttatttttagtagtgaagaggaagaggaggaggaagaagagatgttaatcagtgaagaggagataccattcaaagatgatccaagagatgagacctacaaaccccacttagaaaggcatgtctcagattttactgcagacatgttaatgaaatataagtaggaaagcactgttgcatgcttttattttatctgttgccaagctaatgggtatagaattaattttaaatgagtaattattatgcacttcttttgtaagtctaacaccttaatataccctgataataatcctctttcccatttgtagaactttattttgattatatacaagtttttatgagtctgcatgttttatttcaacaaggtatcatgaattgcctgaatacttagaattttttaactaattgtctcgtttctctttacaattatagtgaaatttgatttacaggcatctttagtctggggagggttcattccatgagcaacatatacatatatttggatcattactatgcatgtgaggatgattggtaggaaatcacatttcatgaactgaggaaggtagttttataacaaatcagtgataactctaagctttaatttgttgtcatagtcttccttgaaaagatcttttgtctagtattgaaatgcatttgtgttttcagggaaaccccaaagccacggagaaaatcagggaaggtaaaagaagagaaggagaagaaggaaattaaagtggaagtagaggtggaggtgaaagaagaggagaatgaaattagagaggatgaggaacctccaaggaagagaggaagaagacgaaaagatgacaaaagtccacgtttacccaaaaggagaaaaaagcctccaatccagtatgtccgttgtgagatggaaggatgtggaactgtccttgcccatcctcgctatttgcagcaccacattaaataccagcatttgctgaagaagaaatatgtatgtccccatccctcctgtggacgactcttcaggcttcagaagcaacttctgcgacatgccaaacatcatacagatcaaagggattatatctgtgaatattgtgctcgggccttcaagagttcccacaatctggcagtgcaccggatgattcacactggcgagaagccattacaatgtgagatctgtggatttacttgtcgacaaaaggcatctcttaattggcacatgaagaaacatgatgcagactccttctaccagttttcttgcaatatctgtggcaaaaaatttgagaagaaggacagcgtagtggcacacaaggcaaaaagccaccctgaggtgctgattgcagaagctctggctgccaatgcaggcgccctcatcaccagcacagatatcttgggcactaacccagagtccctgacgcagccttcagatggtcagggtcttcctcttcttcctgagcccttgggaaactcaacctctggagagtgcctactgttagaagctgaagggatgtcaaagtcatactgcagtgggacggaacgggtgagcctgatggctgatgggaagatctttgtgggaagcggcagcagtggaggcactgaagggctggttatgaactcagatatactcggtgctaccacagaggttctgattgaagattcagactctgccggaccttagtggacaggaagacttggggcatgggacagctcagactttgtatttaaaagttaaaaaggacaaaaaaaaaatctaaagcatttaaaatctagtgaaataactgaagggcctgctctttccattgtggatcacagcacacacatacatacaccctccacctccccatcccctgttctccctctgttgctccccttataaaattgatgttgtctttaccagaaaggtagacaaaaaagaagcagcagcagctcttaaagtgagggttattctcatactcggttccagccatcagcagacttcctgctcatcggcagatccccctttccaacctgtaactctgatgtgctctggatcagcttttaacttttaatcatatattactgtcttctaaatcccttctcctcctctactgctgccctatggttctggctcctaccccctgcggcacacttatcttcaaataccatagaattctaatctctggaggctggcagcttgacttggcactttagggccccttagcagggtgagctgttaaaacagcacacatctctcatcccctcttcctttattcccccctgggtttcagaaaggaaggatatatggggaccacctcccccttctttgatcccagcatctcagtccccctcccaaccctccatatggctctcaatggtgctcacttgcttggaagcaggctcccaatagggagggggctgccctctacagtctctttgactgtaagacagggctctgtatcagtgagacgatgagaaaagtcccaggctaatggcagaaatttgcactttgaacatgtgtgtttttgtgttgtggaacctgagattccttatttattaacaggaagtctgattttttttttttggagtctttgttgctatattttgtggggctgggagagagagattagattattttgacatgggatcccttccataacaggtactttgaaggcaagacatagggttgaagaagcacagccagcctctgaaatcatagctctccagtggcttttaaagaaagctggtcctcagcactaacaaaatcactacaatagcctagtgcttttttggaagcctttttagggaagaatgttaggttcatggtaactagtatgctctttgagatttttacagtgttgaaacttaagaattttgagagggtgaggagggttgttcagaatctaaattacagatagatgattgtttcttgtgaatttgtttcttttcctttttttttgtccctaccatttccttacatttcccttggggcccatctctggctccttgctttttgtttcttgctttgctttatcagttcattccagctccctgttagtgaaggacactgctgttagtgaaggaacaaagtctatgagtcctaaaattttaagtcaaagaaaactgctctgtttcccctttagtaacacttctgaagaggaaaaacttcaatagccaaagttaataatcctatataataattgctttggctttcacctaaaattctgggcatcacaatttccttgggatagaggttgtgttggggaatagattgcttattgctgttcactggagagaaaaggtagtgtttttgtacaaggtcataccgccagaagccccaaatcctattttggctcatcttcaggtaaagagtaattcctatcctgtgtgcctcagaagctagaatcgaaggcttaccctattcattgtttattgtcagaaatgcatgatggctcttggaaagaatgacgttttgctggaaaaaaaaaaaagaacagtttgtgtttcacaaacatggcttatcaattttttcaaagaattcttttttcccaaaaagaggagtaacaaaatgtcatttctgaaagaggcttactttataccaactagtgtcagcatttgggatgccagggaacagagagtgagacacctacaatcaccagtctcaaatgcgctattgtttcttttcagagtgttgcagatttgccatttctccataatatggggatagaaaatggaataaagatagaagggatgtagaatatgctttcctgccaacatggtttggagtcgactttggtatattgactagatttgaaaatacaagattgattagatgaatctacaaaaaagttgtcctcctctcaggtcccttttacactttttgactaactagcatctatattccacacttagcttttttgtcacacttatcctttgtctccgtaaatttcatttgcagtggttagtcatcagatattttagccacctacacaaaagcaaactgcatttttaaaaatctttctgagatgggagaaaatgtattctcctttcctataccgctctcccaacaaaaaaacaactagttagttctactaattagaaacttgctgtactttttcttttcttttaggggtcaaggaccctctttatagctaccatttgcctacaataaattattgcagcagtttgcaatactaaaatattttttatagactttatatttttccttttgataaagggatgctgcatagtagagttggtgtaattaaactatctcagccgtttccctgctttcccttctgctccatatgcctcattgtccttccagggagctcttttaatcttaaagttctacatttcatgctcttagtcaaattctgttacctttttaataactcttcccactgcatatttccatcttgaattggtggttctaaattctgaaactgtagttgagatacagctatttaatatttctgggagatgtgcatccctcttctttgtggttgcccaaggttgttttgcgtaactgagactccttgatatgcttcagagaatttaggcaaacactggccatggccgtgggagtactgggagtaaaataaaaatatcgaggtatagactagcatccacatagagcacttgaacctcctttgtacctgtttggggaaaaagtataatgagtgtactaccaatctaactaagattattatagtctggttgtttgaaataccatttttttctccttttgtgtttttcccactttccaatgtactcaagaaaattgaacaaatgtaatggatcaatttaaaatattttatttcttaaaagccttttttgcctgttgtaatgtgcaggacccttctcctttcatgggagagacaggtagttacctgaatataggttgaaaaggttatgtaaaaagaaattataataaaagggatactttgcttttcaaa

SEQ ID NO: 296938 - DNA, 4957 bp, Homo sapiens
ggcagggggtggggggggcgccctcggagccgggcggaggggaggggggaaagaggagcgcagggtgagagtgagccgcaggcttcgggaggcgagggggcggggggagcagcgccgaggccgccgcctccgcctccgccgcctaggactagggggtgggggacggacaagccccgatgccgggggagacggaagagccgagacccccggagcagcaggaccaggaagggggagaggcggccaaggcggctccggaggagccccaacaacggccccctgaggcggtcgcggcggcgcctgcagggaccactagcagccgcgtgctgaggggaggtcgggaccgaggccgggccgctgcggccgccgccgccgcagctgtgtcccgccggaggaaggccgagtatccccgccggcggaggagcagccccagcgccaggcctcccgacgtccccgggcagcagccccaggccgcgaagtccccgtctccagttcagggcaagaagagtccgcgactcctatgcatagaaaaagtaacaactgataaagatcccaaggaagaaaaagaggaagaagacgattctgccctccctcaggaagtttccattgctgcatctagacctagccggggctggcgtagtagtaggacatctgtttctcgccatcgtgatacagagaacacccgaagctctcggtccaagaccggttcattgcagctcatttgcaagtcagaaccaaatacagaccaacttgattatgatgttggagaagagcatcagtctccaggtggcattagtagtgaagaggaagaggaggaggaagaagagatgttaatcagtgaagaggagataccattcaaagatgatccaagagatgagacctacaaaccccacttagaaagggaaaccccaaagccacggagaaaatcagggaaggtaaaagaagagaaggagaagaaggaaattaaagtggaagtagaggtggaggtgaaagaagaggagaatgaaattagagaggatgaggaacctccaaggaagagaggaagaagacgaaaagatgacaaaagtccacgtttacccaaaaggagaaaaaagcctccaatccagtatgtccgttgtgagatggaaggatgtggaactgtccttgcccatcctcgctatttgcagcaccacattaaataccagcatttgctgaagaagaaatatgtatgtccccatccctcctgtggacgactcttcaggcttcagaagcaacttctgcgacatgccaaacatcatacagatcaaagggattatatctgtgaatattgtgctcgggccttcaagagttcccacaatctggcagtgcaccggatgattcacactggcgagaagccattacaatgtgagatctgtggatttacttgtcgacaaaaggcatctcttaattggcacatgaagaaacatgatgcagactccttctaccagttttcttgcaatatctgtggcaaaaaatttgagaagaaggacagcgtagtggcacacaaggcaaaaagccaccctgaggtgctgattgcagaagctctggctgccaatgcaggcgccctcatcaccagcacagatatcttgggcactaacccagagtccctgacgcagccttcagatggtcagggtcttcctcttcttcctgagcccttgggaaactcaacctctggagagtgcctactgttagaagctgaagggatgtcaaagtcatactgcagtgggacggaacgggtgagcctgatggctgatgggaagatctttgtgggaagcggcagcagtggaggcactgaagggctggttatgaactcagatatactcggtgctaccacagaggttctgattgaagattcagactctgccggaccttagtggacaggaagacttggggcatgggacagctcagactttgtatttaaaagttaaaaaggacaaaaaaaaaatctaaagcatttaaaatctagtgaaataactgaagggcctgctctttccattgtggatcacagcacacacatacatacaccctccacctccccatcccctgttctccctctgttgctccccttataaaattgatgttgtctttaccagaaaggtagacaaaaaagaagcagcagcagctcttaaagtgagggttattctcatactcggttccagccatcagcagacttcctgctcatcggcagatccccctttccaacctgtaactctgatgtgctctggatcagcttttaacttttaatcatatattactgtcttctaaatcccttctcctcctctactgctgccctatggttctggctcctaccccctgcggcacacttatcttcaaataccatagaattctaatctctggaggctggcagcttgacttggcactttagggccccttagcagggtgagctgttaaaacagcacacatctctcatcccctcttcctttattcccccctgggtttcagaaaggaaggatatatggggaccacctcccccttctttgatcccagcatctcagtccccctcccaaccctccatatggctctcaatggtgctcacttgcttggaagcaggctcccaatagggagggggctgccctctacagtctctttgactgtaagacagggctctgtatcagtgagacgatgagaaaagtcccaggctaatggcagaaatttgcactttgaacatgtgtgtttttgtgttgtggaacctgagattccttatttattaacaggaagtctgattttttttttttggagtctttgttgctatattttgtggggctgggagagagagattagattattttgacatgggatcccttccataacaggtactttgaaggcaagacatagggttgaagaagcacagccagcctctgaaatcatagctctccagtggcttttaaagaaagctggtcctcagcactaacaaaatcactacaatagcctagtgcttttttggaagcctttttagggaagaatgttaggttcatggtaactagtatgctctttgagatttttacagtgttgaaacttaagaattttgagagggtgaggagggttgttcagaatctaaattacagatagatgattgtttcttgtgaatttgtttcttttcctttttttttgtccctaccatttccttacatttcccttggggcccatctctggctccttgctttttgtttcttgctttgctttatcagttcattccagctccctgttagtgaaggacactgctgttagtgaaggaacaaagtctatgagtcctaaaattttaagtcaaagaaaactgctctgtttcccctttagtaacacttctgaagaggaaaaacttcaatagccaaagttaataatcctatataataattgctttggctttcacctaaaattctgggcatcacaatttccttgggatagaggttgtgttggggaatagattgcttattgctgttcactggagagaaaaggtagtgtttttgtacaaggtcataccgccagaagccccaaatcctattttggctcatcttcaggtaaagagtaattcctatcctgtgtgcctcagaagctagaatcgaaggcttaccctattcattgtttattgtcagaaatgcatgatggctcttggaaagaatgacgttttgctggaaaaaaaaaaaagaacagtttgtgtttcacaaacatggcttatcaattttttcaaagaattcttttttcccaaaaagaggagtaacaaaatgtcatttctgaaagaggcttactttataccaactagtgtcagcatttgggatgccagggaacagagagtgagacacctacaatcaccagtctcaaatgcgctattgtttcttttcagagtgttgcagatttgccatttctccataatatggggatagaaaatggaataaagatagaagggatgtagaatatgctttcctgccaacatggtttggagtcgactttggtatattgactagatttgaaaatacaagattgattagatgaatctacaaaaaagttgtcctcctctcaggtcccttttacactttttgactaactagcatctatattccacacttagcttttttgtcacacttatcctttgtctccgtaaatttcatttgcagtggttagtcatcagatattttagccacctacacaaaagcaaactgcatttttaaaaatctttctgagatgggagaaaatgtattctcctttcctataccgctctcccaacaaaaaaacaactagttagttctactaattagaaacttgctgtactttttcttttcttttaggggtcaaggaccctctttatagctaccatttgcctacaataaattattgcagcagtttgcaatactaaaatattttttatagactttatatttttccttttgataaagggatgctgcatagtagagttggtgtaattaaactatctcagccgtttccctgctttcccttctgctccatatgcctcattgtccttccagggagctcttttaatcttaaagttctacatttcatgctcttagtcaaattctgttacctttttaataactcttcccactgcatatttccatcttgaattggtggttctaaattctgaaactgtagttgagatacagctatttaatatttctgggagatgtgcatccctcttctttgtggttgcccaaggttgttttgcgtaactgagactccttgatatgcttcagagaatttaggcaaacactggccatggccgtgggagtactgggagtaaaataaaaatatcgaggtatagactagcatccacatagagcacttgaacctcctttgtacctgtttgcaatactaaaatattttttatagactttatatttttccttttgataaagggatgctgcatagtagagttggtgtaattaaactatctcagcagcatccctttatc

SEQ ID NO: 296939 - DNA, 1235 bp, Homo sapiens
tctgtgactacccaccagttcctctaagcacatactccgctttcctgccaacatggtttggagtcgactttggtatattgactagatttgaaaatacaagattgattagatgaatctacaaaaaagttgtcctcctctcaggtcccttttacactttttgactaactagcatctatattccacacttagcttttttgtcacacttatcctttgtctccgtaaatttcatttgcagtggttagtcatcagatattttagccacctacacaaaagcaaactgcatttttaaaaatctttctgagatgggagaaaatgtattctcctttcctataccgctctcccaacaaaaaaacaactagttagttctactaattagaaacttgctgtactttttcttttcttttaggggtcaaggaccctctttatagctaccatttgcctacaataaattattgcagcagtttgcaatactaaaatattttttatagactttatatttttccttttgataaagggatgctgcatagtagagttggtgtaattaaactatctcagccgtttccctgctttcccttctgctccatatgcctcattgtccttccagggagctcttttaatcttaaagttctacatttcatgctcttagtcaaattctgttacctttttaataactcttcccactgcatatttccatcttgaattggtggttctaaattctgaaactgtagttgagatacagctatttaatatttctgggagatgtgcatccctcttctttgtggttgcccaaggttgttttgcgtaactgagactccttgatatgcttcagagaatttaggcaaacactggccatggccgtgggagtactgggagtaaaataaaaatatcgaggtatagactagcatccacatagagcacttgaacctcctttgtacctgtttggggaaaaagtataatgagtgtactaccaatctaactaagattattatagtctggttgtttgaaataccatttttttctccttttgtgtttttcccactttccaatgtactcaagaaaattgaacaaatgtaatggatcaatttaaaatattttatttcttaaaagccttttttgcctgttgtaatgtgcaggacccttctcctttcatgggagagacaggtagttacctgaatataggttgaaaaggttatgtaaaaagaaattataataaaagggatactttgcttttcaaa

SEQ ID NO: 296940 - DNA, 1318 bp, Homo sapiens
ggcagggggtggggggggcgccctcggagccgggcggaggggaggggggaaagaggagcgcagggtgagagtgagccgcaggcttcgggaggcgagggggcggggggagcagcgccgaggccgccgcctccgcctccgccgcctaggactagggggtgggggacggacaagccccgatgccgggggagacggaagagccgagacccccggagcagcaggaccaggaagggggagaggcggccaaggcggctccggaggagccccaacaacggccccctgaggcggtcgcggcggcgcctgcagggaccactagcagccgcgtgctgaggggaggtcgggaccgaggccgggccgctgcggccgccgccgccgcagctgtgtcccgccggaggaaggccgagtatccccgccggcggaggagcagccccagcgccaggcctcccgacgtccccgggcagcagccccaggccgcgaagtccccgtctccagttcagggcaagaagagtccgcgactcctatgcatagaaaaagtaacaactgataaagatcccaaggaagaaaaagaggaagaagacgattctgccctccctcaggaagtttccattgctgcatctagacctagccggggctggcgtagtagtaggacatctgtttctcgccatcgtgatacagagaacacccgaagctctcggtccaagaccggttcattgcagctcatttgcaagtcagaaccaaatacagaccaacttgattatgatgttggagaagagcatcagtctccaggtggcattagtagtgaagaggaagaggaggaggaagaagagatgttaatcagtgaagaggagataccattcaaagatgatccaagagatgagacctacaaaccccacttagaaagggaaaccccaaagccacggagaaaatcagggaaggtaaaagaagagaaggagaagaaggaaattaaagtggaagtagaggtggaggtgaaagaagaggagaatgaaattagagaggatgaggaacctccaaggaagagaggaagaagacgaaaagatgacaaaagtccacgtttacccaaaaggagaaaaaagcctccaatccagtatgtccgttgtgagatggaaggatgtggaactgtccttgcccatcctcgctatttgcagcaccacattaaataccagcatttgctgaagaagaaatatgtatgtccccatccctcctgtggacgactcttcaggcttcagaagcaacttctgcgacatgccaaacatcatacagtgtacagccacatacaaacaagaacccccccgtgccgaat

SEQ ID NO: 296941 - DNA, 782 bp, Homo sapiens
atccccttagtcaaaaggaaaaatataaagtctataaaaaatatttttccttttgataaagggatgctgcatagtagagttggtgtaattaaactatctcagccgtttccctgctttcccttctgctccatatgcctcattgtccttccagggagctcttttaatcttaaagttctacatttcatgctcttagtcaaattctgttacctttttaataactcttcccactgcatatttccatcttgaattggtggttctaaattctgaaactgtagttgagatacagctatttaatatttctgggagatgtgcatccctcttctttgtggttgcccaaggttgttttgcgtaactgagactccttgatatgcttcagagaatttaggcaaacactggccatggccgtgggagtactgggagtaaaataaaaatatcgaggtatagactagcatccacatagagcacttgaacctcctttgtacctgtttggggaaaaagtataatgagtgtactaccaatctaactaagattattatagtctggttgtttgaaataccatttttttctccttttgtgtttttcccactttccaatgtactcaagaaaattgaacaaatgtaatggatcaatttaaaatattttatttcttaaaagccttttttgcctgttgtaatgtgcaggacccttctcctttcatgggagagacaggtagttacctgaatataggttgaaaaggttatgtaaaaagaaattataataaaagggatactttgcttttcaaa

SEQ ID NO: 296942 - DNA, 1937 bp, Homo sapiens
ggcagggggtggggggggcgccctcggagccgggcggaggggaggggggaaagaggagcgcagggtgagagtgagccgcaggcttcgggaggcgagggggcggggggagcagcgccgaggccgccgcctccgcctccgccgcctaggactagggggtgggggacggacaagccccgatgccgggggagacggaagagccgagacccccggagcagcaggaccaggaagggggagaggcggccaaggcggctccggaggagccccaacaacggccccctgaggcggtcgcggcggcgcctgcagggaccactagcagccgcgtgctgaggggaggtcgggaccgaggccgggccgctgcggccgccgccgccgcagctgtgtcccgccggaggaaggccgagtatccccgccggcggaggagcagccccagcgccaggcctcccgacgtccccgggcagcagccccaggccgcgaagtccccgtctccagttcagggcaagaagagtccgcgactcctatgcatagaaaaagtaacaactgataaagatcccaaggaagaaaaagaggaagaagacgattctgccctccctcaggaagtttccattgctgcatctagacctagccggggctggcgtagtagtaggacatctgtttctcgccatcgtgatacagagaacacccgaagctctcggtccaagaccggttcattgcagctcatttgcaagtcagaaccaaatacagaccaacttgattatgatgttggagaagagcatcagtctccaggtggcattagtagtgaagaggaagaggaggaggaagaagagatgttaatcagtgaagaggagataccattcaaagatgatccaagagatgagacctacaaaccccacttagaaagggaaaccccaaagccacggagaaaatcagggaaggtaaaagaagagaaggagaagaaggaaattaaagtggaagtagaggtggaggtgaaagaagaggagaatgaaattagagaggatgaggaacctccaaggaagtgagtaggcaattattaaaaatgaaaatctaacagattttgaacgactagtggaaaaaagagtgggagtgtgaggaaggatgttgacgtatacatgcttcaaaatatgtattttttaacttaaaaaaatttggcctcaagcagctgacaatttcactggagagactcttagtaaaaaaatgtttaggtttttcagttctattgcaaggagaaggtattttttaatcttagtgtttttagatgatacatggtagcaactctaaaagtaatacattgagattcttctaagtctttcatagtattgcatagtttatggaaggtatatatttaatctgtcttacagactgatttgaaagtgaaattacttcagggtaaaattacttgcttgatttgccagatatatctttgactttatgtattcttggttatcctttgccacttgttctttggccgtgtgtgtgtgtgtgtgtcttcagccagccttcactgtgtagttttgattcagaatatgtctactgttaccctgtcttcaattacaggagaggaagaagacgaaaagatgacaaaagtccacgtttacccaaaaggaggtgaggaatttttacccctactgttttacaccttattccagtaccaggcactttactcacaaatttagacttcatgataatcctgcaggaatggctatttaaaaatttcacaaaagcaacttcactaatgtcctagatgcacaggtgttatgatcttattttcattgtaagagcttgaaatttctgacaatcttaatactttacctttggggggtcattagtttatttgtgttactttttaattctgtcaaatatttgctaattcttggttacttctaatacaaattctgtgtaatctgtatagtagtaaagag

SEQ ID NO: 296943 - DNA, 2485 bp, Homo sapiens
ggcagggggtggggggggcgccctcggagccgggcggaggggaggggggaaagaggagcgcagggtgagagtgagccgcaggcttcgggaggcgagggggcggggggagcagcgccgaggccgccgcctccgcctccgccgcctaggactagggggtgggggacggacaagccccgatgccgggggagacggaagagccgagacccccggagcagcaggaccaggaagggggagaggcggccaaggcggctccggaggagccccaacaacggccccctgaggcggtcgcggcggcgcctgcagggaccactagcagccgcgtgctgaggggaggtcgggaccgaggccgggccgctgcggccgccgccgccgcagctgtgtcccgccggaggaaggccgagtatccccgccggcggaggagcagccccagcgccaggcctcccgacgtccccgggcagcagccccaggccgcgaagtccccgtctccagttcagggcaagaagagtccgcgactcctatgcatagaaaaagtaacaactgataaagatcccaaggaagaaaaagaggaagaagacgattctgccctccctcaggaagtttccattgctgcatctagacctagccggggctggcgtagtagtaggacatctgtttctcgccatcgtgatacagagaacacccgaagctctcggtccaagaccggttcattgcagctcatttgcaagtcagaaccaaatacagaccaacttgattatgatgttggagaagagcatcagtctccaggtggcattagtagtgaagaggaagaggaggaggaagaagagatgttaatcagtgaagaggagataccattcaaagatgatccaagagatgagacctacaaaccccacttagaaaggcatgtctcagattttactgcagacatgttaatgaaatataagtaggaaagcactgttgcatgcttttattttatctgttgccaagctaatgggtatagaattaattttaaatgagtaattattatgcacttcttttgtaagtctaacaccttaatataccctgataataatcctctttcccatttgtagaactttattttgattatatacaagtttttatgagtctgcatgttttatttcaacaaggtatcatgaattgcctgaatacttagaattttttaactaattgtctcgtttctctttacaattatagtgaaatttgatttacaggcatctttagtctggggagggttcattccatgagcaacatatacatatatttggatcattactatgcatgtgaggatgattggtaggaaatcacatttcatgaactgaggaaggtagttttataacaaatcagtgataactctaagctttaatttgttgtcatagtcttccttgaaaagatcttttgtctagtattgaaatgcatttgtgttttcagggaaaccccaaagccacggagaaaatcagggaaggtaaaagaagagaaggagaagaaggaaattaaagtggaagtagaggtggaggtgaaagaagaggagaatgaaattagagaggatgaggaacctccaaggaagtgagtaggcaattattaaaaatgaaaatctaacagattttgaacgactagtggaaaaaagagtgggagtgtgaggaaggatgttgacgtatacatgcttcaaaatatgtattttttaacttaaaaaaatttggcctcaagcagctgacaatttcactggagagactcttagtaaaaaaatgtttaggtttttcagttctattgcaaggagaaggtattttttaatcttagtgtttttagatgatacatggtagcaactctaaaagtaatacattgagattcttctaagtctttcatagtattgcatagtttatggaaggtatatatttaatctgtcttacagactgatttgaaagtgaaattacttcagggtaaaattacttgcttgatttgccagatatatctttgactttatgtattcttggttatcctttgccacttgttctttggccgtgtgtgtgtgtgtgtgtcttcagccagccttcactgtgtagttttgattcagaatatgtctactgttaccctgtcttcaattacaggagaggaagaagacgaaaagatgacaaaagtccacgtttacccaaaaggaggtgaggaatttttacccctactgttttacaccttattccagtaccaggcactttactcacaaatttagacttcatgataatcctgcaggaatggctatttaaaaatttcacaaaagcaacttcactaatgtcctagatgcacaggtgttatgatcttattttcattgtaagagcttgaaatttctgacaatcttaatactttacctttggggggtcattagtttatttgtgttactttttaattctgtcaaatatttgctaattcttggttacttctaatacaaattctgtgtaatctgtatagtagtaaagag

SEQ ID NO: 296944 - DNA, 386 bp, Homo sapiens
gtacttttaaaatgtgtttatcaagtaggtaattgcactgtgctttagttttgcatgttggtaatgataacgtttttctaacataagtcttaaaagattctatagtcaagtgcggggaaaaggtgtgaaaataaaatgtagtaagacaaattttacaagggatgggcagactaggacttttgaatttttatcctttgacttcttgaacttctatgaccgggataatgatcttctattgagcatttattctgtatcaactgtggactaaatacgttatgtatattattgctaattagtctattcaacaccactaaatttgtttatattgatcttattttacagctaagaaactagaagcttggcaggattaagtaacctgcccatgg

SEQ ID NO: 296945 - DNA, 442 bp, Homo sapiens
tgaaggtttgccgctttacaaacatattagttgccactgctgtttactttcatcaaataaatgagtggatattgattgggggcattagttagtagcctttttcttagtttccctctgtttttcaggcaaacagaagaagatcagattagttttccatctagtaacatttcccaatccttcaaaagaagtatgttactgattattgtgtgtgtgtgtgtgtgtgtgtgtgtgtatgtatatatatgctctaaactctaaccctgatcctgaataagagcactctttatttctctgttggatcagccatttccttttctcctctccttagatgtgagatctgtggatttacttgtcgacaaaaggcatctcttaattggcacatgaagaaacatgatgcagactccttctaccagttttcttgcaatatctgtggcaaaaaatt

SEQ ID NO: 296946 - DNA, 386 bp, Homo sapiens
tgagagtcacatctcttatttggaccagtatagacagaagtaaacccagctgacttgtttcctgggacagttgagttaagggatggctttcacagagcattcaccgctgacccctcaccgtcgggacctctgtagccgctctatctggctagcaaggaagattcgttcagacctgactgctcttacggaatcctatgtaagttgcctattttgctgttatctgttttcccttcatcttttttgatccagcaacttaccatcacgcatcagctccattaccaattgtgaaagctctaatcatatagtcattcatataggttatttgacatgggcccttcccttgaggaaacccatgtgactttattttcttcctctgggctgtttag

SEQ ID NO: 296947 - DNA, 520 bp, Homo sapiens
  misc_feature (497)..(497): n is a, c, g, or t
  misc_feature (499)..(499): n is a, c, g, or t
  misc_feature (504)..(504): n is a, c, g, or t
  misc_feature (508)..(508): n is a, c, g, or t
cactgaagaaaactaaaaacaaaatataaaacacatcctcttaaaataatcaaaagacactccacatttgagtcaaaattgctaaagtgaagaatattgtgaagaaccacccataaatcaggcctgaaatatttcttccgtggttaccaagttatcggaactccccacaagatcctcagtgtggactgagaaagaggaagctgtgcagaaggactagctactatagataactgagccacttgagcatgcagcttagttgtacctttgggacccacttgtgcctgatctcatatatattacttcatctacacatgcccaactttacaatttcatgaataaagtaattcccagttcgtggaaaaaaaaaaaaaaaaaaaaaaaaataaaaaaaaaaaaaaaaacaaaaacaaaaaaacaaacaaaagaagaagagagagagagaaacacacaaacaaagaaaaacaacacaaaaacagagacacgacaacaacaaaaanangacanacanaaaaaaaaacaa

SEQ ID NO: 296948 - DNA, 311 bp, Homo sapiens
  misc_feature (271)..(272): n is a, c, g, or t
agctgctcttcgctaggccaaatagtatcccagctttctgccagctactagctacctgtagaggtatatgaagttgaagaaatatggagatcaacacaaaactgctcatcagtgttacctgtatcagctttttcacctttcagcttcttttctactttgtaagttactggttttcagcaaaagtttctccaggtttcaatagtctcagcttcaaaaagaagattgaatggaactcaagggtagtatccacatgaccccccctctttttttnnccctcctcccccacccccctaccccctacaacaaaaaac

SEQ ID NO: 296949 - DNA, 1208 bp, Homo sapiens
gggaagcatggtatcaacgcagagggcccattacggcggtggggcccacagccatggcggagcctgtgcaggaggagctctcggtcctggccgcgattttctgcaggccccacgagtgggaggtgctgagccgctcagagacagatgggaccgtgttcagaattcacacaaaagctgaaggatttatggatgcggatatacctctggaattggtgttccatttgccagtcaattatccttcatgtctacctggtatctcgattaactctgaacagttgaccagggcccagtgtgtgactgtgaaagagaagttacttgagcaagcagagagccttttgtcggagcctatggttcatgagctggttctctggattcagcagaatctcaggcatatcctcagccaaccagaaactggcagtggcagtgaaaagtgtactttttcaacaagcacgaccatggatgatggattgtggataactcttttgcatttagatcacatgagagcaaagactaaatatgtcaaaattgtggagaagtgggcttcagatttaaggctgacaggaagactgatgttcatgggtaaaataatactgattttactacagggagacagaaacaacctcaaggtgccagtttctggcatttgaagtcaaagagtattcagcgttggatgaattacaaaaggaatttgaaactgcaggacttaagaagcttttctccgaatttgtacttgctctggtaaaatgaaatggaagacaggaatcttttagtaaaatagcagtgttttttgttgtttttgcattggatttggggagtggttaattgaaatagtcaattttaaagtttctctgaagcaaaatgataggcatcattctaacttcaggaacaaaagccagttctgttttatgaaatattaaacatgaagaaaacttgtatattctaatgtttgccaggaaaggctaggttcagtagatgagacattatttaaaagataaatttaaaaagatggtaaatgaacacttgtttttatagacaatatttgtttgaaactatgtaattttctggctaattttcttgtaattaaatgattttttaaaaaagatttgttttcatgtttacttttcttatgtttatatttttagcatttgatcgccattttcccccatccaggttatgtctaatgttttaataaatgttaagaaaaatac

SEQ ID NO: 296950 - DNA, 1247 bp, Homo sapiens
  misc_feature (1224)..(1224): n is a, c, g, or t
  misc_feature (1226)..(1226): n is a, c, g, or t
  misc_feature (1231)..(1231): n is a, c, g, or t
  misc_feature (1235)..(1235): n is a, c, g, or t
gggaagcatggtatcaacgcagagggcccattacggcggtggggcccacagccatggcggagcctgtgcaggaggagctctcggtcctggccgcgattttctgcaggccccacgagtgggaggtgctgagccgctcagagacagatgggaccgtgttcagaattcacacaaaagctgaaggatttatggatgcggatatacctctggaattggtgttccatttgccagtcaattatccttcatgtctacctggtatctcgattaactctgaacagttgaccagggcccagtgtgtgactgtgaaagagaagttacttgagcaagcagagagccttttgtcggagcctatggttcatgagctggttctctggattcagcagaatctcaggcatatcctcagccaaccagaaactggcagtggcagtgaaaagtgtactttttcaacaagcacgaccatggatgatggattgtggataactcttttgcatttagatcacatgagagcaaagactaaatatgtcaaaattgtggagaagtgggcttcagatttaaggctgacaggaagactgatgttcatgggtaaaataatactgattttactacagggagacagaaacaacctcaaggtgccagagtacttgattcttcagaaaacctccaaagtagatgtggactcaagtggaaagaaatgcaaagagaaaatgattagtgtactgtttgaaacaaaagtacagacagaacacaaaaggtttctggcatttgaagtcaaagagtattcagcgttggatgaattacaaaaggaatttgaaactgcaggacttaagaagcttttctccgaatttgtacttgctctggtaaaatgaaatggaagacaggaatcttttagtaaaatagcagtgttttttgttgtttttgcattggatttggggagtggttaattgaaatagtcaattttaaagtttctctgaagcaaaatgataggcatcattctaacttcaggaacaaaagccagttctgttttatgaaatattaaacatgaagaaaacttgtatattctaatgtttgccaggaaaggctaggttcagtagatgagacattatttaaaagataaatttaaaaagatggtaaatgaacacttgtttttatagacaatatttgtttgaaactatgtaattttctggctaattttcttgtaattaaatgattttttaaaaaagaaaaaanangacanacanaaaaaaaaacaa

SEQ ID NO: 296951 - DNA, 1136 bp, Homo sapiens
  misc_feature (1089)..(1089): n is a, c, g, or t
  misc_feature (1092)..(1092): n is a, c, g, or t
  misc_feature (1099)..(1099): n is a, c, g, or t
gggaagcatggtatcaacgcagagggcccattacggcggtggggcccacagccatggcggagcctgtgcaggaggagctctcggtcctggccgcgattttctgcaggccccacgagtgggaggtgctgagccgctcagagacagatgggaccgtgttcagaattcacacaaaagctgaaggatttatggatgcggatatacctctggaattggtgttccatttgccagtcaattatccttcatgtctacctggtatctcgattaactctgaacagttgaccagggcccagtgtgtgactgtgaaagagaagttacttgagcaagcagagagccttttgtcggagcctatggttcatgagctggttctctggattcagcagaatctcaggcatatcctcagccaaccagaaactggcagtggcagtgaaaagtgtactttttcaacaagcacgaccatggatgatggattgtggataactcttttgcatttagatcacatgagagcaaagactaaatatgtcaaaattgtggagaagtgggcttcagatttaaggctgacaggaagactgatgttcatgggtaaaataatactgattttactacagggagacagaaacaacctcaaggtgccagtttctggcatttgaagtcaaagagtattcagcgttggatgaattacaaaaggaatttgaaactgcaggacttaagaagcttttctccgaatttgtacttgctctggtaaaatgaaatggaagacaggaatcttttagtaaaatagcagtgttttttgttgtttttgcattggatttggggagtggttaattgaaatagtcaattttaaagtttctctgaagcaaaatgataggcatcattctaacttcaggaacaaaagccagttctgttttatgaaatattaaacatgaagaaaacttgtatattctaatgtttgccaggaaaggctaggttcagtagatgagacattatttaaaagataaatttaaaaagatggtaaatgaacacttgtttttatagacaatatttgtttgaaactatgtaattttctggctaattttcttttttaaaaaatcnttnaattacnagaaaatgtcgacgcggccgcgaatttagtagtagta

SEQ ID NO: 296952 - DNA, 1224 bp, Homo sapiens
  misc_feature (1201)..(1201): n is a, c, g, or t
  misc_feature (1203)..(1203): n is a, c, g, or t
  misc_feature (1208)..(1208): n is a, c, g, or t
  misc_feature (1212)..(1212): n is a, c, g, or t
cgcgggcagtgctgctcctggccggtggaggcggcggctgcggcagcggaaggggaagcgctgaggcggtggggcccacagccatggcggagcctgtgcaggaggagctctcggtcctggccgcgattttctgcaggccccacgagtgggaggtgctgagccgctcagagacagatgggaccgtgttcagaattcacacaaaagctgaaggatttatggatgcggatatacctctggaattggtgttccatttgccagtcaattatccttcatgtctacctggtatctcgattaactctgaacagttgaccagggcccagtgtgtgactgtgaaagagaagttacttgagcaagcagagagccttttgtcggagcctatggttcatgagctggttctctggattcagcagaatctcaggcatatcctcagccaaccagaaactggcagtggcagtgaaaagtgtactttttcaacaagcacgaccatggatgatggattgtggataactcttttgcatttagatcacatgagagcaaagactaaatatgtcaaaattgtggagaagtgggcttcagatttaaggctgacaggaagactgatgttcatgggagtacttgattcttcagaaaacctccaaagtagatgtggactcaagtggaaagaaatgcaaagagaaaatgattagtgtactgtttgaaacaaaagtacagacagaacacaaaaggtttctggcatttgaagtcaaagagtattcagcgttggatgaattacaaaaggaatttgaaactgcaggacttaagaagcttttctccgaatttgtacttgctctggtaaaatgaaatggaagacaggaatcttttagtaaaatagcagtgttttttgttgtttttgcattggatttggggagtggttaattgaaatagtcaattttaaagtttctctgaagcaaaatgataggcatcattctaacttcaggaacaaaagccagttctgttttatgaaatattaaacatgaagaaaacttgtatattctaatgtttgccaggaaaggctaggttcagtagatgagacattatttaaaagataaatttaaaaagatggtaaatgaacacttgtttttatagacaatatttgtttgaaactatgtaattttctggctaattttcttgtaattaaatgattttttaaaaaagaaaaaanangacanacanaaaaaaaaacaa

SEQ ID NO: 296953 - DNA, 2080 bp, Homo sapiens
  misc_feature (2057)..(2057): n is a, c, g, or t
  misc_feature (2059)..(2059): n is a, c, g, or t
  misc_feature (2064)..(2064): n is a, c, g, or t
  misc_feature (2068)..(2068): n is a, c, g, or t
tggtaccggcccggccgtactgggatgcggaagcttgtccctttcgttctttgcaataaatcttgctactgctcactctttaggtctacactgcttttatgagctgtaacactcaccgcgaaggtctgcagcttcactcctgaagccagcaagaccacgaacctaccagaaggaagaaactctgaacacatctgaacatcagaaggaacaaactccagacgcgccaccttaagagctgtaacactcaccgcgaaggtccgcggcttcattcttcaagtcagtaagaccaagaacccaccaattccagacacactaccttggctcacggcaacttctgtctcctgggttcaagtgagtcttgtgcctcagcctcccaagtagctggcgattacaagttgaagaaatatggagatcaacacaaaactgctcatcagtgttacctgtatcagctttttcacctttcagcttcttttctactttgtaagttactggttttcagcaaaagtttctccaggtttcaatagtctcagcttcaaaaagaagattgaatggaactcaagggtagtatccacatgccattctttggtggttggtatttttggcctgtacattttcttattcgatgaggctactaaagctgatccactttggggtggtccatcacttgcaaacgtgaatattgctattgcctcaggctacctcatttctgatttgtccattataattttgtattggaaagtgattggtgacaaattttttataatgcatcattgtgcgtccctgtatgcatactaccttgtactgaaaaatggagtgctggcatacattgggaattttcgcctgcttgcagagctttccagcccgtttgtgaatcagcgaccaaaggctgtagtcactggaaacatggacttgttttcatctctaactctccacctctccacactcagcctgcagagcccggccaacaatcaagacagatgggaccgtgttcagaattcacacaaaagctgaaggatttatggatgcggatatacctctggaattggtgttccatttgccagtcaattatccttcatgtctacctggtatctcgattaactctgaacagttgaccagggcccagtgtgtgactgtgaaagagaagttacttgagcaagcagagagccttttgtcggagcctatggttcatgagctggttctctggattcagcagaatctcaggcatatcctcagccaaccagaaactggcagtggcagtgaaaagtgtactttttcaacaagcacgaccatggatgatggattgtggataactcttttgcatttagatcacatgagagcaaagactaaatatgtcaaaattgtggagaagtgggcttcagatttaaggctgacaggaagactgatgttcatgggtaaaataatactgattttactacagggagacagaaacaacctcaaggtgccagagtacttgattcttcagaaaacctccaaagtagatgtggactcaagtggaaagaaatgcaaagagaaaatgattagtgtactgtttgaaacaaaagtacagacagaacacaaaaggtttctggcatttgaagtcaaagagtattcagcgttggatgaattacaaaaggaatttgaaactgcaggacttaagaagcttttctccgaatttgtacttgctctggtaaaatgaaatggaagacaggaatcttttagtaaaatagcagtgttttttgttgtttttgcattggatttggggagtggttaattgaaatagtcaattttaaagtttctctgaagcaaaatgataggcatcattctaacttcaggaacaaaagccagttctgttttatgaaatattaaacatgaagaaaacttgtatattctaatgtttgccaggaaaggctaggttcagtagatgagacattatttaaaagataaatttaaaaagatggtaaatgaacacttgtttttatagacaatatttgtttgaaactatgtaattttctggctaattttcttgtaattaaatgattttttaaaaaagaaaaaanangacanacanaaaaaaaaacaa

SEQ ID NO: 296954 - DNA, 1163 bp, Homo sapiens
  misc_feature (53)..(53): n is a, c, g, or t
  misc_feature (1140)..(1140): n is a, c, g, or t
  misc_feature (1142)..(1142): n is a, c, g, or t
  misc_feature (1147)..(1147): n is a, c, g, or t
  misc_feature (1151)..(1151): n is a, c, g, or t
aaaatttttttatcaacggctccgcggttttgagttgtagaggccaaggttantagacagatgggaccgtgttcagaattcacacaaaagctgaaggatttatggatgcggatatacctctggaattggtgttccatttgccagtcaattatccttcatgtctacctggtatctcgattaactctgaacagttgaccagggcccagtgtgtgactgtgaaagagaagttacttgagcaagcagagagccttttgtcggagcctatggttcatgagctggttctctggattcagcagaatctcaggcatatcctcagccaaccagaaactggcagtggcagtgaaaagtgtactttttcaacaagcacgaccatggatgatggattgtggataactcttttgcatttagatcacatgagagcaaagactaaatatgtcaaaattgtggagaagtgggcttcagatttaaggctgacaggaagactgatgttcatgggtaaaataatactgattttactacagggagacagaaacaacctcaaggtgccagagtacttgattcttcagaaaacctccaaagtagatgtggactcaagtggaaagaaatgcaaagagaaaatgattagtgtactgtttgaaacaaaagtacagacagaacacaaaaggtttctggcatttgaagtcaaagagtattcagcgttggatgaattacaaaaggaatttgaaactgcaggacttaagaagcttttctccgaatttgtacttgctctggtaaaatgaaatggaagacaggaatcttttagtaaaatagcagtgttttttgttgtttttgcattggatttggggagtggttaattgaaatagtcaattttaaagtttctctgaagcaaaatgataggcatcattctaacttcaggaacaaaagccagttctgttttatgaaatattaaacatgaagaaaacttgtatattctaatgtttgccaggaaaggctaggttcagtagatgagacattatttaaaagataaatttaaaaagatggtaaatgaacacttgtttttatagacaatatttgtttgaaactatgtaattttctggctaattttcttgtaattaaatgattttttaaaaaagaaaaaanangacanacanaaaaaaaaacaa

SEQ ID NO: 296955 - DNA, 1036 bp, Homo sapiens
  misc_feature (1013)..(1013): n is a, c, g, or t
  misc_feature (1015)..(1015): n is a, c, g, or t
  misc_feature (1020)..(1020): n is a, c, g, or t
  misc_feature (1024)..(1024): n is a, c, g, or t
ggcttgtgctctcaagtgtgccatggcgctatatctagatactcctctagtgctttgcatgtattatctcatttaattagtacaacttccccatgaggtagatcctgctattaattccattttatggagaaggcaactgagccacagaggatttaagtaaccagcccagagtaagaactagtaggcagttcaatccagatttaaacttgaggagttggattatattgttctttactcctgtatccaccactacattattctgccaagtatgttaaaacaagtatataaaaattcttactgcttgatttaaaaagggggtatttaagcatgaaaataagcctacaggtttatagctcctttaaaactgggactttgagactcagagtaagatatgtatttaatgtactgatttattatttaggagtacttgattcttcagaaaacctccaaagtagatgtggactcaagtggaaagaaatgcaaagagaaaatgattagtgtactgtttgaaacaaaagtacagacagaacacaaaaggtttctggcatttgaagtcaaagagtattcagcgttggatgaattacaaaaggaatttgaaactgcaggacttaagaagcttttctccgaatttgtacttgctctggtaaaatgaaatggaagacaggaatcttttagtaaaatagcagtgttttttgttgtttttgcattggatttggggagtggttaattgaaatagtcaattttaaagtttctctgaagcaaaatgataggcatcattctaacttcaggaacaaaagccagttctgttttatgaaatattaaacatgaagaaaacttgtatattctaatgtttgccaggaaaggctaggttcagtagatgagacattatttaaaagataaatttaaaaagatggtaaatgaacacttgtttttatagacaatatttgtttgaaactatgtaattttctggctaattttcttgtaattaaatgattttttaaaaaagaaaaaanangacanacanaaaaaaaaacaa

SEQ ID NO: 296956 - DNA, 2703 bp, Homo sapiens
gcggccgcggcccctttaaggagcagctctgcggtaacccgagcccgcagtccgggcgggcgcgacggccgccgcggtagctggagcctccgcgactgcacctccaagcggcccggaacccgcggcttccctggctcccgtgagcatctcaccgggcggcactggccagcgccagccctcgggccggcccggatgaccagactcctgtagacacccgccgccctctcccggctcggcgcagccgccgcccgcgcgcgactcgccccgggacccggcacaggttgaagaaatatggagatcaacacaaaactgctcatcagtgttacctgtatcagctttttcacctttcagcttcttttctactttgtaagttactggttttcagcaaaagtttctccaggtttcaatagtctcagcttcaaaaagaagattgaatggaactcaagggtagtatccacatgccattctttggtggttggtatttttggcctgtacattttcttattcgatgaggctactaaagctgatccactttggggtggtccatcacttgcaaacgtgaatattgctattgcctcaggctacctcatttctgatttgtccattataattttgtattggaaagtgattggtgacaaattttttataatgcatcattgtgcgtccctgtatgcatactaccttgtactgaaaaatggagtgctggcatacattgggaattttcgcctgcttgcagagctttccagcccgtttgtgaatcagcgaccaaaggctgtagtcactggaaacatggacttgttttcatctctaactctccacctctccacactcagcctgcagagcccggccaacaatcaagacagatgggaccgtgttcagaattcacacaaaagctgaaggatttatggatgcggatatacctctggaattggtgttccatttgccagtcaattatccttcatgtctacctggtatctcgattaactctgaacagttgaccagggcccagtgtgtgactgtgaaagagaagttacttgagcaagcagagagccttttgtcggagcctatggttcatgagctggttctctggattcagcagaatctcaggcatatcctcagccaaccagaaactggcagtggcagtgaaaagtgtactttttcaacaagcacgaccatggatgatggattgtggataactcttttgcatttagatcacatgagagcaaagactaaatatgtcaaaattgtggagaagtgggcttcagatttaaggctgacaggaagactgatgttcatgggtaaaataatactgattttactacagggagacagaaacaacctcaaggtgccaaaaagttaaatgttgagtatgaatctggctattttctgctttaaatggtgtgtctttaagtgtgttttataacaatgggatagattaattattaagatgtttctgctttcattattacaaccttaatggatcttccttttctttttaaagaatgtctgactgctaattacaagtacaaacttgcaaagcttgaagaataagattgcattttaaaaatcatgtcacttaataaagtgacaggttatttaaaagctctgtggcacatgagtgtttgtttctgtaattagctatgagcttgaattttataaatgtgcactaaaagtttgtgcatattaatatttcttcccatagttaggcacagcaaggtgtgtatttgtggatagtctgcaagatttgtaactttctggctgttaaaaatacattctgacactttaatttggtatctataatacctggaaagaggagcttgtctgttataaccgagatttcatgttagtagaagtagaatcattagggctgtcaacttgtcacctcctacctaacttttgctttccacctgacttgtctcagcagttgctttcaaaatcatcatcttcttcagatttttcaagttcttattctaaactcatctgacctgttttaggtgggacaagatgaggaaaactgttttttatattttaaatattagaagagctacaaatcaataggttttatactttcagataggttaggtcatgaataattacatttgaatttatttaagacaaatttagtgtgaacagtgaatttatttaagacaaatcttaaagatttgtagaataatgacttagttttttcatgatgggctcttaccacaaaactgctttggcatttggttaaccagactcatgctgggttaaagtatatagatataacagtaattcagatttaatgcatatcttggattgggactgactgaggaacctcttgttttaaagtgatttgtagtatatctataacgtttgatccttttgggtaaaatagtagctgacaaaaaataaatacaaattaattttcatgctcatctttacctgaaagactcagatttctctttaagccagctcaggaatattaggctaaacccagctgttttgcagatgttcttactcagattgaaacatcaattaattaacaggtatctattcatatttaactagaaccctgctaatgtagagaaataatacttttttaggagatcttttttcagttctctctaaaatgtcattttatataaatttctcttatatttttataagattgtatactaggattgaggatgtataggtacatatttatagatgctatcaatttgg

SEQ ID NO: 296957 - DNA, 737 bp, Homo sapiens
ctaaatgtttcccccaagaaaaagggagaaaactaggtgcacggctctcttatcttaccccgctacagaccaaaggctgtagtcactggaaacatggacttgttttcatctctaactctccacctctccacactcagcctgcagagcccggccaacaatcagtttctggcatttgaagtcaaagagtattcagcgttggatgaattacaaaaggaatttgaaactgcaggacttaagaagcttttctccgaatttgtacttgctctggtaaaatgaaatggaagacaggaatcttttagtaaaatagcagtgttttttgttgtttttgcattggatttggggagtggttaattgaaatagtcaattttaaagtttctctgaagcaaaatgataggcatcattctaacttcaggaacaaaagccagttctgttttatgaaatattaaacatgaagaaaacttgtatattctaatgtttgccaggaaaggctaggttcagtagatgagacattatttaaaagataaatttaaaaagatggtaaatgaacacttgtttttatagacaatatttgtttgaaactatgtaattttctggctaattttcttgtaattaaatgattttttaaaaaagatttgttttcatgtttacttttcttatgtttatatttttagcatttgatcgccattttcccccatccaggttatgtctaatgttttaataaatgttaagaaaaatac

SEQ ID NO: 296958 - DNA, 441 bp, Homo sapiens
gggaagcatggtatcaacgcagagggcccattacggcggtggggcccacagccatggcggagcctgtgcaggaggagctctcggtcctggccgcgattttctgcaggccccacgagtgggaggtgctgagccgctcagagacactccacatttgagtcaaaattgctaaagtgaagaatattgtgaagaaccacccataaatcaggcctgaaatatttcttccgtggttaccaagttatcggaactccccacaagatcctcagtgtggactgagaaagaggaagctgtgcagaaggactagctactatagataactgagccacttgagcatgcagcttagttgtacctttgggacccacttgtgcctgatctcatatatattacttcatctacacatgcccaactttacaatttcatgaataaagtaattcccagttcgtg

SEQ ID NO: 296959 - DNA, 1153 bp, Homo sapiens
gggaagcatggtatcaacgcagagggcccattacggcggtggggcccacagccatggcggagcctgtgcaggaggagctctcggtcctggccgcgattttctgcaggccccacgagtgggaggtgctgagccgctcagaccagaaaataacacagagacaaaactgaaaactgatcacatgagagcaacagactcaacatatgtcaacaatcgtggacaagctgggctcccagatctcaaggctgaccggcacagactgcatgttcactgggagctacctgacttcttcacgcaaacacctccaacagctagcatgtggacctcaacgtggaaaagacaactgcaccgagaaccactgacttagcgctactgctccgaccacacacacgctacccgacagaacacaacaaggtttctcggcactctcgaaccgtcaccagccgctacttcagccgctcggactgaactccaccaacaccacggaccctcctgaacaccctgcacggactccacggaacgcctttttccttccccacattctcgtaccttgcctcccggtacacactgacacacggaaacgacccgcgaactccttcccagccaccccatcacgccagcgccccaccccgcccgccccccggcgcatctgcgccctctccgcgggggacgccgcgctccacctggcaccactagcccacactcctcaccacgctctccccctgccccgccccccactgcaccacggcccttcactccctaaacctccccgcggacaccccaagcccagctacagcacctcatgcgaaacatcactcacccccttgccagcgaaccccctcggtccatcatcctacatgcctccgccccaggcccccgcggccccagcgccacggctacgcaatgcacccacccaccccactccaaccccccaacacacgctccacccacacgactgcgcccaccctgcagcccccccccgccccccatccccacccaaccacccgccccgcgaacccaatgttcagccccccggcgcatcccccccccggtcatccacacgcaccccccaccccccccaccaaccaccacaccagcccacccacacacccagccgcgccccgcccccccccccccccccccacccccccccccg

SEQ ID NO: 296960 - DNA, 1966 bp, Homo sapiens
  misc_feature (1943)..(1943): n is a, c, g, or t
  misc_feature (1945)..(1945): n is a, c, g, or t
  misc_feature (1950)..(1950): n is a, c, g, or t
  misc_feature (1954)..(1954): n is a, c, g, or t
gcggccgcggcccctttaaggagcagctctgcggtaacccgagcccgcagtccgggcgggcgcgacggccgccgcggtagctggagcctccgcgactgcacctccaagcggcccggaacccgcggcttccctggctcccgtgagcatctcaccgggcggcactggccagcgccagccctcgggccggcccggatgaccagactcctgtagacacccgccgccctctcccggctcggcgcagccgccgcccgcgcgcgactcgccccgggacccggcacaggttgaagaaatatggagatcaacacaaaactgctcatcagtgttacctgtatcagctttttcacctttcagcttcttttctactttgtaagttactggttttcagcaaaagtttctccaggtttcaatagtctcagcttcaaaaagaagattgaatggaactcaagggtagtatccacatgccattctttggtggttggtatttttggcctgtacattttcttattcgatgaggctactaaagctgatccactttggggtggtccatcacttgcaaacgtgaatattgctattgcctcaggctacctcatttctgatttgtccattataattttgtattggaaagtgattggtgacaaattttttataatgcatcattgtgcgtccctgtatgcatactaccttgtactgaaaaatggagtgctggcatacattgggaattttcgcctgcttgcagagctttccagcccgtttgtgaatcagcgaccaaaggctgtagtcactggaaacatggacttgttttcatctctaactctccacctctccacactcagcctgcagagcccggccaacaatcaagacagatgggaccgtgttcagaattcacacaaaagctgaaggatttatggatgcggatatacctctggaattggtgttccatttgccagtcaattatccttcatgtctacctggtatctcgattaactctgaacagttgaccagggcccagtgtgtgactgtgaaagagaagttacttgagcaagcagagagccttttgtcggagcctatggttcatgagctggttctctggattcagcagaatctcaggcatatcctcagccaaccagaaactggcagtggcagtgaaaagtgtactttttcaacaagcacgaccatggatgatggattgtggataactcttttgcatttagatcacatgagagcaaagactaaatatgtcaaaattgtggagaagtgggcttcagatttaaggctgacaggaagactgatgttcatgggtaaaataatactgattttactacagggagacagaaacaacctcaaggtgccagagtacttgattcttcagaaaacctccaaagtagatgtggactcaagtggaaagaaatgcaaagagaaaatgattagtgtactgtttgaaacaaaagtacagacagaacacaaaaggtttctggcatttgaagtcaaagagtattcagcgttggatgaattacaaaaggaatttgaaactgcaggacttaagaagcttttctccgaatttgtacttgctctggtaaaatgaaatggaagacaggaatcttttagtaaaatagcagtgttttttgttgtttttgcattggatttggggagtggttaattgaaatagtcaattttaaagtttctctgaagcaaaatgataggcatcattctaacttcaggaacaaaagccagttctgttttatgaaatattaaacatgaagaaaacttgtatattctaatgtttgccaggaaaggctaggttcagtagatgagacattatttaaaagataaatttaaaaagatggtaaatgaacacttgtttttatagacaatatttgtttgaaactatgtaattttctggctaattttcttgtaattaaatgattttttaaaaaagaaaaaanangacanacanaaaaaaaaacaa

SEQ ID NO: 296961 - DNA, 1913 bp, Homo sapiens
  misc_feature (1890)..(1890): n is a, c, g, or t
  misc_feature (1892)..(1892): n is a, c, g, or t
  misc_feature (1897)..(1897): n is a, c, g, or t
  misc_feature (1901)..(1901): n is a, c, g, or t
gcggccgcggcccctttaaggagcagctctgcggtaacccgagcccgcagtccgggcgggcgcgacggccgccgcggtagctggagcctccgcgactgcacctccaagcggcccggaacccgcggcttccctggctcccgtgagcatctcaccgggcggcactggccagcgccagccctcgggccggcccggatgaccagactcctgtagacacccgccgccctctcccggctcggcgcagccgccgcccgcgcgcgactcgccccgggacccggcacaggttgaagaaatatggagatcaacacaaaactgctcatcagtgttacctgtatcagctttttcacctttcagcttcttttctactttgtaagttactggttttcagcaaaagtttctccaggtttcaatagtctcagcttcaaaaagaagattgaatggaactcaagggtagtatccacatgccattctttggtggttggtatttttggcctgtacattttcttattcgatgaggctactaaagctgatccactttggggtggtccatcacttgcaaacgtgaatattgctattgcctcaggctacctcatttctgatttgtccattataattttgtattggaaagtgattggtgacaaattttttataatgcatcattgtgcgtccctgtatgcatactaccttgtactgaaaaatggagtgctggcatacattgggaattttcgcctgcttgcagagctttccagcccgtttgtgaatcagcgaccaaaggctgtagtcactggaaacatggacttgttttcatctctaactctccacctctccacactcagcctgcagagcccggccaacaatcaagacagatgggaccgtgttcagaattcacacaaaagctgaaggatttatggatgcggatatacctctggaattggtgttccatttgccagtcaattatccttcatgtctacctggtatctcgattaactctgaacagttgaccagggcccagtgtgtgactgtgaaagagaagttacttgagcaagcagagagccttttgtcggagcctatggttcatgagctggttctctggattcagcagaatctcaggcatatcctcagccaaccagaaactggcagtggcagtgaaaagtgtactttttcaacaagcacgaccatggatgatggattgtggataactcttttgcatttagatcacatgagagcaaagactaaatatgtcaaaattgtggagaagtgggcttcagatttaaggctgacaggaagactgatgttcatgggagtacttgattcttcagaaaacctccaaagtagatgtggactcaagtggaaagaaatgcaaagagaaaatgattagtgtactgtttgaaacaaaagtacagacagaacacaaaaggtttctggcatttgaagtcaaagagtattcagcgttggatgaattacaaaaggaatttgaaactgcaggacttaagaagcttttctccgaatttgtacttgctctggtaaaatgaaatggaagacaggaatcttttagtaaaatagcagtgttttttgttgtttttgcattggatttggggagtggttaattgaaatagtcaattttaaagtttctctgaagcaaaatgataggcatcattctaacttcaggaacaaaagccagttctgttttatgaaatattaaacatgaagaaaacttgtatattctaatgtttgccaggaaaggctaggttcagtagatgagacattatttaaaagataaatttaaaaagatggtaaatgaacacttgtttttatagacaatatttgtttgaaactatgtaattttctggctaattttcttgtaattaaatgattttttaaaaaagaaaaaanangacanacanaaaaaaaaacaa

SEQ ID NO: 296962 - DNA, 1855 bp, Homo sapiens
  misc_feature (1832)..(1832): n is a, c, g, or t
  misc_feature (1834)..(1834): n is a, c, g, or t
  misc_feature (1839)..(1839): n is a, c, g, or t
  misc_feature (1843)..(1843): n is a, c, g, or t
ccgggcgccccgcattcctctcgcgtttctcgggctgcacgattccggctgccctgtctgcctggcggtgcctctcgggtctgagcttaaagcgggtgggtgcaaacctttgggcatccagggagagctttcttgttagagcccacacacaatcgggcgcatcaagtgggttgaagaaatatggagatcaacacaaaactgctcatcagtgttacctgtatcagctttttcacctttcagcttcttttctactttgtaagttactggttttcagcaaaagtttctccaggtttcaatagtctcagcttcaaaaagaagattgaatggaactcaagggtagtatccacatgccattctttggtggttggtatttttggcctgtacattttcttattcgatgaggctactaaagctgatccactttggggtggtccatcacttgcaaacgtgaatattgctattgcctcaggctacctcatttctgatttgtccattataattttgtattggaaagtgattggtgacaaattttttataatgcatcattgtgcgtccctgtatgcatactaccttgtactgaaaaatggagtgctggcatacattgggaattttcgcctgcttgcagagctttccagcccgtttgtgaatcagcgaccaaaggctgtagtcactggaaacatggacttgttttcatctctaactctccacctctccacactcagcctgcagagcccggccaacaatcaagacagatgggaccgtgttcagaattcacacaaaagctgaaggatttatggatgcggatatacctctggaattggtgttccatttgccagtcaattatccttcatgtctacctggtatctcgattaactctgaacagttgaccagggcccagtgtgtgactgtgaaagagaagttacttgagcaagcagagagccttttgtcggagcctatggttcatgagctggttctctggattcagcagaatctcaggcatatcctcagccaaccagaaactggcagtggcagtgaaaagtgtactttttcaacaagcacgaccatggatgatggattgtggataactcttttgcatttagatcacatgagagcaaagactaaatatgtcaaaattgtggagaagtgggcttcagatttaaggctgacaggaagactgatgttcatgggtaaaataatactgattttactacagggagacagaaacaacctcaaggtgccagagtacttgattcttcagaaaacctccaaagtagatgtggactcaagtggaaagaaatgcaaagagaaaatgattagtgtactgtttgaaacaaaagtacagacagaacacaaaaggtttctggcatttgaagtcaaagagtattcagcgttggatgaattacaaaaggaatttgaaactgcaggacttaagaagcttttctccgaatttgtacttgctctggtaaaatgaaatggaagacaggaatcttttagtaaaatagcagtgttttttgttgtttttgcattggatttggggagtggttaattgaaatagtcaattttaaagtttctctgaagcaaaatgataggcatcattctaacttcaggaacaaaagccagttctgttttatgaaatattaaacatgaagaaaacttgtatattctaatgtttgccaggaaaggctaggttcagtagatgagacattatttaaaagataaatttaaaaagatggtaaatgaacacttgtttttatagacaatatttgtttgaaactatgtaattttctggctaattttcttgtaattaaatgattttttaaaaaagaaaaaanangacanacanaaaaaaaaacaa

SEQ ID NO: 296963 - DNA, 1179 bp, Homo sapiens
  misc_feature (1156)..(1156): n is a, c, g, or t
  misc_feature (1158)..(1158): n is a, c, g, or t
  misc_feature (1163)..(1163): n is a, c, g, or t
  misc_feature (1167)..(1167): n is a, c, g, or t
ttttcaagactttccccctggactaccaacatgtttctttcctgtggttccctgcaccagagaggacccgagacagatgggaccgtgttcagaattcacacaaaagctgaaggatttatggatgcggatatacctctggaattggtgttccatttgccagtcaattatccttcatgtctacctggtatctcgattaactctgaacagttgaccagggcccagtgtgtgactgtgaaagagaagttacttgagcaagcagagagccttttgtcggagcctatggttcatgagctggttctctggattcagcagaatctcaggcatatcctcagccaaccagaaactggcagtggcagtgaaaagtgtactttttcaacaagcacgaccatggatgatggattgtggataactcttttgcatttagatcacatgagagcaaagactaaatatgtcaaaattgtggagaagtgggcttcagatttaaggctgacaggaagactgatgttcatgggtaaaataatactgattttactacagggagacagaaacaacctcaaggtgccagagtacttgattcttcagaaaacctccaaagtagatgtggactcaagtggaaagaaatgcaaagagaaaatgattagtgtactgtttgaaacaaaagtacagacagaacacaaaaggtttctggcatttgaagtcaaagagtattcagcgttggatgaattacaaaaggaatttgaaactgcaggacttaagaagcttttctccgaatttgtacttgctctggtaaaatgaaatggaagacaggaatcttttagtaaaatagcagtgttttttgttgtttttgcattggatttggggagtggttaattgaaatagtcaattttaaagtttctctgaagcaaaatgataggcatcattctaacttcaggaacaaaagccagttctgttttatgaaatattaaacatgaagaaaacttgtatattctaatgtttgccaggaaaggctaggttcagtagatgagacattatttaaaagataaatttaaaaagatggtaaatgaacacttgtttttatagacaatatttgtttgaaactatgtaattttctggctaattttcttgtaattaaatgattttttaaaaaagaaaaaanangacanacanaaaaaaaaacaa

SEQ ID NO: 296964 - DNA, 1516 bp, Homo sapiens
gcggccgcggcccctttaaggagcagctctgcggtaacccgagcccgcagtccgggcgggcgcgacggccgccgcggtagctggagcctccgcgactgcacctccaagcggcccggaacccgcggcttccctggctcccgtgagcatctcaccgggcggcactggccagcgccagccctcgggccggcccggatgaccagactcctgtagacacccgccgccctctcccggctcggcgcagccgccgcccgcgcgcgactcgccccgggacccggcacaggttgaagaaatatggagatcaacacaaaactgctcatcagtgttacctgtatcagctttttcacctttcagcttcttttctactttgtaagttactggttttcagcaaaagtttctccaggtttcaatagtctcagcttcaaaaagaagattgaatggaactcaagggtagtatccacatgccattctttggtggttggtatttttggcctgtacattttcttattcgatgaggctactaaagctgatccactttggggtggtccatcacttgcaaacgtgaatattgctattgcctcaggctacctcatttctgatttgtccattataattttgtattggaaagtgattggtgacaaattttttataatgcatcattgtgcgtccctgtatgcatactaccttgtactgaaaaatggagtgctggcatacattgggaattttcgcctgcttgcagagctttccagcccgtttgtgaatcagcggtggttctttgaagctctgaagtatcccaagttttctaaagctatcgttatcaatggaatactcatgacagtagtattcttcatcgtgcggattgcctcaatgcttcctcattatggcttcatgtattccgtgtatggaacagaaccctacataaggcttggagttttaatccagttatcctgggtcattagttgtgttgttttggatgtgatgaatgtcatgtggatgatcaaaatttcaaaaggttgcatcaaagtcatctctcacatcagacaagagaaagccaaaaatagtcttcagaatggaaaacttgattaaaagagtgctaccgataagcaaacttcattactacccagcatatctgctgataggatgaattcttggcatgttcttgtgtacctttcttaattataattgttattcaggatttcagtgtcattttttttaaaccttagaaaagagaaggccgggcacggtggctcatgcctgtaatcccagcactttgggaggccaaggtgggtcgatcactgaggtcaggagttcgagactagcttggccaacatggtgaaacctcatctctactaaaaatacaaaaaaaagtagctgggcgtggtggttggcgcctgtaatcccagctactcgggaggctgaggcaggagaatcgcttgaacccgagagacggaggttgcagtgagctgatattgtgccactgcactccagcctgggcgacagagcaagactctgtctcaaa

SEQ ID NO: 296965 - DNA, 1441 bp, Homo sapiens
tcagattcaaccttgaggacattagaaatatagatggcttctgtatccaaatctgaatggaaatgagattacccttctgggttcagatacccctcccaagcccccgtcttttctgtaaccacccctcctctgagccccatcatggctggggttggtatggaatgggagcagctctgtatctggggaagtcctccagcctcaccttcttggctcttaagtggtaggctgttaccacttgccagcctgggcctcctctctccccaccctttcacaaggcaggctgcccttccgcactcactggcccatcccttctttctcatcgtcccacccttccacccccgtgcatggctgctgtaggtctggtttttttggtttttgttttttttaagacggagtctcactctgccgccaggctggagtgcagtggcagaatcttggctcactgcaacctctgcctcccgggttcaagcgattctcctgcctcagcctcccgagtagctgggactacaggcacgtgccaccatatccagctaatttttgtatttttagtagagatggggtttcaccatgttggccaggatctcttgacctcgtgatctgcccgcctcggcctcccaaagtgctgtgattacaggcgtgagccaccgtgcctagccaggtcttgttttgaaaacctcactgtgggagattcaggcatcctccctaagccagctggccgctgtgctaaagcctgttcagagttaataataatcattagctgaatggtgctggggcctttcagcttcagatctctaagcacttgcaggctgagtcagtcagccctcaccttccccctccttcctgggctgcagagtgtaacagaatgggaaggcactgtgggaaggaagtcaggaatcttgctgctagccacgccttgcagtgacttctcgtctgggagtgggcactgagtcctctcagtaaactaataagacttgcacctgacaaaggtcaagatatgtagggaacacagtgtatgctaggctgagacctatggtggtggcaggggtggctgttgagcctgaacttccagtactcctgcccttccttctgtttacctggcttggcctacagggggcacccctggtcttgatgcctcaagcccagcatttctgggtcccctctgcaagctcagagagcagggaggcttctggtagtgctcttgatgctcctgtgtctggttggcacaaagatcctgtgtaacatgaaatgaaaggtgcatcagcttgggggctgggaaacctgcagtatgggtttactccgtccctatcactggtgtggctgtgggcaaaccacttattgcctgacctacctcacagggatgttgtgagggtttgatgagagaatgaatgttaataggaattggaaaattcaaagcattaaacacatgtaaacaggtggtatt

SEQ ID NO: 296966 - DNA, 1090 bp, Homo sapiens
cggaagacgtgttcgggcagctggagtgtacgggcccgcgggccacggccatgcagcccctggaggtaggtctggttcccgctccagctggggagccgagactgacccgctggctgcggagaggcagtgggatcttggcgcacctggtagctttgggcttcaccatctttctgacagcgctgtcccggccaggaaccaaaacaggtcccctgatggaggatagaagtgaaggaggccgggcgcggtgggtcatgcctgaaatcccaaagtgctgtgattacaggcgtgagccaccgtgcctagccaggtcttgttttgaaaacctcactgtgggagattcaggcatcctccctaagccagctggccgctgtgctaaagcctgttcagagttaataataatcattagctgaatggtgctggggcctttcagcttcagatctctaagcacttgcaggctgagtcagtcagccctcaccttccccctccttcctgggctgcagagtgtaacagaatgggaaggcactgtgggaaggaagtcaggaatcttgctgctagccacgccttgcagtgacttctcgtctgggagtgggcactgagtcctctcagtaaactaataagacttgcacctgacaaaggtcaagatatgtagggaacacagtgtatgctaggctgagacctatggtggtggcaggggtggctgttgagcctgaacttccagtactcctgcccttccttctgtttacctggcttggcctacagggggcacccctggtcttgatgcctcaagcccagcatttctgggtcccctctgcaagctcagagagcagggaggcttctggtagtgctcttgatgctcctgtgtctggttggcacaaagatcctgtgtaacatgaaatgaaaggtgcatcagcttgggggctgggaaacctgcagtatgggtttactccgtccctatcactggtgtggctgtgggcaaaccacttattgcctgacctacctcacagggatgttgtgagggtttgatgagagaatgaatgttaataggaattggaaaattcaaagcattaaacacatgtaaacaggtggtatt

SEQ ID NO: 296967 - DNA, 2007 bp, Homo sapiens
caaggcctgacaacagctgagccaggaaagtgctgctgaggcaagtcgacatagctcacagggaactctgggaagcctgggatgtaggcgctggagctccagttcccaggagcaggggcaggtgttcctagatgttagtgttgtggatgtccttggtcttctgaagattcaggtcctcctctccgggtagcttagaagtaaggaggttggtttgattcaatagtatggggacagaatggggacagcaagggcagaagtgtcctctccacgtaactcattatgcccctcctgggggagattgcatctccaggacaagcatctaaaggaggcccctgctgtgcagaggggtattgttcctgtctctttcattgtcctccctcctctcaaactctccagtgtggtgtgaactcagaagaaacggttactggggctgcatggagaatttcacctgcggtgattttgatccagggactgcatctcctctttcctcatcacagccagtgctgagaggctccttctacctgccgcagggtaggagggccaggcaaagttcaccagcttgctctaagagcaagcaggcaatgccgtaaagcctgagcctgcctgaggtgctgcctcctcccaggtggtgcgggggctggtgggcgggcgggcaggcgtgctgacagccggcagtttgcgtgggctgtgccatctgatgtctattcccagccctgggaggaagggggagtcatttatattctgcaggaggaaggggccccacctcaccttcttggctcttaagtggtaggctgttaccacttgccagcctgggcctcctctctccccaccctttcacaaggcaggctgcccttccgcactcactggcccatcccttctttctcatcgtcccacccttccacccccgtgcatggctgctgtaggtctggtttttttggtttttgttttttttaagacggagtctcactctgccgccaggctggagtgcagtggcagaatcttggctcactgcaacctctgcctcccgggttcaagcgattctcctgcctcagcctcccgagtagctgggactacaggcacgtgccaccatatccagctaatttttgtatttttagtagagatggggtttcaccatgttggccaggatctcttgacctcgtgatctgcccgcctcggcctcccaaagtgctgtgattacaggcgtgagccaccgtgcctagccaggtcttgttttgaaaacctcactgtgggagattcaggcatcctccctaagccagctggccgctgtgctaaagcctgttcagagttaataataatcattagctgaatggtgctggggcctttcagcttcagatctctaagcacttgcaggctgagtcagtcagccctcaccttccccctccttcctgggctgcagagtgtaacagaatgggaaggcactgtgggaaggaagtcaggaatcttgctgctagccacgccttgcagtgacttctcgtctgggagtgggcactgagtcctctcagtaaactaataagacttgcacctgacaaaggtcaagatatgtagggaacacagtgtatgctaggctgagacctatggtggtggcaggggtggctgttgagcctgaacttccagtactcctgcccttccttctgtttacctggcttggcctacagggggcacccctggtcttgatgcctcaagcccagcatttctgggtcccctctgcaagctcagagagcagggaggcttctggtagtgctcttgatgctcctgtgtctggttggcacaaagatcctgtgtaacatgaaatgaaaggtgcatcagcttgggggctgggaaacctgcagtatgggtttactccgtccctatcactggtgtggctgtgggcaaaccacttattgcctgacctacctcacagggatgttgtgagggtttgatgagagaatgaatgttaataggaattggaaaattcaaagcattaaacacatgtaaacaggtggtatt

SEQ ID NO: 296968 - DNA, 1876 bp, Homo sapiens
agggagacatgattacgtggcggaaagatcctaatggtgtgtcctggatgtatcctaatcttagaagtaaggaggttggtttgattcaatagtatggggacagaatggggacagcaagggcagaagtgtcctctccacgtaactcattatgcccctcctgggggagattgcatctccaggacaagcatctaaaggaggcccctgctgtgcagaggggtattgttcctgtctctttcattgtcctccctcctctcaaactctccagtgtggtgtgaactcagaagaaacggttactggggctgcatggagaatttcacctgcggtgattttgatccagggactgcatctcctctttcctcatcacagccagtgctgagaggctccttctacctgccgcagggtaggagggccaggcaaagttcaccagcttgctctaagagcaagcaggcaatgccgtaaagcctgagcctgcctgaggtgctgcctcctcccaggtggtgcgggggctggtgggcgggcgggcaggcgtgctgacagccggcagtttgcgtgggctgtgccatctgatgtctattcccagccctgggaggaagggggagtcatttatattctgcaggaggaaggggccccacctcaccttcttggctcttaagtggtaggctgttaccacttgccagcctgggcctcctctctccccaccctttcacaaggcaggctgcccttccgcactcactggcccatcccttctttctcatcgtcccacccttccacccccgtgcatggctgctgtaggtctggtttttttggtttttgttttttttaagacggagtctcactctgccgccaggctggagtgcagtggcagaatcttggctcactgcaacctctgcctcccgggttcaagcgattctcctgcctcagcctcccgagtagctgggactacaggcacgtgccaccatatccagctaatttttgtatttttagtagagatggggtttcaccatgttggccaggatctcttgacctcgtgatctgcccgcctcggcctcccaaagtgctgtgattacaggcgtgagccaccgtgcctagccaggtcttgttttgaaaacctcactgtgggagattcaggcatcctccctaagccagctggccgctgtgctaaagcctgttcagagttaataataatcattagctgaatggtgctggggcctttcagcttcagatctctaagcacttgcaggctgagtcagtcagccctcaccttccccctccttcctgggctgcagagtgtaacagaatgggaaggcactgtgggaaggaagtcaggaatcttgctgctagccacgccttgcagtgacttctcgtctgggagtgggcactgagtcctctcagtaaactaataagacttgcacctgacaaaggtcaagatatgtagggaacacagtgtatgctaggctgagacctatggtggtggcaggggtggctgttgagcctgaacttccagtactcctgcccttccttctgtttacctggcttggcctacagggggcacccctggtcttgatgcctcaagcccagcatttctgggtcccctctgcaagctcagagagcagggaggcttctggtagtgctcttgatgctcctgtgtctggttggcacaaagatcctgtgtaacatgaaatgaaaggtgcatcagcttgggggctgggaaacctgcagtatgggtttactccgtccctatcactggtgtggctgtgggcaaaccacttattgcctgacctacctcacagggatgttgtgagggtttgatgagagaatgaatgttaataggaattggaaaattcaaagcattaaacacatgtaaacaggtggtatt

SEQ ID NO: 296969 - DNA, 1249 bp, Homo sapiens
caaggcctgacaacagctgagccaggaaagtgctgctgaggcaagtcgacatagctcacagggaactctgggaagcctgggatgtaggcgctggagctccagttcccaggagcaggggcaggtgttcctagatgttagtgttgtggatgtccttggtcttctgaagattcaggtcctcctctccgggtagcttagaagtaaggaggttggtttgattcaatagtatggggacagaatggggacagcaagggcagaagtgtcctctccacgtaactcattatgcccctcctgggggagattgcatctccaggacaagcatctaaaggaggcccctgctgtgcagaggggtattgttcctgtctctttcattgtcctccctcctctcaaactctccagtgtggtgtgaactcagaagaaacggttactggggctgcatggagaatttcacctgcggtgattttgatccagggactgcatctcctctttcctcatcacagccagtgctgagaggctccttctacctgccgcagggtaggagggccaggcaaagttcaccagcttgctctaagagcaagcaggcaatgccgtaaagcctgagcctgcctgaggtgctgcctcctcccaggtggtgcgggggctggtgggcgggcgggcaggcgtgctgacagccggcagtttgcgtgggctgtgccatctgatgtctattcccagccctgggaggaagggggagtcatttatattctgcaggaggaaggggccccagctgtcgcctttctgaccagcaggcctggagggcaggggcacagagcagagaggagggcactggtggtctcctgcttagcctggtctgactgcagtgtagggaataggtcaccaggaggagcccttcatcctggcaggccggattgtggagggacttccctccccctcttttccatttctccctccatcaccacctgccctcacatcctggggcagcagctggacagccattagacctcagtgccagggcactcttcctccagctgggatctcagtggctcccagctgcatgggctcctgcttgtgtgttccctcctccgccatcctctgttccccgcacctcccttattctgctcatgtctggggtattcacttggctcctcagcaaggaagcaaacgccttggaggagaagcacatggttgcccttttgtccttgctccctggctagggaaagctgctagtggtcagcctgttttgccttttttt

SEQ ID NO: 296970 - DNA, 1030 bp, Homo sapiens
caaggcctgacaacagctgagccaggaaagtgctgctgaggcaagtcgacatagctcacagggaactctgggaagcctgggatgtaggcgctggagctccagttcccaggagcaggggcaggtgttcctagatgttagtgttgtggatgtccttggtcttctgaagattcaggtcctcctctccgggtagcttagaagtaaggaggttggtttgattcaatagtatggggacagaatggggacagcaagggcagaagtgtcctctccacgtaactcattatgcccctcctgggggagattgcatctccaggacaagcatctaaaggaggcccctgctgtgcagaggggtattgttcctgtctctttcattgtcctccctcctctcaaactctccagtgtggtgtgaactcagaagaaacggttactggggctgcatggagaatttcacctgcggtgattttgatccagggactgcatctcctctttcctcatcacagccagtgctgagaggctccttctacctgccgcagggtaggagggccaggcaaagttcaccagcttgctctaagagcaagcaggcaatgccgtaaagcctgagcctgcctgaggtgctgcctcctcccaggtggtgcgggggctggtgggcgggcgggcaggcgtgctgacagccggcagtttgcgtgggctgtgccatctgatgtctattcccagccctgggaggaagggggagtcatttatattctgcaggaggaaggggccccacctcaccttcttggctcttaagtggtaggctgttaccacttgccagcctgggcctcctctctccccaccctttcacaaggcaggctgcccttccgcactcactggcccatcccttctttctcatcgtccctatcactggtgtggctgtgggcaaaccacttattgcctgacctacctcacagggatgttgtgagggtttgatgagagaatgaatgttaataggaattggaaaattcaaagcattaaacacatgtaaacaggtggtatt

SEQ ID NO: 296971 - DNA, 3405 bp, Homo sapiens
tcagagaagtgcttcaaattattttgtttggattaatttttaaaatgtaaagcatatacttgttgcttagttattttgtttattattttcatgtttgagttctgtgcaatattttctattatgtccgttgataggacagtgacaaaattcgtaagtgaatacttaatttaaaagtgttaacattaatgctcaataaacaaattccctgcagttgttttttttatttcactctttttatattttagagccatccatcctgaattttataaatgattttttatttaaaaatttgagatttttaaaatttttcacagcacaggtcttctcattttcttttttagcaaaaaatacttgactatataaacaagactagaaatttatcctaaacagatggtctttctctgagggaaaaaaaaaaatgtgtcatgtgaggcaatatgcattctttgtattctgattttttaagtgttttcatatttatagccatcacaaaattttgcccaaagtgtatggctcagaagagatgatcaataactaaaatgtttttcgttttgcacatggtaaaattttaggtagagagtggagctttgtataattggtaactttaaccaacatttacgtaagtacggtctttgcagtattacacaataccgcatgagctaatatgcagtatttaggtaatgcattgaatgaagttgaaaatatgctcttaacacactgtgcattgtttttctaaaattgagaaatatctgaaatacagaatacgaatttaataaaggaagcctaccttatgtaaattatgatgttgaaaatgacagtcaaccagagtagatgaagtgtccttatgaagaattattaaatagtagctggatggatctttagatggatgaccacctgaccattccaggacaatttttggtcccattttgaggattgccatagttgcaagtccttaggatcttccttgttttaaaaaactatcaaagtaggttaaattaaaatctaatttaaattaggttaatttatattacattgtagatcattcttttttcccccctctttcacttctaaatattttgctttctaaatactagccttctggttcacagtgaaataatttaattatcaatcagtagattgattccaagtggagaattcactgcttccctaaaatgcgtttttcttacctgtaatggtgaatatttacaaggatctggataaagagattttgatttttgaaatgccacaaaaccccttaaagtggtcaagtacctaaggtagtggctaaggcatgcttgaactgtgtttgagagacagcagttcagtcagtacataatttgttggtgactaacaaagctcacatctgggagattaactttttttaacgcaaaaatattctgcacattacccatatattgttgaattttacatacaaagcattttgtgctttcattcaattagtttaactatattcagtttctgtattatttctctctgatctatcctgtaattattctatactttagaagaaaagatcagttcatattgttagactgaataattctacatgaagttaaaagttagcaatttaaaaaattttgctgcataataaagataattatagttacatgtattgatttaagtctcacacactgtgctaataagtcctttgcacatattattggattctagagcaaccctaggatttgggtactattatttccatttgacagatgaaaaacctaatgcatagaaagataagtagaccagtcaaggtctacagctagtaaaatgctcagattgaaacctaaatcttttctcactcacttttaggttctatatgctattctccttacgtaacgttaaatagatcctttagtttgataggttcattagttttgcttaatcgttgcttccaatatgattcttattgtagtatttatattacaaagttggcatacagggtcaatatctaatttactgttgtgtttttcttaatatgttcaatgtatggtcatactttttaaatttgattttttaaatattataagtggtcatgaaattttaatgttaagtttgtacctaatagaaatatgtctatcacaaatctttattggtattattttatatacttttccagcttgataattttcacaatagaaagagaccaaatattttgtactatattttgtgacatagaagtaaatgacaactctaccttggaagatatgaagaaatcagtgtttttatgttcaaaaactattttaaatgtcataggcttgccaattgtgttaactatttagtacattggtagtttttaaatgactaatgctggagtgaaaatgtaaggcaaaatatttagtatattaacagtagatagtcattttcatgtaatcagaattgcatgttaagggttttaaaagctgtcataactcttaccttttatttctaccagtgatcaatcatttctctttacaaatttagggaggaaacaactgttcaaatgtataggggacagaaacctgacatttagagaacagaaattttaattgccaaattaaagcagctaggctgcccctgggcttaacaaaattcctatttttgaactagacccgaggtattttatcattattatttgataggtaccattaacctttgttttgtgattatcgacttttggggggaaagatgagtaattaaacacactcgcccattttctaagtggtttagaaggttgcagtctgcctcaccatacaaagccagtttaaataggaatatatcacatcatacttcacatagcagtcaacctcagaggaaagtcatttattcagaaggcatagattttgctagacagcagtgatgcattacaaatatataattatttgcactaatatttgagcaggtggaatggattagaacatggtcaacatcatgctgctgataacatgtatttttctatattaatatgtactgtgcaacatgtattaaaattgtcaataattcattttagccaagatactaatatttatattactgtgtttaagagacagtatccaactgagccacttttaatttaaaagtctgaaactggaattaagtttactttcaaaaatcacttaaattactttataatcagtgaaaggtcagtaaaatgtagaattataagtgcctagtgacttaataggaggaaatatggagggttaaggaaggaagtaggaacctggaataagaaagctaagtttcatttatagttccaatgagtgactttctttgttttcaccactgggaatcttaaatgaagaaagtgtcgtatcccttccagttatctttatgttaataaactaagtgaagtttggatagaactaacaaaggaattagtctccattggtggacttccagagtttt

SEQ ID NO: 296972 - DNA, 2102 bp, Homo sapiens
tcagagaagtgcttcaaattattttgtttggattaatttttaaaatgtaaagcatatacttgttgcttagttattttgtttattattttcatgtttgagttctgtgcaatattttctattatgtccgttgataggacagtgacaaaattcgtaagtgaatacttaatttaaaagtgttaacattaatgctcaataaacaaattccctgcagttgttttttttatttcactctttttatattttagagccatccatcctgaattttataaatgattttttatttaaaaatttgagatttttaaaatttttcacagcacaggtcttctcattttcttttttagcaaaaaatacttgactatataaacaagactagaaatttatcctaaacagatggtctttctctgagggaaaaaaaaaaatgtgtcatgtgaggcaatatgcattctttgtattctgattttttaagtgttttcatatttatagccatcacaaaattttgcccaaagtgtatggctcagaagagatgatcaataactaaaatgtttttcgttttgcacatggtaaaattttaggtagagagtggagctttgtataattggtaactttaaccaacatttacgtaagtacggtctttgcagtattacacaataccgcatgagctaatatgcagtatttaggtaatgcattgaatgaagttgaaaatatgctcttaacacactgtgcattgtttttctaaaattgagaaatatctgaaatacagaatacgaatttaataaaggaagcctaccttatgtaaattatgatgttgaaaatgacagtcaaccagagtagatgaagtgtccttatgaagaattattaaatagtagctggatggatctttagatggatgaccacctgaccattccaggacaatttttggtcccattttgaggattgccatagttgcaagtccttaggatcttccttgttttaaaaaactatcaaagtaggttaaattaaaatctaatttaaattaggttaatttatattacattgtagatcattcttttttcccccctctttcacttctaaatattttgctttctaaatactagccttctggttcacagtgaaataatttaattatcaatcagtagattgattccaagtggagaattcactgcttccctaaaatgcgtttttcttacctgtaatggtgaatatttacaaggatctggataaagagattttgatttttgaaatgccacaaaaccccttaaagtggtcaagtacctaaggtagtggctaaggcatgcttgaactgtgtttgagagacagcagttcagtcagtacataatttgttggtgactaacaaagctcacatctgggagattaactttttttaacgcaaaaatattctgcacattacccatatattgttgaattttacatacaaagcattttgtgctttcattcaattagtttaactatattcagtttctgtattatttctctctgatctatcctgtaattattctatactttagaagaaaagatcagttcatattgttagactgaataattctacatgaagttaaaagttagcaatttaaaaaattttgctgcataataaagataattatagttacatgtattgatttaagtctcacacactgtgctaataagtcctttgcacatattattggattctagagcaaccctaggatttgggtactattatttccatttgacagatgaaaaacctaatgcatagaaagataagtagaccagtcaaggtctacagctagtaaaatgctcagattgaaacctaaatcttttctcactcacttttaggttctatatgctattctccttacgtaacgttaaatagatcctttagtttgataggttcattagttttgcttaatcgttgcttccaatatgattcttattgtagtatttatattacaaagttggcatacagggtcaatatctaatttactgttgtgtttttcttaatatgttcaatgtatggtcatactttttaaatttgattttttaaatattataagtggtcatgaaattttaatgttaagtttgtacctaatagaaatatgtctatc

SEQ ID NO: 296973 - DNA, 1632 bp, Homo sapiens
tcagagaagtgcttcaaattattttgtttggattaatttttaaaatgtaaagcatatacttgttgcttagttattttgtttattattttcatgtttgagttctgtgcaatattttctattatgtccgttgataggacagtgacaaaattcgtaagtgaatacttaatttaaaagtgttaacattaatgctcaataaacaaattccctgcagttgttttttttatttcactctttttatattttagagccatccatcctgaattttataaatgattttttatttaaaaatttgagatttttaaaatttttcacagcacaggtcttctcattttcttttttagcaaaaaatacttgactatataaacaagactagaaatttatcctaaacagatggtctttctctgagggaaaaaaaaaaatgtgtcatgtgaggcaatatgcattctttgtattctgattttttaagtgttttcatatttatagccatcacaaaattttgcccaaagtgtatggctcagaagagatgatcaataactaaaatgtttttcgttttgcacatggtaaaattttaggtagagagtggagctttgtataattggtaactttaaccaacatttacgtaagtacggtctttgcagtattacacaataccgcatgagctaatatgcagtatttaggtaatgcattgaatgaagttgaaaatatgctcttaacacactgtgcattgtttttctaaaattgagaaatatctgaaatacagaatacgaatttaataaaggaagcctaccttatgtaaattatgatgttgaaaatgacagtcaaccagagtagatgaagtgtccttatgaagaattattaaatagtagctggatggatctttagatggatgaccacctgaccattccaggacaatttttggtcccattttgaggattgccatagttgcaagtccttaggatcttccttgttttaaaaaactatcaaagtaggttaaattaaaatctaatttaaattaggttaatttatattacattgtagatcattcttttttcccccctctttcacttctaaatattttgctttctaaatactagccttctggttcacagtgaaataatttaattatcaatcagtagattgattccaagtggagaattcactgcttccctaaaatgcgtttttcttacctgtaatggtgaatatttacaaggatctggataaagagattttgatttttgaaatgccacaaaaccccttaaagtggtcaagtacctaaggtagtggctaaggcatgcttgaactgtgtttgagagacagcagttcagtcagtacataatttgttggtgactaacaaagctcacatctgggagattaactttttttaacgcaaaaatattctgcacattacccatatattgttgaattttacatacaaagcattttgtgctttcattcaattagtttaactatattcagtttctgtattatttctctctgatctatcctgtaattattctatactttagaagaaaagatcagttcatattgttagactgaataattctacatgaagttaaaagttagcaatttaaaaaattttgctgcataataaagataattatagttacatgt

SEQ ID NO: 296974 - DNA, 4501 bp, Homo sapiens
catccaaggcagcctgcgtggctcccgggagcgcgcacgtcccggagcccatgccgaccgcaggcgccgtatccgcgctcgtctagcagccccggttacgcggttgcacgtcggccccagccctgaggagccggaccgatgtggaaactgctgcccgccgcgggcccggcaggaggagaaccatacagacttttgactggcgttgagtacgttgttggaaggaaaaactgtgccattctaattgaaaatgatcagtcgatcagccgaaatcatgctgtgttaactgctaacttttctgtaaccaacctgagtcaaacagatgaaatccctgtattgacattaaaagataattctaagtatggtacctttgttaatgaggaaaaaatgcagaatggcttttcccgaactttgaagtcgggggatggtattacttttggagtgtttggaagtaaattcagaatagagtatgagcctttggttgcatgctcttcttgtttagatgtctctgggaaaactgctttaaatcaagctatattgcaacttggaggatttactgtaaacaattggacagaagaatgcactcaccttgtcatggtatcagtgaaagttaccattaaaacaatatgtgcactcatttgtggacgtccaattgtaaagccagaatattttactgaattcctgaaagcagttgagtccaagaagcagcctccacaaattgaaagtttttacccacctcttgatgaaccatctattggaagtaaaaatgttgatctgtcaggacggcaggaaagaaaacaaatcttcaaagggaaaacatttatatttttgaatgccaaacagcataagaaattgagttccgcagttgtctttggaggtggggaagctaggttgataacagaagagaatgaagaagaacataatttctttttggctccgggaacgtgtgttgttgatacaggaataacaaactcacagaccttaattcctgactgtcagaagaaatggattcagtcaataatggatatgctccaaaggcaaggtcttagacctattcctgaagcagaaattggattggcggtgattttcatgactacaaagaattactgtgatcctcagggccatcccagtacaggattaaagacaacaactccaggaccaagcctttcacaaggcgtgtcagttgatgaaaaactaatgccaagcgccccagtgaacactacaacatacgtagctgacacagaatcagagcaagcagatacatgggatttgagtgaaaggccaaaagaaatcaaagtctccaaaatggaacaaaaattcagaatgctttcacaagatgcacccactgtaaaggagtcctgcaaaacaagctctaataataatagtatggtatcaaatactttggctaagatgagaatcccaaactatcagctttcaccaactaaattgccaagtataaataaaagtaaagatagggcttctcagcagcagcagaccaactccatcagaaactactttcagccgtctaccaaaaaaagggaaagggatgaagaaaatcaagaaatgtcttcatgcaaatcagcaagaatagaaacgtcttgttctcttttagaacaaacacaacctgctacaccctcattgtggaaaaataaggagcagcatctatctgagaatgagcctgtggacacaaactcagacaataacttatttacagatacagatttaaaatctattgtgaaaaattctgccagtaaatctcatgctgcagaaaagctaagatcaaataaaaaaagggaaatggatgatgtggccatagaagatgaagtattggaacagttattcaaggacacaaaaccagagttagaaattgatgtgaaagttcaaaaacaggaggaagatgtcaatgttagaaaaaggccaaggatggatatagaaacaaatgacactttcagtgatgaagcagtaccagaaagtagcaaaatatctcaagaaaatgaaattgggaagaaacgtgaactcaaggaagactcactatggtcagctaaagaaatatctaacaatgacaaacttcaggatgatagtgagatgcttccaaaaaagctgttattgactgaatttagatcactggtgattaaaaactctacttccagaaatccatctggcataaatgatgattatggtcaactaaaaaatttcaagaaattcaaaaaggtcacatatcctggagcaggaaaacttccacacatcattggaggatcagatctaatagctcatcatgctcgaaagaatacagaactagaagagtggctaaggcaggaaatggaggtacaaaatcaacatgcaaaagaagagtctcttgctgatgatctttttagatacaatccttatttaaaaaggagaagataactgaggattttaaaaagaagccatggaaaaacttcctagtaagcatctacttcaggccaacaaggttatatgaatatatagtgtatagaagcgatttaagttacaatgttttatggcctaaatttattaaataaaatgcacaaaactttgattcttttgtatgtaacaattgtttgttctgttttcaggctttgtcattgcatctttttttcatttttaaatgtgttttgtttattaaatagttaatatagtcacagttcaaaattctaaatgtacgtaaggtaaagactaaagtcacccttccaccattgtcctagctacttggttcccctcagaaaaaaattcatgatactcatttcttatgaatctttccagggatttttgagtcctattcaaattcctatttttaaataatttcctacacaaatgatagcataacatatgcagtgttctacaccttgcttttttacttagtagattaaaaattataggaatatcaatataatgtttttaatattttttcttttccattatgctgtagtcttacctaaactctggtgatccaaacaaaatggcttcagtggtgcagatgtcacctacatgttattctagtactagaaactgaagaccatgtggagacttcatcaaacatgggtttagttttcaccagaatggaaagacctgtacccctttttggtggtcttactgagctgggtgggtgtctgttttgagcttatttagagtcctagttttcctacttataaagtagaaatggtgagattgttttctttttctaccttaaagggagatggtaagaaacaatgaatgtcttttttcaaactttattgacaagtgattttcaagtctgtgttcaaaaatatattcatgtacctgtgatccagcaagaagggagttccagtcaagagtcactacaactgattagttgtttagagaatgagaaatggaacagtgaggaatggaggccatatttccatgacttcccttgtaaacagaagcaacagaagggacaagaggctggcctctacatcactctcaccttccaaatcttgtggaagtgcatctacttgccagaaccaaattaacttacttccaagttctggctgcttgcaggtggaactccagctgcaagggagttagggaaatgaaggtctttttttaaaagcttctcagccttcctagggaacagaaattgggtgagccaatctgcaatttctactacaggcattgagaccagttagattattgaaatattatagagagttatgaacacttaaattatgatagtggtatgacattggatagaacatgggatactttagaagtagaattgacagggcatattagttgatgaaatggagtcatttgagtctcttaatagccatgtatcataattaccaagtgaagctggtggaacatatggtctccattttacagttaaggaatataatggacagattaatattgttctctgtcatgcccacaatccctttctaaggaagactgccctactatagcagtttttatatttgtcaatttatgaatataatgaatgagagttctggtacctcctgtctttacaaatattggtgttgtcagtatttttcctttttaaccattccaatcggtgtgtagtgatgtttcattttggttttaatttgtatatccctgatagctataattgggtcatagaaattctttatacattctagatgcaagtctcttgtcggatatatgtattgagatattacacctagtctgtggcttgactgttttctttatgtcttttgatgaatagaagttttaaattttgacaaggtcaaatttatttttttcttttgtttgatattttttctctccaatttaaccccaagatttcagatattctgctctattatataaactttatatttttatatttgtgatctaccttgaattgatatgtatgttgtgaattatggatcagggttctttttttcccccatacaagtatccagtcattgtaacactgtttattgaaagaattatcctttcctcattaaattaccttgccaattagtaaaaaatcaattaaccataa

SEQ ID NO: 296975 - DNA, 1572 bp, Homo sapiens
catccaaggcagcctgcgtggctcccgggagcgcgcacgtcccggagcccatgccgaccgcaggcgccgtatccgcgctcgtctagcagccccggttacgcggttgcacgtcggccccagccctgaggagccggaccgatgtggaaactgctgcccgccgcgggcccggcaggaggagaaccatacagacttttgactggcgttgagtacgttgttggaaggaaaaactgtgccattctaattgaaaatgatcagtcgatcagccgaaatcatgctgtgttaactgctaacttttctgtaaccaacctgagtcaaacagatgaaatccctgtattgacattaaaagataattctaagtatggtacctttgttaatgaggaaaaaatgcagaatggcttttcccgaactttgaagtcgggggatggtattacttttggagtgtttggaagtaaattcagaatagagtatgagcctttggttgcatgctcttcttgtttagatgtctctgggaaaactgctttaaatcaagctatattgcaacttggaggatttactgtaaacaattggacagaagaatgcactcaccttgtcatggtatcagtgaaagttaccattaaaacaatatgtgcactcatttgtggacgtccaattgtaaagccagaatattttactgaattcctgaaagcagttgagtccaagaagcagcctccacaaattgaaagtttttacccacctcttgatgaaccatctattggaagtaaaaatgttgatctgtcaggacggcaggaaagaaaacaaatcttcaaagggaaaacatttatatttttgaatgccaaacagcataagaaattgagttccgcagttgtctttggaggtggggaagctaggttgataacagaagagaatgaagaagaacataatttctttttggctccgggaacgtgtgttgttgatacaggaataacaaactcacagaccttaattcctgactgtcagaagaaatggattcagtcaataatggatatgctccaaaggcaaggtcttagacctattcctgaagcagaaattggattggcggtgattttcatgactacaaagaattactgtgatcctcagggccatcccagtacaggattaaagacaacaactccaggaccaagcctttcacaaggcgtgtcagttgatgaaaaactaatgccaagcgccccagtgaacactacaacatacgtagctgacacagaatcagagcaagcagatacatgggatttgagtgaaaggccaaaagaaatcaaagtctccaaaatggaacaaaaattcagaatgctttcacaagatgcacccactgtaaaggagtcctgcaaaacaagctctaataataatagtatggtatcaaatactttggctaagatgagaatcccaaactatcagctttcaccaactaaattgccaagtataaataaaagtaaagatagggcttctcagcagcagcagaccaactccatcagaaactactttcagccgtctaccaaaaaaagggaaagggatgaagaaaatcaagaaatgtcttcatgc

SEQ ID NO: 296976 - DNA, 882 bp, Homo sapiens
caataagatatatatctggaggtaaattgtttactgagatgatatttattagaataactactaggttaaaaatgcttcacagtttttagccttctgtcacagatgagtatgttataaatgtttccaaagtttatagagcatttgagtaagtaattttcttatcttgaattagctacaatttgattccaaatacaaagttcaggtacaagaaataaaacatttttactattttttcaggtatttgaacttttttctatagattcccaaatgacaagtgacttttctttgttatttcttctctttcttacctatccatcttaaccccatttaagaacaacaatgacaaacttcaggatgatagtgagatgcttccaaaaaagctgttattgactgaatttagatcactggtgattaaaaactctacttccagaaatccatctggcataaatgatgattatggtcaactaaaaaatttcaagaaattcaaaaaggtcacatatcctggagcaggaaaacttccacacatcattggaggatcagatctaatagctcatcatgctcgaaagaatacagaactagaagagtggctaaggcaggaaatggaggtacaaaatcaacatgcaaaagaagagtctcttgctgatgatctttttagatacaatccttatttaaaaaggagaagataactgaggattttaaaaagaagccatggaaaaacttcctagtaagcatctacttcaggccaacaaggttatatgaatatatagtgtatagaagcgatttaagttacaatgttttatggcctaaatttattaaataaaatgcacaaaagatgcggccgactccgccccctcatcccacccggacaactcggacggacct

SEQ ID NO: 296977 - DNA, 4551 bp, Homo sapiens
catccaaggcagcctgcgtggctcccgggagcgcgcacgtcccggagcccatgccgaccgcaggcgccgtatccgcgctcgtctagcagccccggttacgcggttgcacgtcggccccagccctgaggagccggaccgatgtggaaactgctgcccgccgcgggcccggcaggaggagaaccatacagacttttgactggcgttgagtacgttgttggaaggaaaaactgtgccattctaattgaaaatgatcagtcgatcagccgaaatcatgctgtgttaactgctaacttttctgtaaccaacctggtatagaaaaacattttggaaatttctacagaaaaagtaaaattgttactagtcaaacagatgaaatccctgtattgacattaaaagataattctaagtatggtacctttgttaatgaggaaaaaatgcagaatggcttttcccgaactttgaagtcgggggatggtattacttttggagtgtttggaagtaaattcagaatagagtatgagcctttggttgcatgctcttcttgtttagatgtctctgggaaaactgctttaaatcaagctatattgcaacttggaggatttactgtaaacaattggacagaagaatgcactcaccttgtcatggtatcagtgaaagttaccattaaaacaatatgtgcactcatttgtggacgtccaattgtaaagccagaatattttactgaattcctgaaagcagttgagtccaagaagcagcctccacaaattgaaagtttttacccacctcttgatgaaccatctattggaagtaaaaatgttgatctgtcaggacggcaggaaagaaaacaaatcttcaaagggaaaacatttatatttttgaatgccaaacagcataagaaattgagttccgcagttgtctttggaggtggggaagctaggttgataacagaagagaatgaagaagaacataatttctttttggctccgggaacgtgtgttgttgatacaggaataacaaactcacagaccttaattcctgactgtcagaagaaatggattcagtcaataatggatatgctccaaaggcaaggtcttagacctattcctgaagcagaaattggattggcggtgattttcatgactacaaagaattactgtgatcctcagggccatcccagtacaggattaaagacaacaactccaggaccaagcctttcacaaggcgtgtcagttgatgaaaaactaatgccaagcgccccagtgaacactacaacatacgtagctgacacagaatcagagcaagcagatacatgggatttgagtgaaaggccaaaagaaatcaaagtctccaaaatggaacaaaaattcagaatgctttcacaagatgcacccactgtaaaggagtcctgcaaaacaagctctaataataatagtatggtatcaaatactttggctaagatgagaatcccaaactatcagctttcaccaactaaattgccaagtataaataaaagtaaagatagggcttctcagcagcagcagaccaactccatcagaaactactttcagccgtctaccaaaaaaagggaaagggatgaagaaaatcaagaaatgtcttcatgcaaatcagcaagaatagaaacgtcttgttctcttttagaacaaacacaacctgctacaccctcattgtggaaaaataaggagcagcatctatctgagaatgagcctgtggacacaaactcagacaataacttatttacagatacagatttaaaatctattgtgaaaaattctgccagtaaatctcatgctgcagaaaagctaagatcaaataaaaaaagggaaatggatgatgtggccatagaagatgaagtattggaacagttattcaaggacacaaaaccagagttagaaattgatgtgaaagttcaaaaacaggaggaagatgtcaatgttagaaaaaggccaaggatggatatagaaacaaatgacactttcagtgatgaagcagtaccagaaagtagcaaaatatctcaagaaaatgaaattgggaagaaacgtgaactcaaggaagactcactatggtcagctaaagaaatatctaacaatgacaaacttcaggatgatagtgagatgcttccaaaaaagctgttattgactgaatttagatcactggtgattaaaaactctacttccagaaatccatctggcataaatgatgattatggtcaactaaaaaatttcaagaaattcaaaaaggtcacatatcctggagcaggaaaacttccacacatcattggaggatcagatctaatagctcatcatgctcgaaagaatacagaactagaagagtggctaaggcaggaaatggaggtacaaaatcaacatgcaaaagaagagtctcttgctgatgatctttttagatacaatccttatttaaaaaggagaagataactgaggattttaaaaagaagccatggaaaaacttcctagtaagcatctacttcaggccaacaaggttatatgaatatatagtgtatagaagcgatttaagttacaatgttttatggcctaaatttattaaataaaatgcacaaaactttgattcttttgtatgtaacaattgtttgttctgttttcaggctttgtcattgcatctttttttcatttttaaatgtgttttgtttattaaatagttaatatagtcacagttcaaaattctaaatgtacgtaaggtaaagactaaagtcacccttccaccattgtcctagctacttggttcccctcagaaaaaaattcatgatactcatttcttatgaatctttccagggatttttgagtcctattcaaattcctatttttaaataatttcctacacaaatgatagcataacatatgcagtgttctacaccttgcttttttacttagtagattaaaaattataggaatatcaatataatgtttttaatattttttcttttccattatgctgtagtcttacctaaactctggtgatccaaacaaaatggcttcagtggtgcagatgtcacctacatgttattctagtactagaaactgaagaccatgtggagacttcatcaaacatgggtttagttttcaccagaatggaaagacctgtacccctttttggtggtcttactgagctgggtgggtgtctgttttgagcttatttagagtcctagttttcctacttataaagtagaaatggtgagattgttttctttttctaccttaaagggagatggtaagaaacaatgaatgtcttttttcaaactttattgacaagtgattttcaagtctgtgttcaaaaatatattcatgtacctgtgatccagcaagaagggagttccagtcaagagtcactacaactgattagttgtttagagaatgagaaatggaacagtgaggaatggaggccatatttccatgacttcccttgtaaacagaagcaacagaagggacaagaggctggcctctacatcactctcaccttccaaatcttgtggaagtgcatctacttgccagaaccaaattaacttacttccaagttctggctgcttgcaggtggaactccagctgcaagggagttagggaaatgaaggtctttttttaaaagcttctcagccttcctagggaacagaaattgggtgagccaatctgcaatttctactacaggcattgagaccagttagattattgaaatattatagagagttatgaacacttaaattatgatagtggtatgacattggatagaacatgggatactttagaagtagaattgacagggcatattagttgatgaaatggagtcatttgagtctcttaatagccatgtatcataattaccaagtgaagctggtggaacatatggtctccattttacagttaaggaatataatggacagattaatattgttctctgtcatgcccacaatccctttctaaggaagactgccctactatagcagtttttatatttgtcaatttatgaatataatgaatgagagttctggtacctcctgtctttacaaatattggtgttgtcagtatttttcctttttaaccattccaatcggtgtgtagtgatgtttcattttggttttaatttgtatatccctgatagctataattgggtcatagaaattctttatacattctagatgcaagtctcttgtcggatatatgtattgagatattacacctagtctgtggcttgactgttttctttatgtcttttgatgaatagaagttttaaattttgacaaggtcaaatttatttttttcttttgtttgatattttttctctccaatttaaccccaagatttcagatattctgctctattatataaactttatatttttatatttgtgatctaccttgaattgatatgtatgttgtgaattatggatcagggttctttttttcccccatacaagtatccagtcattgtaacactgtttattgaaagaattatcctttcctcattaaattaccttgccaattagtaaaaaatcaattaaccataa

SEQ ID NO: 296978 - DNA, 4402 bp, Homo sapiens
catccaaggcagcctgcgtggctcccgggagcgcgcacgtcccggagcccatgccgaccgcaggcgccgtatccgcgctcgtctagcagccccggttacgcggttgcacgtcggccccagccctgaggagccggaccgatgtggaaactgctgcccgccgcgggcccggcaggaggagaaccatacagacttttgactggcgttgagtacgttgttggaaggaaaaactgtgccattctaattgaaaatgatcagtcgatcagccgaaatcatgctgtgttaactgctaacttttctgtaaccaacctggtatagaaaaacattttggaaatttctacagaaaaagtaaaattgttactaatagagtatgagcctttggttgcatgctcttcttgtttagatgtctctgggaaaactgctttaaatcaagctatattgcaacttggaggatttactgtaaacaattggacagaagaatgcactcaccttgtcatggtatcagtgaaagttaccattaaaacaatatgtgcactcatttgtggacgtccaattgtaaagccagaatattttactgaattcctgaaagcagttgagtccaagaagcagcctccacaaattgaaagtttttacccacctcttgatgaaccatctattggaagtaaaaatgttgatctgtcaggacggcaggaaagaaaacaaatcttcaaagggaaaacatttatatttttgaatgccaaacagcataagaaattgagttccgcagttgtctttggaggtggggaagctaggttgataacagaagagaatgaagaagaacataatttctttttggctccgggaacgtgtgttgttgatacaggaataacaaactcacagaccttaattcctgactgtcagaagaaatggattcagtcaataatggatatgctccaaaggcaaggtcttagacctattcctgaagcagaaattggattggcggtgattttcatgactacaaagaattactgtgatcctcagggccatcccagtacaggattaaagacaacaactccaggaccaagcctttcacaaggcgtgtcagttgatgaaaaactaatgccaagcgccccagtgaacactacaacatacgtagctgacacagaatcagagcaagcagatacatgggatttgagtgaaaggccaaaagaaatcaaagtctccaaaatggaacaaaaattcagaatgctttcacaagatgcacccactgtaaaggagtcctgcaaaacaagctctaataataatagtatggtatcaaatactttggctaagatgagaatcccaaactatcagctttcaccaactaaattgccaagtataaataaaagtaaagatagggcttctcagcagcagcagaccaactccatcagaaactactttcagccgtctaccaaaaaaagggaaagggatgaagaaaatcaagaaatgtcttcatgcaaatcagcaagaatagaaacgtcttgttctcttttagaacaaacacaacctgctacaccctcattgtggaaaaataaggagcagcatctatctgagaatgagcctgtggacacaaactcagacaataacttatttacagatacagatttaaaatctattgtgaaaaattctgccagtaaatctcatgctgcagaaaagctaagatcaaataaaaaaagggaaatggatgatgtggccatagaagatgaagtattggaacagttattcaaggacacaaaaccagagttagaaattgatgtgaaagttcaaaaacaggaggaagatgtcaatgttagaaaaaggccaaggatggatatagaaacaaatgacactttcagtgatgaagcagtaccagaaagtagcaaaatatctcaagaaaatgaaattgggaagaaacgtgaactcaaggaagactcactatggtcagctaaagaaatatctaacaatgacaaacttcaggatgatagtgagatgcttccaaaaaagctgttattgactgaatttagatcactggtgattaaaaactctacttccagaaatccatctggcataaatgatgattatggtcaactaaaaaatttcaagaaattcaaaaaggtcacatatcctggagcaggaaaacttccacacatcattggaggatcagatctaatagctcatcatgctcgaaagaatacagaactagaagagtggctaaggcaggaaatggaggtacaaaatcaacatgcaaaagaagagtctcttgctgatgatctttttagatacaatccttatttaaaaaggagaagataactgaggattttaaaaagaagccatggaaaaacttcctagtaagcatctacttcaggccaacaaggttatatgaatatatagtgtatagaagcgatttaagttacaatgttttatggcctaaatttattaaataaaatgcacaaaactttgattcttttgtatgtaacaattgtttgttctgttttcaggctttgtcattgcatctttttttcatttttaaatgtgttttgtttattaaatagttaatatagtcacagttcaaaattctaaatgtacgtaaggtaaagactaaagtcacccttccaccattgtcctagctacttggttcccctcagaaaaaaattcatgatactcatttcttatgaatctttccagggatttttgagtcctattcaaattcctatttttaaataatttcctacacaaatgatagcataacatatgcagtgttctacaccttgcttttttacttagtagattaaaaattataggaatatcaatataatgtttttaatattttttcttttccattatgctgtagtcttacctaaactctggtgatccaaacaaaatggcttcagtggtgcagatgtcacctacatgttattctagtactagaaactgaagaccatgtggagacttcatcaaacatgggtttagttttcaccagaatggaaagacctgtacccctttttggtggtcttactgagctgggtgggtgtctgttttgagcttatttagagtcctagttttcctacttataaagtagaaatggtgagattgttttctttttctaccttaaagggagatggtaagaaacaatgaatgtcttttttcaaactttattgacaagtgattttcaagtctgtgttcaaaaatatattcatgtacctgtgatccagcaagaagggagttccagtcaagagtcactacaactgattagttgtttagagaatgagaaatggaacagtgaggaatggaggccatatttccatgacttcccttgtaaacagaagcaacagaagggacaagaggctggcctctacatcactctcaccttccaaatcttgtggaagtgcatctacttgccagaaccaaattaacttacttccaagttctggctgcttgcaggtggaactccagctgcaagggagttagggaaatgaaggtctttttttaaaagcttctcagccttcctagggaacagaaattgggtgagccaatctgcaatttctactacaggcattgagaccagttagattattgaaatattatagagagttatgaacacttaaattatgatagtggtatgacattggatagaacatgggatactttagaagtagaattgacagggcatattagttgatgaaatggagtcatttgagtctcttaatagccatgtatcataattaccaagtgaagctggtggaacatatggtctccattttacagttaaggaatataatggacagattaatattgttctctgtcatgcccacaatccctttctaaggaagactgccctactatagcagtttttatatttgtcaatttatgaatataatgaatgagagttctggtacctcctgtctttacaaatattggtgttgtcagtatttttcctttttaaccattccaatcggtgtgtagtgatgtttcattttggttttaatttgtatatccctgatagctataattgggtcatagaaattctttatacattctagatgcaagtctcttgtcggatatatgtattgagatattacacctagtctgtggcttgactgttttctttatgtcttttgatgaatagaagttttaaattttgacaaggtcaaatttatttttttcttttgtttgatattttttctctccaatttaaccccaagatttcagatattctgctctattatataaactttatatttttatatttgtgatctaccttgaattgatatgtatgttgtgaattatggatcagggttctttttttcccccatacaagtatccagtcattgtaacactgtttattgaaagaattatcctttcctcattaaattaccttgccaattagtaaaaaatcaattaaccataa

SEQ ID NO: 296979 - DNA, 4447 bp, Homo sapiens
catccaaggcagcctgcgtggctcccgggagcgcgcacgtcccggagcccatgccgaccgcaggcgccgtatccgcgctcgtctagcagccccggttacgcggttgcacgtcggccccagccctgaggagccggaccgatgtggaaactgctgcccgccgcgggcccggcaggaggagaaccatacagacttttgactggcgttgagtacgttgttggaaggaaaaactgtgccattctaattgaaaatgatcagtcgatcagccgaaatcatgctgtgttaactgctaacttttctgtaaccaacctgagtcaaacagatgaaatccctgtattgacattaaaagataattctaagtatggtacctttgttaatgaggaaaaaatgcagaatggcttttcccgaactttgaagtcgggggatggtattacttttggagtgtttggaagtaaattcagaatagagtatgagcctttggttgcatgctcttcttgtttagatgtctctgggaaaactgctttaaatcaagctatattgcaacttggaggatttactgtaaacaattggacagaagaatgcactcaccttgtcatggtatcagtgaaagttaccattaaaacaatatgtgcactcatttgtggacgtccaattgtaaagccagaatattttactgaattcctgaaagcagttgagtccaagaagcagcctccacaaattgaaagtttttacccacctcttgatgaaccatctattggaagtaaaaatgttgatctgtcaggacggcaggaaagaaaacaaatcttcaaaggggtctttggaggtggggaagctaggttgataacagaagagaatgaagaagaacataatttctttttggctccgggaacgtgtgttgttgatacaggaataacaaactcacagaccttaattcctgactgtcagaagaaatggattcagtcaataatggatatgctccaaaggcaaggtcttagacctattcctgaagcagaaattggattggcggtgattttcatgactacaaagaattactgtgatcctcagggccatcccagtacaggattaaagacaacaactccaggaccaagcctttcacaaggcgtgtcagttgatgaaaaactaatgccaagcgccccagtgaacactacaacatacgtagctgacacagaatcagagcaagcagatacatgggatttgagtgaaaggccaaaagaaatcaaagtctccaaaatggaacaaaaattcagaatgctttcacaagatgcacccactgtaaaggagtcctgcaaaacaagctctaataataatagtatggtatcaaatactttggctaagatgagaatcccaaactatcagctttcaccaactaaattgccaagtataaataaaagtaaagatagggcttctcagcagcagcagaccaactccatcagaaactactttcagccgtctaccaaaaaaagggaaagggatgaagaaaatcaagaaatgtcttcatgcaaatcagcaagaatagaaacgtcttgttctcttttagaacaaacacaacctgctacaccctcattgtggaaaaataaggagcagcatctatctgagaatgagcctgtggacacaaactcagacaataacttatttacagatacagatttaaaatctattgtgaaaaattctgccagtaaatctcatgctgcagaaaagctaagatcaaataaaaaaagggaaatggatgatgtggccatagaagatgaagtattggaacagttattcaaggacacaaaaccagagttagaaattgatgtgaaagttcaaaaacaggaggaagatgtcaatgttagaaaaaggccaaggatggatatagaaacaaatgacactttcagtgatgaagcagtaccagaaagtagcaaaatatctcaagaaaatgaaattgggaagaaacgtgaactcaaggaagactcactatggtcagctaaagaaatatctaacaatgacaaacttcaggatgatagtgagatgcttccaaaaaagctgttattgactgaatttagatcactggtgattaaaaactctacttccagaaatccatctggcataaatgatgattatggtcaactaaaaaatttcaagaaattcaaaaaggtcacatatcctggagcaggaaaacttccacacatcattggaggatcagatctaatagctcatcatgctcgaaagaatacagaactagaagagtggctaaggcaggaaatggaggtacaaaatcaacatgcaaaagaagagtctcttgctgatgatctttttagatacaatccttatttaaaaaggagaagataactgaggattttaaaaagaagccatggaaaaacttcctagtaagcatctacttcaggccaacaaggttatatgaatatatagtgtatagaagcgatttaagttacaatgttttatggcctaaatttattaaataaaatgcacaaaactttgattcttttgtatgtaacaattgtttgttctgttttcaggctttgtcattgcatctttttttcatttttaaatgtgttttgtttattaaatagttaatatagtcacagttcaaaattctaaatgtacgtaaggtaaagactaaagtcacccttccaccattgtcctagctacttggttcccctcagaaaaaaattcatgatactcatttcttatgaatctttccagggatttttgagtcctattcaaattcctatttttaaataatttcctacacaaatgatagcataacatatgcagtgttctacaccttgcttttttacttagtagattaaaaattataggaatatcaatataatgtttttaatattttttcttttccattatgctgtagtcttacctaaactctggtgatccaaacaaaatggcttcagtggtgcagatgtcacctacatgttattctagtactagaaactgaagaccatgtggagacttcatcaaacatgggtttagttttcaccagaatggaaagacctgtacccctttttggtggtcttactgagctgggtgggtgtctgttttgagcttatttagagtcctagttttcctacttataaagtagaaatggtgagattgttttctttttctaccttaaagggagatggtaagaaacaatgaatgtcttttttcaaactttattgacaagtgattttcaagtctgtgttcaaaaatatattcatgtacctgtgatccagcaagaagggagttccagtcaagagtcactacaactgattagttgtttagagaatgagaaatggaacagtgaggaatggaggccatatttccatgacttcccttgtaaacagaagcaacagaagggacaagaggctggcctctacatcactctcaccttccaaatcttgtggaagtgcatctacttgccagaaccaaattaacttacttccaagttctggctgcttgcaggtggaactccagctgcaagggagttagggaaatgaaggtctttttttaaaagcttctcagccttcctagggaacagaaattgggtgagccaatctgcaatttctactacaggcattgagaccagttagattattgaaatattatagagagttatgaacacttaaattatgatagtggtatgacattggatagaacatgggatactttagaagtagaattgacagggcatattagttgatgaaatggagtcatttgagtctcttaatagccatgtatcataattaccaagtgaagctggtggaacatatggtctccattttacagttaaggaatataatggacagattaatattgttctctgtcatgcccacaatccctttctaaggaagactgccctactatagcagtttttatatttgtcaatttatgaatataatgaatgagagttctggtacctcctgtctttacaaatattggtgttgtcagtatttttcctttttaaccattccaatcggtgtgtagtgatgtttcattttggttttaatttgtatatccctgatagctataattgggtcatagaaattctttatacattctagatgcaagtctcttgtcggatatatgtattgagatattacacctagtctgtggcttgactgttttctttatgtcttttgatgaatagaagttttaaattttgacaaggtcaaatttatttttttcttttgtttgatattttttctctccaatttaaccccaagatttcagatattctgctctattatataaactttatatttttatatttgtgatctaccttgaattgatatgtatgttgtgaattatggatcagggttctttttttcccccatacaagtatccagtcattgtaacactgtttattgaaagaattatcctttcctcattaaattaccttgccaattagtaaaaaatcaattaaccataa

SEQ ID NO: 296980 - DNA, 4383 bp, Homo sapiens
catccaaggcagcctgcgtggctcccgggagcgcgcacgtcccggagcccatgccgaccgcaggcgccgtatccgcgctcgtctagcagccccggttacgcggttgcacgtcggccccagccctgaggagccggaccgatgtggaaactgctgcccgccgcgggcccggcaggaggagaaccatacagacttttgactggcgttgagtacgttgttggaaggaaaaactgtgccattctaattgaaaatgatcagtcgatcagccgaaatcatgctgtgttaactgctaacttttctgtaaccaacctgagtcaaacagatgaaatccctgtattgacattaaaagataattctaagtatggtacctttgttaatgaggaaaaaatgcagaatggcttttcccgaactttgaagtcgggggatggtattacttttggagtgtttggaagtaaattcagaatagagtatgagcctttggttgcatgctcttcttgtttagatgtctctgggaaaactgctttaaatcaagctatattgcaacttggaggatttactgtaaacaattggacagaagaatgcactcaccttgtcatggtatcagtgaaagttaccattaaaacaatatgtgcactcatttgtggacgtccaattgtaaagccagaatattttactgaattcctgaaagcagttgagtccaagaagcagcctccacaaattgaaagtttttacccacctcttgatgaaccatctattggaagtaaaaatgttgatctgtcaggacggcaggaaagaaaacaaatcttcaaagggaaaacatttatatttttgaatgccaaacagcataagaaattgagttccgcagttgtctttggaggtggggaagctaggttgataacagaagagaatgaagaagaacataatttctttttggctccgggaacgtgtgttgttgatacaggaataacaaactcacagaccttaattcctgactgtcagaagaaatggattcagtcaataatggatatgctccaaaggcaaggtcttagacctattcctgaagcagaaattggattggcggtgattttcatgactacaaagaattactgtgatcctcagggccatcccagtacaggattaaagacaacaactccaggaccaagcctttcacaaggcgtgtcagttgatgaaaaactaatgccaagcgccccagtgaacactacaacatacgtagctgacacagaatcagagcaagcagatacatgggatttgagtgaaaggccaaaagaaatcaaagtctccaaaatggaacaaaaacaccaactaaattgccaagtataaataaaagtaaagatagggcttctcagcagcagcagaccaactccatcagaaactactttcagccgtctaccaaaaaaagggaaagggatgaagaaaatcaagaaatgtcttcatgcaaatcagcaagaatagaaacgtcttgttctcttttagaacaaacacaacctgctacaccctcattgtggaaaaataaggagcagcatctatctgagaatgagcctgtggacacaaactcagacaataacttatttacagatacagatttaaaatctattgtgaaaaattctgccagtaaatctcatgctgcagaaaagctaagatcaaataaaaaaagggaaatggatgatgtggccatagaagatgaagtattggaacagttattcaaggacacaaaaccagagttagaaattgatgtgaaagttcaaaaacaggaggaagatgtcaatgttagaaaaaggccaaggatggatatagaaacaaatgacactttcagtgatgaagcagtaccagaaagtagcaaaatatctcaagaaaatgaaattgggaagaaacgtgaactcaaggaagactcactatggtcagctaaagaaatatctaacaatgacaaacttcaggatgatagtgagatgcttccaaaaaagctgttattgactgaatttagatcactggtgattaaaaactctacttccagaaatccatctggcataaatgatgattatggtcaactaaaaaatttcaagaaattcaaaaaggtcacatatcctggagcaggaaaacttccacacatcattggaggatcagatctaatagctcatcatgctcgaaagaatacagaactagaagagtggctaaggcaggaaatggaggtacaaaatcaacatgcaaaagaagagtctcttgctgatgatctttttagatacaatccttatttaaaaaggagaagataactgaggattttaaaaagaagccatggaaaaacttcctagtaagcatctacttcaggccaacaaggttatatgaatatatagtgtatagaagcgatttaagttacaatgttttatggcctaaatttattaaataaaatgcacaaaactttgattcttttgtatgtaacaattgtttgttctgttttcaggctttgtcattgcatctttttttcatttttaaatgtgttttgtttattaaatagttaatatagtcacagttcaaaattctaaatgtacgtaaggtaaagactaaagtcacccttccaccattgtcctagctacttggttcccctcagaaaaaaattcatgatactcatttcttatgaatctttccagggatttttgagtcctattcaaattcctatttttaaataatttcctacacaaatgatagcataacatatgcagtgttctacaccttgcttttttacttagtagattaaaaattataggaatatcaatataatgtttttaatattttttcttttccattatgctgtagtcttacctaaactctggtgatccaaacaaaatggcttcagtggtgcagatgtcacctacatgttattctagtactagaaactgaagaccatgtggagacttcatcaaacatgggtttagttttcaccagaatggaaagacctgtacccctttttggtggtcttactgagctgggtgggtgtctgttttgagcttatttagagtcctagttttcctacttataaagtagaaatggtgagattgttttctttttctaccttaaagggagatggtaagaaacaatgaatgtcttttttcaaactttattgacaagtgattttcaagtctgtgttcaaaaatatattcatgtacctgtgatccagcaagaagggagttccagtcaagagtcactacaactgattagttgtttagagaatgagaaatggaacagtgaggaatggaggccatatttccatgacttcccttgtaaacagaagcaacagaagggacaagaggctggcctctacatcactctcaccttccaaatcttgtggaagtgcatctacttgccagaaccaaattaacttacttccaagttctggctgcttgcaggtggaactccagctgcaagggagttagggaaatgaaggtctttttttaaaagcttctcagccttcctagggaacagaaattgggtgagccaatctgcaatttctactacaggcattgagaccagttagattattgaaatattatagagagttatgaacacttaaattatgatagtggtatgacattggatagaacatgggatactttagaagtagaattgacagggcatattagttgatgaaatggagtcatttgagtctcttaatagccatgtatcataattaccaagtgaagctggtggaacatatggtctccattttacagttaaggaatataatggacagattaatattgttctctgtcatgcccacaatccctttctaaggaagactgccctactatagcagtttttatatttgtcaatttatgaatataatgaatgagagttctggtacctcctgtctttacaaatattggtgttgtcagtatttttcctttttaaccattccaatcggtgtgtagtgatgtttcattttggttttaatttgtatatccctgatagctataattgggtcatagaaattctttatacattctagatgcaagtctcttgtcggatatatgtattgagatattacacctagtctgtggcttgactgttttctttatgtcttttgatgaatagaagttttaaattttgacaaggtcaaatttatttttttcttttgtttgatattttttctctccaatttaaccccaagatttcagatattctgctctattatataaactttatatttttatatttgtgatctaccttgaattgatatgtatgttgtgaattatggatcagggttctttttttcccccatacaagtatccagtcattgtaacactgtttattgaaagaattatcctttcctcattaaattaccttgccaattagtaaaaaatcaattaaccataa

SEQ ID NO: 296981 - DNA, 4345 bp, Homo sapiens
catccaaggcagcctgcgtggctcccgggagcgcgcacgtcccggagcccatgccgaccgcaggcgccgtatccgcgctcgtctagcagccccggttacgcggttgcacgtcggccccagccctgaggagccggaccgatgtggaaactgctgcccgccgcgggcccggcaggaggagaaccatacagacttttgactggcgttgagtacgttgttggaaggaaaaactgtgccattctaattgaaaatgatcagtcgatcagccgaaatcatgctgtgttaactgctaacttttctgtaaccaacctgagtcaaacagatgaaatccctgtattgacattaaaagataattctaagtatggtacctttgttaatgaggaaaaaatgcagaatggcttttcccgaactttgaagtcgggggatggtattacttttggagtgtttggaagtaaattcagaatagagtatgagcctttggttgcatgctcttcttgtttagatgtctctgggaaaactgctttaaatcaagctatattgcaacttggaggatttactgtaaacaattggacagaagaatgcactcaccttgtcatggtatcagtgaaagttaccattaaaacaatatgtgcactcatttgtggacgtccaattgtaaagccagaatattttactgaattcctgaaagcagttgagtccaagaagcagcctccacaaattgaaagtttttacccacctcttgatgaaccatctattggaagtaaaaatgttgatctgtcaggacggcaggaaagaaaacaaatcttcaaagggaaaacatttatatttttgaatgccaaacagcataagaaattgagttccgcagttgtctttggaggtggggaagctaggttgataacagaagagaatgaagaagaacataatttctttttggctccgggaacgtgtgttgttgatacaggaataacaaactcacagaccttaattcctgactgtcagaagaaatggattcagtcaataatggatatgctccaaaggcaaggtcttagacctattcctgaagcagaaattggattggcggtgattttcatgactacaaagaattactgtgatcctcagggccatcccagtacaggattaaagacaacaactccaggaccaagcctttcacaaggcgtgtcagttgatgaaaaactaatgccaagcgccccagtgaacactacaacatacgtagctgacacagaatcagagcaagcagatacatgggatttgagtgaaaggccaaaagaaatcaaagtctccaaaatggaacaaaaattcagaatgctttcacaagatgcacccactgtaaaggagtcctgcaaaacaagctctaataataatagtatggtatcaaatactttggctaagatgagaatcccaaactatcagctttcaccaactaaattgccaagtataaataaaagtaaagatagggcttctcagcagcagcagaccaactccatcagaaactactttcagccgtctaccaaaaaaagggaaagggatgaagaaaatcaagaaatgtcttcatgcaaatcagcaagaatagaaacgtcttgttctcttttagaacaaacacaacctgctacaccctcattgtggaaaaataaggagcagcatctatctgagaatgagcctgtggacacaaactcagacaataacttatttacagatacagatttaaaatctattgtgaaaaattctgccagtaaatctcatgctgcagaaaagctaagatcaaataaaaaaagggaaatggatgatgtggccatagaagatgaagtattggaacagttattcaaggacacaaaaccagagttagaaattgatgtgaaagttcaaaaacaggaggaagatgtcaatgttagaaaaaggccaaggatggatatagaaacaaatgacactttcagtgatgaagcagtaccagaaagtagcaaaatatctcaagaaaatgaaattgggaagaaacgtgaactcaaggaagactcactatggtcagctaaagaaatatctgtcacatatcctggagcaggaaaacttccacacatcattggaggatcagatctaatagctcatcatgctcgaaagaatacagaactagaagagtggctaaggcaggaaatggaggtacaaaatcaacatgcaaaagaagagtctcttgctgatgatctttttagatacaatccttatttaaaaaggagaagataactgaggattttaaaaagaagccatggaaaaacttcctagtaagcatctacttcaggccaacaaggttatatgaatatatagtgtatagaagcgatttaagttacaatgttttatggcctaaatttattaaataaaatgcacaaaactttgattcttttgtatgtaacaattgtttgttctgttttcaggctttgtcattgcatctttttttcatttttaaatgtgttttgtttattaaatagttaatatagtcacagttcaaaattctaaatgtacgtaaggtaaagactaaagtcacccttccaccattgtcctagctacttggttcccctcagaaaaaaattcatgatactcatttcttatgaatctttccagggatttttgagtcctattcaaattcctatttttaaataatttcctacacaaatgatagcataacatatgcagtgttctacaccttgcttttttacttagtagattaaaaattataggaatatcaatataatgtttttaatattttttcttttccattatgctgtagtcttacctaaactctggtgatccaaacaaaatggcttcagtggtgcagatgtcacctacatgttattctagtactagaaactgaagaccatgtggagacttcatcaaacatgggtttagttttcaccagaatggaaagacctgtacccctttttggtggtcttactgagctgggtgggtgtctgttttgagcttatttagagtcctagttttcctacttataaagtagaaatggtgagattgttttctttttctaccttaaagggagatggtaagaaacaatgaatgtcttttttcaaactttattgacaagtgattttcaagtctgtgttcaaaaatatattcatgtacctgtgatccagcaagaagggagttccagtcaagagtcactacaactgattagttgtttagagaatgagaaatggaacagtgaggaatggaggccatatttccatgacttcccttgtaaacagaagcaacagaagggacaagaggctggcctctacatcactctcaccttccaaatcttgtggaagtgcatctacttgccagaaccaaattaacttacttccaagttctggctgcttgcaggtggaactccagctgcaagggagttagggaaatgaaggtctttttttaaaagcttctcagccttcctagggaacagaaattgggtgagccaatctgcaatttctactacaggcattgagaccagttagattattgaaatattatagagagttatgaacacttaaattatgatagtggtatgacattggatagaacatgggatactttagaagtagaattgacagggcatattagttgatgaaatggagtcatttgagtctcttaatagccatgtatcataattaccaagtgaagctggtggaacatatggtctccattttacagttaaggaatataatggacagattaatattgttctctgtcatgcccacaatccctttctaaggaagactgccctactatagcagtttttatatttgtcaatttatgaatataatgaatgagagttctggtacctcctgtctttacaaatattggtgttgtcagtatttttcctttttaaccattccaatcggtgtgtagtgatgtttcattttggttttaatttgtatatccctgatagctataattgggtcatagaaattctttatacattctagatgcaagtctcttgtcggatatatgtattgagatattacacctagtctgtggcttgactgttttctttatgtcttttgatgaatagaagttttaaattttgacaaggtcaaatttatttttttcttttgtttgatattttttctctccaatttaaccccaagatttcagatattctgctctattatataaactttatatttttatatttgtgatctaccttgaattgatatgtatgttgtgaattatggatcagggttctttttttcccccatacaagtatccagtcattgtaacactgtttattgaaagaattatcctttcctcattaaattaccttgccaattagtaaaaaatcaattaaccataa

SEQ ID NO: 296982 - DNA, 2556 bp, Homo sapiens
tatcccagttaaatgcttacgcaagtcagggcttctcacccaccagctcttcacacttaggtcgcagtgcctcctttcactttaccccccgccacaggacgattgctaacaatgacaaacttcaggatgatagtgagatgcttccaaaaaagctgttattgactgaatttagatcactggtgattaaaaactctacttccagaaatccatctggcataaatgatgattatggtcaactaaaaaatttcaagaaattcaaaaaggtcacatatcctggagcaggaaaacttccacacatcattggaggatcagatctaatagctcatcatgctcgaaagaatacagaactagaagagtggctaaggcaggaaatggaggtacaaaatcaacatgcaaaagaagagtctcttgctgatgatctttttagatacaatccttatttaaaaaggagaagataactgaggattttaaaaagaagccatggaaaaacttcctagtaagcatctacttcaggccaacaaggttatatgaatatatagtgtatagaagcgatttaagttacaatgttttatggcctaaatttattaaataaaatgcacaaaactttgattcttttgtatgtaacaattgtttgttctgttttcaggctttgtcattgcatctttttttcatttttaaatgtgttttgtttattaaatagttaatatagtcacagttcaaaattctaaatgtacgtaaggtaaagactaaagtcacccttccaccattgtcctagctacttggttcccctcagaaaaaaattcatgatactcatttcttatgaatctttccagggatttttgagtcctattcaaattcctatttttaaataatttcctacacaaatgatagcataacatatgcagtgttctacaccttgcttttttacttagtagattaaaaattataggaatatcaatataatgtttttaatattttttcttttccattatgctgtagtcttacctaaactctggtgatccaaacaaaatggcttcagtggtgcagatgtcacctacatgttattctagtactagaaactgaagaccatgtggagacttcatcaaacatgggtttagttttcaccagaatggaaagacctgtacccctttttggtggtcttactgagctgggtgggtgtctgttttgagcttatttagagtcctagttttcctacttataaagtagaaatggtgagattgttttctttttctaccttaaagggagatggtaagaaacaatgaatgtcttttttcaaactttattgacaagtgattttcaagtctgtgttcaaaaatatattcatgtacctgtgatccagcaagaagggagttccagtcaagagtcactacaactgattagttgtttagagaatgagaaatggaacagtgaggaatggaggccatatttccatgacttcccttgtaaacagaagcaacagaagggacaagaggctggcctctacatcactctcaccttccaaatcttgtggaagtgcatctacttgccagaaccaaattaacttacttccaagttctggctgcttgcaggtggaactccagctgcaagggagttagggaaatgaaggtctttttttaaaagcttctcagccttcctagggaacagaaattgggtgagccaatctgcaatttctactacaggcattgagaccagttagattattgaaatattatagagagttatgaacacttaaattatgatagtggtatgacattggatagaacatgggatactttagaagtagaattgacagggcatattagttgatgaaatggagtcatttgagtctcttaatagccatgtatcataattaccaagtgaagctggtggaacatatggtctccattttacagttaaggaatataatggacagattaatattgttctctgtcatgcccacaatccctttctaaggaagactgccctactatagcagtttttatatttgtcaatttatgaatataatgaatgagagttctggtacctcctgtctttacaaatattggtgttgtcagtatttttcctttttaaccattccaatcggtgtgtagtgatgtttcattttggttttaatttgtatatccctgatagctataattgggtcatagaaattctttatacattctagatgcaagtctcttgtcggatatatgtattgagatattacacctagtctgtggcttgactgttttctttatgtcttttgatgaatagaagttttaaattttgacaaggtcaaatttatttttttcttttgtttgatattttttctctccaatttaaccccaagatttcagatattctgctctattatataaactttatatttttatatttgtgatctaccttgaattgatatgtatgttgtgaattatggatcagggttctttttttcccccatacaagtatccagtcattgtaacactgtttattgaaagaattatcctttcctcattaaattaccttgccaattagtaaaaaatcaattaaccataa

SEQ ID NO: 296983 - DNA, 2784 bp, Homo sapiens
caataagatatatatctggaggtaaattgtttactgagatgatatttattagaataactactaggttaaaaatgcttcacagtttttagccttctgtcacagatgagtatgttataaatgtttccaaagtttatagagcatttgagtaagtaattttcttatcttgaattagctacaatttgattccaaatacaaagttcaggtacaagaaataaaacatttttactattttttcaggtatttgaacttttttctatagattcccaaatgacaagtgacttttctttgttatttcttctctttcttacctatccatcttaaccccatttaagaacaacaatgacaaacttcaggatgatagtgagatgcttccaaaaaagctgttattgactgaatttagatcactggtgattaaaaactctacttccagaaatccatctggcataaatgatgattatggtcaactaaaaaatttcaagaaattcaaaaaggtcacatatcctggagcaggaaaacttccacacatcattggaggatcagatctaatagctcatcatgctcgaaagaatacagaactagaagagtggctaaggcaggaaatggaggtacaaaatcaacatgcaaaagaagagtctcttgctgatgatctttttagatacaatccttatttaaaaaggagaagataactgaggattttaaaaagaagccatggaaaaacttcctagtaagcatctacttcaggccaacaaggttatatgaatatatagtgtatagaagcgatttaagttacaatgttttatggcctaaatttattaaataaaatgcacaaaactttgattcttttgtatgtaacaattgtttgttctgttttcaggctttgtcattgcatctttttttcatttttaaatgtgttttgtttattaaatagttaatatagtcacagttcaaaattctaaatgtacgtaaggtaaagactaaagtcacccttccaccattgtcctagctacttggttcccctcagaaaaaaattcatgatactcatttcttatgaatctttccagggatttttgagtcctattcaaattcctatttttaaataatttcctacacaaatgatagcataacatatgcagtgttctacaccttgcttttttacttagtagattaaaaattataggaatatcaatataatgtttttaatattttttcttttccattatgctgtagtcttacctaaactctggtgatccaaacaaaatggcttcagtggtgcagatgtcacctacatgttattctagtactagaaactgaagaccatgtggagacttcatcaaacatgggtttagttttcaccagaatggaaagacctgtacccctttttggtggtcttactgagctgggtgggtgtctgttttgagcttatttagagtcctagttttcctacttataaagtagaaatggtgagattgttttctttttctaccttaaagggagatggtaagaaacaatgaatgtcttttttcaaactttattgacaagtgattttcaagtctgtgttcaaaaatatattcatgtacctgtgatccagcaagaagggagttccagtcaagagtcactacaactgattagttgtttagagaatgagaaatggaacagtgaggaatggaggccatatttccatgacttcccttgtaaacagaagcaacagaagggacaagaggctggcctctacatcactctcaccttccaaatcttgtggaagtgcatctacttgccagaaccaaattaacttacttccaagttctggctgcttgcaggtggaactccagctgcaagggagttagggaaatgaaggtctttttttaaaagcttctcagccttcctagggaacagaaattgggtgagccaatctgcaatttctactacaggcattgagaccagttagattattgaaatattatagagagttatgaacacttaaattatgatagtggtatgacattggatagaacatgggatactttagaagtagaattgacagggcatattagttgatgaaatggagtcatttgagtctcttaatagccatgtatcataattaccaagtgaagctggtggaacatatggtctccattttacagttaaggaatataatggacagattaatattgttctctgtcatgcccacaatccctttctaaggaagactgccctactatagcagtttttatatttgtcaatttatgaatataatgaatgagagttctggtacctcctgtctttacaaatattggtgttgtcagtatttttcctttttaaccattccaatcggtgtgtagtgatgtttcattttggttttaatttgtatatccctgatagctataattgggtcatagaaattctttatacattctagatgcaagtctcttgtcggatatatgtattgagatattacacctagtctgtggcttgactgttttctttatgtcttttgatgaatagaagttttaaattttgacaaggtcaaatttatttttttcttttgtttgatattttttctctccaatttaaccccaagatttcagatattctgctctattatataaactttatatttttatatttgtgatctaccttgaattgatatgtatgttgtgaattatggatcagggttctttttttcccccatacaagtatccagtcattgtaacactgtttattgaaagaattatcctttcctcattaaattaccttgccaattagtaaaaaatcaattaaccataa

SEQ ID NO: 296984 - DNA, 2599 bp, Homo sapiens
catccaaggcagcctgcgtggctcccgggagcgcgcacgtcccggagcccatgccgaccgcaggcgccgtatccgcgctcgtctagcagccccggttacgcggttgcacgtcggccccagccctgaggagccggaccgatgtggaaactgctgcccgccgcgggcccggcaggaggagaaccatacagacttttgactggcgttgagtacgttgttggaaggaaaaactgtgccattctaattgaaaatgatcagtcgatcagccgaaatcatgctgtgttaactgctaacttttctgtaaccaacctgagtcaaacagatgaaatccctgtattgacattaaaagataattctaagtatggtacctttgttaatgaggaaaaaatgcagaatggcttttcccgaactttgaagtcgggggatggtattacttttggagtgtttggaagtaaattcagaatagagtatgagcctttggttgcatgctcttcttgtttagatgtctctgggaaaactgctttaaatcaagctatattgcaacttggaggatttactgtaaacaattggacagaagaatgcactcaccttgtcatggtatcagtgaaagttaccattaaaacaatatgtgcactcatttgtggacgtccaattgtaaagccagaatattttactgaattcctgaaagcagttgagtccaagaagcagcctccacaaattgaaagtttttacccacctcttgatgaaccatctattggaagtaaaaatgttgatctgtcaggacggcaggaaagaaaacaaatcttcaaagggaaaacatttatatttttgaatgccaaacagcataagaaattgagttccgcagttgtctttggaggtggggaagctaggttgataacagaagagaatgaagaagaacataatttctttttggctccgggaacgtgtgttgttgatacaggaataacaaactcacagaccttaattcctgactgtcagaagaaatggattcagtcaataatggatatgctccaaaggcaaggtcttagacctattcctgaagcagaaattggattggcggtgattttcatgactacaaagaattactgtgatcctcagggccatcccagtacaggattaaagacaacaactccaggaccaagcctttcacaaggcgtgtcagttgatgaaaaactaatgccaagcgccccagtgaacactacaacatacgtagctgacacagaatcagagcaagcagatacatgggatttgagtgaaaggccaaaagaaatcaaagtctccaaaatggaacaaaaattcagaatgctttcacaagatgcacccactgtaaaggagtcctgcaaaacaagctctaataataatagtatggtatcaaatactttggctaagatgagaatcccaaactatcagctttcaccaactaaattgccaagtataaataaaagtaaagatagggcttctcagcagcagcagaccaactccatcagaaactactttcagccgtctaccaaaaaaagggaaagggatgaagaaaatcaagaaatgtcttcatgcaaatcagcaagaatagaaacgtcttgttctcttttagaacaaacacaacctgctacaccctcattgtggaaaaataaggagcagcatctatctgagaatgagcctgtggacacaaactcagacaataacttatttacagatacagatttaaaatctattgtgaaaaattctgccagtaaatctcatgctgcagaaaagctaagatcaaataaaaaaagggaaatggatgatgtggccatagaagatgaagtattggaacagttattcaaggacacaaaaccagagttagaaattgatgtgaaagttcaaaaacaggaggaagatgtcaatgttagaaaaaggccaaggatggatatagaaacaaatgacactttcagtgatgaagcagtaccagaaagtagcaaaatatctcaagaaaatgaaattgggaagaaacgtgaactcaaggaagactcactatggtcagctaaagaaatatctaacaatgacaaacttcaggatgatagtgagatgcttccaaaaaagctgttattgactgaatttagatcactggtgattaaaaactctacttccagaaatccatctggcataaatgatgattatggtcaactaaaaaatttcaagaaattcaaaaaggtcacatatcctggagcaggaaaacttccacacatcattggaggatcagatctaatagctcatcatgctcgaaagaatacagaactagaagagtggctaaggcaggaaatggaggtacaaaatcaacatgcaaaagaagagtctcttgctgatgatctttttagatacaatccttatttaaaaaggagaagataactgaggattttaaaaagaagccatggaaaaacttcctagtaagcatctacttcaggccaacaaggttatatgaatatatagtgtatagaagcgatttaagttacaatgttttatggcctaaatttattaaataaaatgcacaaaagatgcggccgactccgccccctcatcccacccggacaactcggacggacct

SEQ ID NO: 296985 - DNA, 915 bp, Homo sapiens
  misc_feature (25)..(26): n is a, c, g, or t
tcgacggagactctctataatattnnaatgggtgagccaatctgcaatttctactacaggcattgagaccagttagattattgaaatattatagagagttatgaacacttaaattatgatagtggtatgacattggatagaacatgggatactttagaagtagaattgacagggcatattagttgatgaaatggagtcatttgagtctcttaatagccatgtatcataattaccaagtgaagctggtggaacatatggtctccattttacagttaaggaatataatggacagattaatattgttctctgtcatgcccacaatccctttctaaggaagactgccctactatagcagtttttatatttgtcaatttatgaatataatgaatgagagttctggtacctcctgtctttacaaatattggtgttgtcagtatttttcctttttaaccattccaatcggtgtgtagtgatgtttcattttggttttaatttgtatatccctgatagctataattgggtcatagaaattctttatacattctagatgcaagtctcttgtcggatatatgtattgagatattacacctagtctgtggcttgactgttttctttatgtcttttgatgaatagaagttttaaattttgacaaggtcaaatttatttttttcttttgtttgatattttttctctccaatttaaccccaagatttcagatattctgctctattatataaactttatatttttatatttgtgatctaccttgaattgatatgtatgttgtgaattatggatcagggttctttttttcccccatacaagtatccagtcattgtaacactgtttattgaaagaattatcctttcctcattaaattaccttgccaattagtaaaaaatcaattaaccataa

SEQ ID NO: 296986 - DNA, 1310 bp, Homo sapiens
catccaaggcagcctgcgtggctcccgggagcgcgcacgtcccggagcccatgccgaccgcaggcgccgtatccgcgctcgtctagcagccccggttacgcggttgcacgtcggccccagccctgaggagccggaccgatgtggaaactgctgcccgccgcgggcccggcaggaggagaaccatacagacttttgactggcgttgagtacgttgttggaaggaaaaactgtgccattctaattgaaaatgatcagtcgatcagccgaaatcatgctgtgttaactgctaacttttctgtaaccaacctgagtcaaacagatgaaatccctgtattgacattaaaagataattctaagtatggtacctttgttaatgaggaaaaaatgcagaatggcttttcccgaactttgaagtcgggggatggtattacttttggagtgtttggaagtaaattcagaatagagtatgagcctttggttgcatgctcttcttgtttagatgtctctgggaaaactgctttaaatcaagctatattgcaacttggaggatttactgtaaacaattggacagaagaatgcactcaccttgtcatggtatcagtgaaagttaccattaaaacaatatgtgcactcatttgtggacgtccaattgtaaagccagaatattttactgaattcctgaaagcagttgagtccaagaagcagcctccacaaattgaaagtttttacccacctcttgatgaaccatctattggaagtaaaaatgttgatctgtcaggacggcaggaaagaaaacaaatcttcaaagggaaaacatttatatttttgaatgccaaacagcataagaaattgagttccgcagttgtctttggaggtggggaagctaggttgataacagaagagaatgaagaagaacataatttctttttggctccgggaacgtgtgttgttgatacaggaataacaaactcacagaccttaattcctgactgtcagaagaaatggattcagtcaataatggatatgctccaaaggcaaggtcttagacctattcctgaagcagaaattggattggcggtgattttcatgactacaaagaattactgtgatcctcagggccatcccagtacaggattaaagacaacaactccaggaccaagcctttcacaaggcgtgtcagttgatgaaaaactaatgccaagcgccccagtgaacactacaacatacgtagctgacacagaatcagagcaagcagatacatgatgggactgactagttgcaggaaaacgagcttaaggctctcactgatt

SEQ ID NO: 296987 - DNA, 436 bp, Homo sapiens
ctataacctcgtattctcatgggactaatttttacaatgtggttttgatactgtaaaacaaacaaaaaaagatctaggaatgaaattgtcatgttttaaatgaaacagactgcaccaaagcaaaaaattctcaaatgtgtgtgaggggtcaggagaatccccactgacttacacaaataaagaacatgtgtgttctaggaggggtattcctgggttaagaaacttccctaaggggaaatatgaattgttagttgagtgatcttcctctcaaggcaaccgaagcagtaattgttgtctgccgtgttgggaggttagccacctgcctattgtcttttcttttgaaaactttttctctgagaagtgaatgtactgagtggtaaaagactttaaattatttgctaacttttcagagtcaaacagatgaaatccctgtatt

SEQ ID NO: 296988 - DNA, 685 bp, Homo sapiens
ggcttaagctttgaagtcattagaacaaaatacagtgctttgaattgtagtgtttgtgttcatcttgagttgctttaattgttaaatgataaggtaaggccattttaaaataaaaactccaaatgaaaagtgttaaattatttttaatacataaatcccatgacatgtccagatctgtatatagtaatagctataaaagaagggcaaaaacagatgggtttagaacagagttactgctctcacttttatttgtagaatataaacatctttggcacttatgcatgatttaccatctttgctttttaatctttttaaaaaaatggtcatttttgtttgttaatatgatttactgtactacttttattattcaataggtcacatatcctggagcaggaaaacttccacacatcattggaggatcagatctaatagctcatcatgctcgaaagaatacagaactagaagagtggctaaggcaggaaatggaggttagtaggaagtgaggcccagaaacttgcttaaattgcactttggtccattatggtggccttcaagcaaattcttcttaaaaccaaattaaaataagtgacataaagtcattcattcaggagcattcctgagttacagagcattaatctatacccttccataacacttctttaaaagaatactaaatttatttttg

SEQ ID NO: 296989 - DNA, 459 bp, Homo sapiens
ctttcttgggatggtaaaatatattcagtgtatttttgtctaaaaattatcttctaaggttatattacgttagaactatttaacgatctttgtttctctattaaagttgctgtaaacttgattatttaccttgcattcttttctttttctacagggatttgagtgaaaggccaaaagaaatcaaagtctccaaaatggaacaaaaattcagaatgctttcacaagatgcacccactgtaaaggagtcctgcaaaacaagctctaataataatagtatggtatcaaatactttggctaagatgagaatcccaaactatcagctttcaccaactaaattgccaagtataaataaaagtaaagatagggcttctcagcagcagcagaccaactccatcagaaactactttcagccgtctaccaaaaaaaggtctgtttttgataacttctctcatgtctctg

SEQ ID NO: 296990 - DNA, 639 bp, Homo sapiens
ttgtcagtatttttcctttttaaccattccaatcggtgtgtagtgatgtttcattttggttttaatttgtatatccctgatagctataattgggtcatagaaattctttatacattctagatgcaagtctcttgtcggatatatgtattgagatattacacctagtctgtggcttgactgttttctttatgtcttttgatgaatagaagttttaaattttgacaaggtcaaatttatttttttcttttgtttgatattttttctctccaatttaaccccaagatttcagatattctgctctattatataaactttatatttttatatttgtgatctaccttgaattgatatgtatgttgtgaattatggatcagggttctttttttcccccatacaagtatccagtcattgtaacactgtttattgaaagaattatcctttcctcattaaattaccttgccaattagtaaaaaatcaattaaccataatggtggatctgtttctggactttctgtttggttacactgaaatgtttgtccatccttgcactcactcataccatactgccttgaattactgtagctgcatagatgctccttaagttgggattacattgtaataaacgcaatgtaagttgaa

SEQ ID NO: 296991 - DNA, 1532 bp, Homo sapiens
tcctgggctccgtcagctaggggactccgcccctcccgatttcctccgggctacaggcgacagagctgagccaagcgtttactgggcagctgttacgctcagattccaaatgaaaatgtttgagagcgctgactctacagccacaagatctggccaggatctctgggctgaaatttgttcctgtctgccaaatcctgaacaagaagatggtgccaacaatgcattctcagactcctttgtggattcttgccctgaaggtgaaggccagagggaggtggctgactttgctgtccagccagctgtaaagccttgggctcccttgcaggattcagaagtgtatttagcatctctagagaagaagctaagaagaatcaaaggtttaaatcaggaagtgacttccaaggacatgcttcgaactctggcccaagccaagaaggaatgctgggatcggttcctccaggagaagttagcttcagagttctttgtggatggacttgattctgatgagagcaccttggaacatttcaagaggtggctccagccagataaagtagccgtcagcacagaggaggtccagtatctgattcctccagagtcacaggttgagaagccagtggccgaggacgagccagcagccggggacaagccagcagcagcagaacagtaaattacacacacacacacacacacacacacacacaaacacacacacacacacacacacacgccgagcagctgtctcgggtccagagcgagcagcgtggagctcagtgacagcagcagggagaaatccactgaaggaaaaaacccaaatttccactccacaaagaaaacagctgcaagcccccagggacttacctggggctggcatgtgtgactgtctcggatgaagtgactgacccagtgcacactggatcaaaatgctgctttcctctgtgtctcacagcttggctgagctctgtctctgcaggttagaagtctgctaaagatcaaatgtgaaagtacttggagaaactgaggcctcttatgtgtaatgtgtaagttaagtgagccatatattttcttgcctcttccggacattcatgcttgtgtcccaagcattcccttggtgaattgtcacgtgagtggggccagtaagagtgaagtctgctccttgaatccaagccccatctggggcttctctaacaaatctgtagtaagtatacggactccagggagagaggctgggcttctttctctcatttgttccttgtggaacaaatgggcaaaagaagtgtgaaaatgtgggtgtttatgtctgtgtatatgtattttttacttcatgcatggcttctcctccaacttcctcctgcacttaaaaagggccaggttccaaattagacttgtaaatatggtgttagtgtttgacactactcctggatagttccaaacatcttccttgtggcaggtttcctggctgagcccgagcttccctccctgtttattgtgttcatgatcagtatgtgtttccatataaaacttttctcaacgga

SEQ ID NO: 296992 - DNA, 1472 bp, Homo sapiens
  misc_feature (1094)..(1094): n is a, c, g, or t
  misc_feature (1352)..(1353): n is a, c, g, or t
  misc_feature (1355)..(1355): n is a, c, g, or t
  misc_feature (1370)..(1370): n is a, c, g, or t
  misc_feature (1384)..(1384): n is a, c, g, or t
  misc_feature (1393)..(1394): n is a, c, g, or t
tcctgggctccgtcagctaggggactccgcccctcccgatttcctccgggctacaggcgacagagctgagccaagcgtttactgggcagctgttacgctcagattccaaatgaaaatgtttgagagcgctgactctacagccacaagatctggccaggatctctgggctgaaatttgttcctgtctgccaaatcctgaacaagaagatggtgccaacaatgcattctcagactcctttgtggattcttgccctgaaggtgaaggccagagggaggtggctgactttgctgtccagccagctgtaaagccttgggctcccttgcaggattcagaagtgtatttagcatctctagagaagaagctaagaagaatcaaaggtttaaatcaggaagtgacttccaaggacatgcttcgaactctggcccaagccaagaaggaatgctgggatcggttcctccaggagaagttagcttcagagttctttgtggatggacttgattctgatgagaggtgactacaattgcaaagtagaatttgctttgacacctgatgccaggacaatagtatgttaccatccttctatagacattccatatgaacgcacaaaacctatcccttgaccagatcctgtgtataataatgaagaaacacatggtcaagtgctgaaaactagagaagaaaaaagtgaacaccttgagcgagaacccataatagaacaacttagcaaaatgttctttatgctaagtacggttggcatcttcgtggacattagcacagatgtcagaagaaaccggaacctccagaagacagatgatattgaggttcttggggaattaaagagaaatattaccctctgcctcatttgccattggagacagtgcaatctggtgtatgcactaataataataataacatgtcttttcatattttaaaaaaaaacacaaaatctttaggaagccgaggtgggtggatcgcttgagtcaggagtttgagagcagcctgagcaacatagaccccatctctaaaaaaaattagccaagtgtggtgatgtgtgtctgtggtgccagctacttggaaggctgaggtaggaggantgcttgagctcaggaggttgaggctgcagagagtggtgatcatgcctctgcattccagccttggtgacagagcaagaccctgtctcaaacaacaacaacaacaaaaatcaaaatctatgcaaaatttaaacccaatcttgcgctagtcttgtgggaatgaagattaatttacctaaaaatgctcctctggtttttgtaattctttttgttactttttaaaaatataaatttggccaggcacggtggctcacacctgtnntntcagctactcgggangctgaggcaggagnatcgcttgnncctgggaggcggaggttgcagtgagccgaggtcccgccactgcactccagcctgggtgacagagtgagactctgtctc

SEQ ID NO: 296993 - DNA, 914 bp, Homo sapiens
tcctgggctccgtcagctaggggactccgcccctcccgatttcctccgggctacaggcgacagagctgagccaagcgtttactgggcagctgttacgctcagattccaaatgaaaatgtttgagagcgctgactctacagccacaagatctggccaggatctctgggctgaaatttgttcctgtctgccaaatcctgaacaagaagatggtgccaacaatgcattctcagactcctttgtggattcttgccctgaaggtgaaggccagagggaggtggctgactttgctgtccagccagctgtaaagccttgggctcccttgcaggattcagaagtgtatttagcatctctagcgcggagggccggagacgctgcagacccgcgacccggagcagctcggaggcggtgaataatagctcttcaagtctgcaataaaaaatggcctccaacaaaactacattgcaaaaaatgggacaacaccagaatggaaagagtacaaaacagttgaagaggcagacgctgaagaatttgtcgtggcaaaagtactagatcgacgtgtagtgaatgggaaagtggaatatttcctgaagtggaagggattacagatgtgacatacttgggaactgagaaaatttagatggtcagaatgttgacggttctatctagcaaggtgccaagacaagatgtccaccaggaaatctttctctgaggggattggtgcgcactcaagacgaaaggatgtggtgcaaccagaggttgcggaggtggactgggaaatatgggccaaccgggatgtggttctgaggcacgtcatcggcctggggggaagagatataggtccggtggttaagacccgtctgcgagagccatcgcagctttttctataacaggcgggcgacaaaactatgcgggtc

SEQ ID NO: 296994 - DNA, 967 bp, Homo sapiens
tcctgggctccgtcagctaggggactccgcccctcccgatttcctccgggctacaggcgacagagctgagccaagcgtttactgggcagctgttacgctcagattccaaatgaaaatgtttgagagcgctgactctacagccacaagatctggccaggatctctgggctgaaatttgttcctgtctgccaaatcctgaacaagaagatggtgccaacaatgcattctcagactcctttgtggattcttgccctgaaggtgaaggccagagggaggtggctgactttgctgtccagccagctgtaaagccttgggctcccttgcaggattcagaagtgtatttagcatctctagccattttattttaaaaatatttcctgacttcggatgtggcttgagctggtaggcgcggagggccggagacgctgcagacccgcgacccggagcagctcggaggcggtgaataatagctcttcaagtctgcaataaaaaatggcctccaacaaaactacattgcaaaaaatgggacaacaccagaatggaaagagtacaaaacagttgaagaggcagacgctgaagaatttgtcgtggcaaaagtactagatcgacgtgtagtgaatgggaaagtggaatatttcctgaagtggaagggattacagatgtgacatacttgggaactgagaaaatttagatggtcagaatgttgacggttctatctagcaaggtgccaagacaagatgtccaccaggaaatctttctctgaggggattggtgcgcactcaagacgaaaggatgtggtgcaaccagaggttgcggaggtggactgggaaatatgggccaaccgggatgtggttctgaggcacgtcatcggcctggggggaagagatataggtccggtggttaagacccgtctgcgagagccatcgcagctttttctataacaggcgggcgacaaaactatgcgggtc

SEQ ID NO: 296995 - DNA, 1826 bp, Homo sapiens
tcctgggctccgtcagctaggggactccgcccctcccgatttcctccgggctacaggcgacagagctgagccaagcgtttactgggcagctgttacgctcagattccaaatgaaaatgtttgagagcgctgactctacagccacaagatctggccaggatctctgggctgaaatttgttcctgtctgccaaatcctgaacaagaagatggtgccaacaatgcattctcagactcctttgtggattcttgccctgaaggtgaaggccagagggaggtggctgactttgctgtccagccagctgtaaagccttgggctcccttgcaggattcagaagtgtatttagcatctctagagaagaagctaagaagaatcaaaggtttaaatcaggaagtgacttccaaggacatgcttcgaactctggcccaagccaagaaggaatgctgggatcggttcctccaggagaagttagcttcagagttctttgtggatggacttgattctgatgagagcaccttggaacatttcaagaggtggctccagccagataaagtagccgtcagcacagaggaggtccagtatctgattcctccagagtcacaggttgagaagccagtggccgaggacgagccagcagccggggacaagccagcagcagcagaacagtaaattacacacacacacacacacacacacacacacaaacacacacacacacacacacacacgccgagcagctgtctcgggtccagagcgagcagcgtggagctcagtgacagcagcagggagaaatccactgaaggaaaaaacccaaatttccactccacaaagaaaacagctgcaagcccccagggacttacctggggctggcatgtgtgactgtctcggatgaagtgactgacccagtgcacactggatcaaaatgctgctttcctctgtgtctcacagcttggctgagctctgtctctgcaggttagaagtctgctaaagatcaaatgtgaaagtacttggagaaactgaggcctcttatgtgtaatgtgtaagttaagtgagccatatattttcttgcctcttccggacattcatgcttgtgtcccaagcattcccttggtgaattgtcacgtgagtggggccagtaagagtgaagtctgctccttgaatccaagccccatctggggcttctctaacaaatctgtagtaagtatacggactccagggagagaggctgggcttctttctctcatttgttccttgtggaacaaatgggcaaaagaagtgtgaaaatgtgggtgtttatgtctgtgtatatgtattttttacttcatgcatggcttctcctccaacttcctcctgcacttaaaaagggccaggttccaaattagacttgtaaatatggtgttagtgtttgacactactcctggatagttccaaacatcttccttgtggcaggtttcctggctgagcccgagcttccctccctgtttattgtgttcatgatcagtatgtgtttccatataaaacttttctcaacggaatagcagtgtctgtggtgctgttgactcgattgctcctggaaggatgttcccaggcagcaggaggtaaagacaaatgcatgcaaaggcatgggagctggccactttgccagcctcctgttattagcatgtgccctcagacagtccagactttggtgttctgaggccttagctccatgggccttcttcctgggtaatagtttacaaatccctaaagatcagtagggtgtctgtaaaaatcttccgatcgagagaggagctaaaagaaaaaatagaataaataaatcttctgagaa

SEQ ID NO: 296996 - DNA, 1795 bp, Homo sapiens
tcctgggctccgtcagctaggggactccgcccctcccgatttcctccgggctacaggcgacagagctgagccaagcgtttactgggcagctgttacgctcagattccaaatgaaaatgtttgagagcgctgactctacagccacaagatctggccaggatctctgggctgaaatttgttcctgtctgccaaatcctgaacaagaagatggtgccaacaatgcattctcagactcctttgtggattcttgccctgaaggtgaaggccagagggaggtggctgactttgctgtccagccagctgtaaagccttgggctcccttgcaggattcagaagtgtatttagcatctctagagaagaagctaagaagaatcaaaggtttaaatcaggaagtgacttccaaggacatgcttcgaactctggcccaagccaagaaggaatgctgggatcggttcctccaggagaagttagcttcagagttctttgtggatggacttgattctgatgagagcaccttggaacatttcaagaggtggctccagccagataaagtagccgtcagcacagaggaggtccagtatctgattcctccagagtcacaggttgagaagccagtggccgaggacgagccagcagccggggacaagccagcagcagcagaacagtaaattaacacacacacacacacacacacacgccgagcagctgtctcgggtccagagcgagcagcgtggagctcagtgacagcagcagggagaaatccactgaaggaaaaaacccaaatttccactccacaaagaaaacagctgcaagcccccagggacttacctggggctggcatgtgtgactgtctcggatgaagtgactgacccagtgcacactggatcaaaatgctgctttcctctgtgtctcacagcttggctgagctctgtctctgcaggttagaagtctgctaaagatcaaatgtgaaagtacttggagaaactgaggcctcttatgtgtaatgtgtaagttaagtgagccatatattttcttgcctcttccggacattcatgcttgtgtcccaagcattcccttggtgaattgtcacgtgagtggggccagtaagagtgaagtctgctccttgaatccaagccccatctggggcttctctaacaaatctgtagtaagtatacggactccagggagagaggctgggcttctttctctcatttgttccttgtggaacaaatgggcaaaagaagtgtgaaaatgtgggtgtttatgtctgtgtatatgtattttttacttcatgcatggcttctcctccaacttcctcctgcacttaaaaagggccaggttccaaattagacttgtaaatatggtgttagtgtttgacactactcctggatagttccaaacatcttccttgtggcaggtttcctggctgagcccgagcttccctccctgtttattgtgttcatgatcagtatgtgtttccatataaaacttttctcaacggaatagcagtgtctgtggtgctgttgactcgattgctcctggaaggatgttcccaggcagcaggaggtaaagacaaatgcatgcaaaggcatgggagctggccactttgccagcctcctgttattagcatgtgccctcagacagtccagactttggtgttctgaggccttagctccatgggccttcttcctgggtaatagtttacaaatccctaaagatcagtagggtgtctgtaaaaatcttccgatcgagagaggagctaaaagaaaaaatagaataaataaatcttctgagaa

SEQ ID NO: 296997 - DNA, 2011 bp, Homo sapiens
tcctgggctccgtcagctaggggactccgcccctcccgatttcctccgggctacaggcgacagagctgagccaagcgtttactgggcagctgttacggtaagtgaggaggggctggggtgcccagcgttttggatctcccactctggcccggccccggaataccacatagaggccttgggacctgattcatcccgtccagacagccctagagacctgagcgactgaggcctgggatctggacgccggaatttcctgcgtggttctggacgccctgccctgggctcagattccaaatgaaaatgtttgagagcgctgactctacagccacaagatctggccaggatctctgggctgaaatttgttcctgtctgccaaatcctgaacaagaagatggtgccaacaatgcattctcagactcctttgtggattcttgccctgaaggtgaaggccagagggaggtggctgactttgctgtccagccagctgtaaagccttgggctcccttgcaggattcagaagtgtatttagcatctctagagaagaagctaagaagaatcaaaggtttaaatcaggaagtgacttccaaggacatgcttcgaactctggcccaagccaagaaggaatgctgggatcggttcctccaggagaagttagcttcagagttctttgtggatggacttgattctgatgagagcaccttggaacatttcaagaggtggctccagccagataaagtagccgtcagcacagaggaggtccagtatctgattcctccagagtcacaggttgagaagccagtggccgaggacgagccagcagccggggacaagccagcagcagcagaacagtaaattacacacacacacacacacacacacacacacaaacacacacacacacacacacacacgccgagcagctgtctcgggtccagagcgagcagcgtggagctcagtgacagcagcagggagaaatccactgaaggaaaaaacccaaatttccactccacaaagaaaacagctgcaagcccccagggacttacctggggctggcatgtgtgactgtctcggatgaagtgactgacccagtgcacactggatcaaaatgctgctttcctctgtgtctcacagcttggctgagctctgtctctgcaggttagaagtctgctaaagatcaaatgtgaaagtacttggagaaactgaggcctcttatgtgtaatgtgtaagttaagtgagccatatattttcttgcctcttccggacattcatgcttgtgtcccaagcattcccttggtgaattgtcacgtgagtggggccagtaagagtgaagtctgctccttgaatccaagccccatctggggcttctctaacaaatctgtagtaagtatacggactccagggagagaggctgggcttctttctctcatttgttccttgtggaacaaatgggcaaaagaagtgtgaaaatgtgggtgtttatgtctgtgtatatgtattttttacttcatgcatggcttctcctccaacttcctcctgcacttaaaaagggccaggttccaaattagacttgtaaatatggtgttagtgtttgacactactcctggatagttccaaacatcttccttgtggcaggtttcctggctgagcccgagcttccctccctgtttattgtgttcatgatcagtatgtgtttccatataaaacttttctcaacggaatagcagtgtctgtggtgctgttgactcgattgctcctggaaggatgttcccaggcagcaggaggtaaagacaaatgcatgcaaaggcatgggagctggccactttgccagcctcctgttattagcatgtgccctcagacagtccagactttggtgttctgaggccttagctccatgggccttcttcctgggtaatagtttacaaatccctaaagatcagtagggtgtctgtaaaaatcttccgatcgagagaggagctaaaagaaaaaatagaataaataaatcttctgagaa

SEQ ID NO: 296998 - DNA, 1474 bp, Homo sapiens
tcctgggctccgtcagctaggggactccgcccctcccgatttcctccgggctacaggcgacagagctgagccaagcgtttactgggcagctgttacgctcagattccaaatgaaaatgtttgagagcgctgactctacagccacaagatctggccaggatctctgggctgaaatttgttcctgtctgccaaatcctgaacaagaagatggtgccaacaatgcattctcagactcctttgtggattcttgccctgaaggtgaaggccagagggaggtggctgactttgctgtccagccagctgtaaagccttgggctcccttgcaggattcagaagtgtatttagcatctctagagaagaagctaagaagaatcaaaggtttaaatcaggaagtgacttccaaggacatgcttcgaactctggcccaagccaagaaggaatgctgggatcggttcctccaggagaagttagcttcagagttctttgtggatggacttgattctgatgagagcaccttggaacatttcaagaggtggctccagccagataaagtagccgtcagcacagaggaggtccagtatctgattcctccagagtcacaggttgagaagccagtggccgaggacgagccagcagccggggacaagccagcagcagcagaacagtaaattacacacacacacacacacacacacacacacaaacacacacacacacacacacacacgccgagcagctgtctcgggtccagagcgagcagcgtggagctcagtgacagcagcagggagaaatccactgaaggaaaaaacccaaatttccactccacaaagaaaacagctgcaagcccccagggacttacctggggctggcatgtgtgactgtctcggatgaagtgactgacccagtgcacactggatcaaaatgctgctttcctctgtgtctcacagcttggctgagctctgtctctgcaggttagaagtctgctaaagatcaaatgtgaaagtacttggagaaactgaggcctcttatgtgtaatgtgtgactacaattgcaaagtagaatttgctttgacacctgatgccaggacaatagtatgttaccatccttctatagacattccatatgaacgcacaaaacctatcccttgaccagatcctgtgtataataatgaagaaacacatggtcaagtgctgaaaactagagaagaaaaaagtgaacaccctgtgtggcgaggtgccgctctactacatctaggacgcctccggtgagcagggtcagtggaagccccaacgggaaaggaaacgccccgggcaaagggtcttttgcagcttttgcagacgggcaagaagctgcttctgcccacaccgcagggacaaaccctggagaaatgggagcttggggagaggatgggagtgggcagaggtggcacccagggcccgggaactcctgccacaacagaataaagcagcctgatt

SEQ ID NO: 296999 - DNA, 1570 bp, Homo sapiens
tcctgggctccgtcagctaggggactccgcccctcccgatttcctccgggctacaggcgacagagctgagccaagcgtttactgggcagctgttacgagaagaagctaagaagaatcaaaggtttaaatcaggaagtgacttccaaggacatgcttcgaactctggcccaagccaagaaggaatgctgggatcggttcctccaggagaagttagcttcagagttctttgtggatggacttgattctgatgagagcaccttggaacatttcaagaggtggctccagccagataaagtagccgtcagcacagaggaggtccagtatctgattcctccagagtcacaggttgagaagccagtggccgaggacgagccagcagccggggacaagccagcagcagcagaacagtaaattacacacacacacacacacacacacacacacaaacacacacacacacacacacacacgccgagcagctgtctcgggtccagagcgagcagcgtggagctcagtgacagcagcagggagaaatccactgaaggaaaaaacccaaatttccactccacaaagaaaacagctgcaagcccccagggacttacctggggctggcatgtgtgactgtctcggatgaagtgactgacccagtgcacactggatcaaaatgctgctttcctctgtgtctcacagcttggctgagctctgtctctgcaggttagaagtctgctaaagatcaaatgtgaaagtacttggagaaactgaggcctcttatgtgtaatgtgtaagttaagtgagccatatattttcttgcctcttccggacattcatgcttgtgtcccaagcattcccttggtgaattgtcacgtgagtggggccagtaagagtgaagtctgctccttgaatccaagccccatctggggcttctctaacaaatctgtagtaagtatacggactccagggagagaggctgggcttctttctctcatttgttccttgtggaacaaatgggcaaaagaagtgtgaaaatgtgggtgtttatgtctgtgtatatgtattttttacttcatgcatggcttctcctccaacttcctcctgcacttaaaaagggccaggttccaaattagacttgtaaatatggtgttagtgtttgacactactcctggatagttccaaacatcttccttgtggcaggtttcctggctgagcccgagcttccctccctgtttattgtgttcatgatcagtatgtgtttccatataaaacttttctcaacggaatagcagtgtctgtggtgctgttgactcgattgctcctggaaggatgttcccaggcagcaggaggtaaagacaaatgcatgcaaaggcatgggagctggccactttgccagcctcctgttattagcatgtgccctcagacagtccagactttggtgttctgaggccttagctccatgggccttcttcctgggtaatagtttacaaatccctaaagatcagtagggtgtctgtaaaaatcttccgatcgagagaggagctaaaagaaaaaatagaataaataaatcttctgagaa

SEQ ID NO: 297000 - DNA, 1480 bp, Homo sapiens
aattatgcgcagagctgccaggatgcacagctgccattaggagtatccttgtacttcccagtttagcagtgaaaaacaattgtaggaagaaattgctggtgggcgggaaggtagtgtttgagtaactgagataatcattaagtaattaatcagtgaggtctgacacagccacccttttattctgccctttcatagcaccttggaacatttcaagaggtggctccagccagataaagtagccgtcagcacagaggaggtccagtatctgattcctccagagtcacaggttgagaagccagtggccgaggacgagccagcagccggggacaagccagcagcagcagaacagtaaattaacacacacacacacacacacacacgccgagcagctgtctcgggtccagagcgagcagcgtggagctcagtgacagcagcagggagaaatccactgaaggaaaaaacccaaatttccactccacaaagaaaacagctgcaagcccccagggacttacctggggctggcatgtgtgactgtctcggatgaagtgactgacccagtgcacactggatcaaaatgctgctttcctctgtgtctcacagcttggctgagctctgtctctgcaggttagaagtctgctaaagatcaaatgtgaaagtacttggagaaactgaggcctcttatgtgtaatgtgtaagttaagtgagccatatattttcttgcctcttccggacattcatgcttgtgtcccaagcattcccttggtgaattgtcacgtgagtggggccagtaagagtgaagtctgctccttgaatccaagccccatctggggcttctctaacaaatctgtagtaagtatacggactccagggagagaggctgggcttctttctctcatttgttccttgtggaacaaatgggcaaaagaagtgtgaaaatgtgggtgtttatgtctgtgtatatgtattttttacttcatgcatggcttctcctccaacttcctcctgcacttaaaaagggccaggttccaaattagacttgtaaatatggtgttagtgtttgacactactcctggatagttccaaacatcttccttgtggcaggtttcctggctgagcccgagcttccctccctgtttattgtgttcatgatcagtatgtgtttccatataaaacttttctcaacggaatagcagtgtctgtggtgctgttgactcgattgctcctggaaggatgttcccaggcagcaggaggtaaagacaaatgcatgcaaaggcatgggagctggccactttgccagcctcctgttattagcatgtgccctcagacagtccagactttggtgttctgaggccttagctccatgggccttcttcctgggtaatagtttacaaatccctaaagatcagtagggtgtctgtaaaaatcttccgatcgagagaggagctaaaagaaaaaatagaataaataaatcttctgagaa

SEQ ID NO: 297001 - DNA, 2184 bp, Homo sapiens
  misc_feature (1806)..(1806): n is a, c, g, or t
  misc_feature (2064)..(2065): n is a, c, g, or t
  misc_feature (2067)..(2067): n is a, c, g, or t
  misc_feature (2082)..(2082): n is a, c, g, or t
  misc_feature (2096)..(2096): n is a, c, g, or t
  misc_feature (2105)..(2106): n is a, c, g, or t
tcctgggctccgtcagctaggggactccgcccctcccgatttcctccgggctacaggcgacagagctgagccaagcgtttactgggcagctgttacggtaagtgaggaggggctggggtgcccagcgttttggatctcccactctggcccggccccggaataccacatagaggccttgggacctgattcatcccgtccagacagccctagagacctgagcgactgaggcctgggatctggacgccggaatttcctgcgtggttctggacgccctgccctgggctcagattccaaatgaaaatgtttgagagcgctgactctacagccacaagatctggccaggatctctgggctgaaatttgttcctgtctgccaaatcctgaacaagaagatggtgccaacaatgcattctcagactcctttgtggattcttgccctgaaggtgaaggccagagggaggtggctgactttgctgtccagccagctgtaaagccttgggctcccttgcaggattcagaagtgtatttagcatctctagagaagaagctaagaagaatcaaaggtttaaatcaggaagtgacttccaaggacatgcttcgaactctggcccaagccaagaaggaatgctgggatcggttcctccaggagaagttagcttcagagttctttgtggatggacttgattctgatgagagcaccttggaacatttcaagaggtggctccagccagataaagtagccgtcagcacagaggaggtccagtatctgattcctccagagtcacaggttgagaagccagtggccgaggacgagccagcagccggggacaagccagcagcagcagaacagtaaattacacacacacacacacacacacacacacacaaacacacacacacacacacacacacgccgagcagctgtctcgggtccagagcgagcagcgtggagctcagtgacagcagcagggagaaatccactgaaggaaaaaacccaaatttccactccacaaagaaaacagctgcaagcccccagggacttacctggggctggcatgtgtgactgtctcggatgaagtgactgacccagtgcacactggatcaaaatgctgctttcctctgtgtctcacagcttggctgagctctgtctctgcaggttagaagtctgctaaagatcaaatgtgaaagtacttggagaaactgaggcctcttatgtgtaatgtgtgactacaattgcaaagtagaatttgctttgacacctgatgccaggacaatagtatgttaccatccttctatagacattccatatgaacgcacaaaacctatcccttgaccagatcctgtgtataataatgaagaaacacatggtcaagtgctgaaaactagagaagaaaaaagtgaacaccttgagcgagaacccataatagaacaacttagcaaaatgttctttatgctaagtacggttggcatcttcgtggacattagcacagatgtcagaagaaaccggaacctccagaagacagatgatattgaggttcttggggaattaaagagaaatattaccctctgcctcatttgccattggagacagtgcaatctggtgtatgcactaataataataataacatgtcttttcatattttaaaaaaaaacacaaaatctttaggaagccgaggtgggtggatcgcttgagtcaggagtttgagagcagcctgagcaacatagaccccatctctaaaaaaaattagccaagtgtggtgatgtgtgtctgtggtgccagctacttggaaggctgaggtaggaggantgcttgagctcaggaggttgaggctgcagagagtggtgatcatgcctctgcattccagccttggtgacagagcaagaccctgtctcaaacaacaacaacaacaaaaatcaaaatctatgcaaaatttaaacccaatcttgcgctagtcttgtgggaatgaagattaatttacctaaaaatgctcctctggtttttgtaattctttttgttactttttaaaaatataaatttggccaggcacggtggctcacacctgtnntntcagctactcgggangctgaggcaggagnatcgcttgnncctgggaggcggaggttgcagtgagccgaggtcccgccactgcactccagcctgggtgacagagtgagactctgtctc

SEQ ID NO: 297002 - DNA, 718 bp, Homo sapiens
tcctgggctccgtcagctaggggactccgcccctcccgatttcctccgggctacaggcgacagagctgagccaagcgtttactgggcagctgttacgctcagattccaaatgaaaatgtttgagagcgctgactctacagccacaagatctggccaggatctctgggctgaaatttgttcctgtctgccaaatcctgaacaagaagatggtgccaacaatgcattctcagactcctttgtggattcttgccctgaaggtgaaggccagagggaggtggctgactttgctgtccagccagctgtaaagccttgggctcccttgcaggattcagaagtgtatttagcatctctagagaagaagctaagaagaatcaaaggtttaaatcaggaagtgacttccaaggacatgcttcgaactctggcccaagccaagaaggaatgctgggatcggttcctccaggagaagttagcttcagagttctttgtggatggacttgattctgatgagaggtaatcgattccccgtctagttccagctgaaatcatcctttatgtagttgttctatttgtttttagcccagcagtagatttttaagaacagacttttttgccaaaaggcaaatactgcagctacgtgttggtcacagattgaatagagttaaggataaagcattgtgttcatttttaagtatgcaatgaacttgagaaagtagtaact

SEQ ID NO: 297003 - DNA, 692 bp, Homo sapiens
tcctgggctccgtcagctaggggactccgcccctcccgatttcctccgggctacaggcgacagagctgagccaagcgtttactgggcagctgttacgctcagattccaaatgaaaatgtttgagagcgctgactctacagccacaagatctggccaggatctctgggctgaaatttgttcctgtctgccaaatcctgaacaagaagatggtgccaacaatgcattctcagactcctttgtggattcttgccctgaaggtgaaggccagagggaggtggctgactttgctgtccagccagctgtaaagccttgggctcccttgcaggattcagaagtgtatttagcatctctagagaagaagctaagaagaatcaaaggtttaaatcaggaagtgacttccaaggacatgcttcgaactctggcccaagccaagaaggaatgctgggatcggttcctccaggagaagttagcttcagagttctttgtggatggacttgattctgatgagaggtttgaactgcactggtccactgatagacaaagtttcttctgactgtgccaccccaagacagcaagaccaacccgttttcctcctcctcctcagcctactcgacgcgaagatgacaaggatgaagatctttatgatgatccacttccacttaatgaatagtaaacatagttttttctttctt

SEQ ID NO: 297004 - DNA, 1525 bp, Homo sapiens
ctaatagaaaagtgaaaccacaaacctgccaatagcagaatctttagagaaatgacgcgaaactcctgccttaaagccctaaatggcggcttcaatatcagccccactgagcatgaaattcatttacttaaataaaatctgaatctcagcccaaacctgggagattcaaaacctgagagcggtcttaccaaagacgcccgtatgtctggtgaagtcagttggatgcaagcagtttgtgctggtaccagggccccagctactgatgaagtggcaggagtccacagaagcctacttcgaagttcccggggcttccaggggagattgacgagattcctggggaggcgattcatgacagctgagttccttttggaggatccgtcttcaggcagagcactgccttcctcatgtaccatgcatcaagccctctccccagcctgaagaacaccatgttcctcttagcgatcatcagtaacaaggcgtgccactcgaagaactacaaagataagggttggggtttgtgctggggaaagctcatgacactagctgcaggaatagaggactgagcctcccaagtctggaaagcagagggaggatgccccgtctgatttcctcagcacctttgcagagctcttggtctcctgcctgtgcctgcaggcctgactcacttcctctctgcacgtgagactctgcacacctcctatcgggttatggacgcatggcagctcagccctccatttcatgtgacctcccagctttgctctctacaacacctaacccagtcagtttctgtgtcctaattcaaaattgctgggagaaaaaaaagtctgattggcatttgagtttgagaacgaaggcttgaaagagccagtttgaagaatgggagcaaggcctggctagagcactgatcgacaaacttttcctgtaaagggctgggtagtagatattgcaggctttgcaggccatgaaatccacgctgcattgtagtggcatgcaagctgccatagccaatctgtaaatgaatgagtgtggctgggtcgcattagcattttatttccaaaaatagcaggtggccagatttggcccagggactataattttccaattcctgagatactagaaacagaagtgttttgttgttgttttaactaactctttattgaagtacagcaaacaaaagtatacacattatagcattgtatgaactatcacagagtgactacacgcatgtaaccaccaactgtgtgaagaaaacattgcctgcatcccagaaactatgtatgcacccttactagtcactaatctcacactcctccccaaaagtaactaaaactctgatttgtattgtcagtggtttctcctgttttggactttatataaatgaagtcatattgtatgtatttctactttctgtctaacttctttgtatgatattctcccagtggaattcatctgtattgtggtttgtaccaatggttcatttctttttattggtattataatattttatggcatactattagtattt

SEQ ID NO: 297005 - DNA, 435 bp, Homo sapiens
aaaccatttctcctccgccgccatttcctaccaaccatacagcataataaggcagctcaaacccaataatatatacatcaaaagcagaaaacaaggaaaagtgatttgggattggcaaactggggttgacaagatgatacatattttaggatttgtgggctatgtattatttctcctgcatattcctcttctcttttttaagcaatatttaaaaaatgtaaaaaccattttcagcgtatggaccagtttgctgactgctgggcaggagcaaccacatcatgacagaaatgcagggatctgttcaccaacggccagaaatacaaaatcaatccctgagtcaaccagcagatagaaaggctgctttttaggtgaaaggagaaaaagaatgtctaaaatttggaaaaacaaaaaatgatgaattaaaaaaggaacaaa

SEQ ID NO: 297006 - DNA, 624 bp, Homo sapiens
ggcatagcatgctgcctggcttatatcccttttctttattttctccatattatttgaactcagagcaggaaatgatattgatgcttaagatttaattatctaacaagattgctcctgaggataccacaaaatactattctgtctgaaactgcaaataatttctaattcctgttgactccttaagaaggttaaagaaccgattatctttattgatttacttagttctttggtacaaaaaaaattcctagctgttctaacacttatctaacatttaaaaatcttttagtactgaattatatctatgcacacactgaatattttcccaagtatcttctccagctgaatatacatttactgacaatagtacgaagtaagcgatgtcctctaaagatttattaaaagcagaaaaatgaacatgcctcttaaccaattactcaaaaacctattctttgaataacttatttctcatagatgtatttattaaatttgtgtacttatttttaaacattatagtaaatgtccaagaaggaagccaagaggtaaatgggatgcagggtgagcccagctcccctggaggcgcacttcccaccaaatcacctggtagttcccttgagcaggtccgtg

SEQ ID NO: 297007 - DNA, 205 bp, Homo sapiens
caaaagatgccccccaagcccaattttgccccaattttgggcacaccccaaagaaaaatgcagggatctgttcaccaacggccagaaatacaaaatcaatccctgagtcaaccagcagatagaaaggctgctttttaggtgaaaggagaaaaagaatgtctaaaatttggaaaaacaaaaaatgatgaattaaaaaaggaacaaa

SEQ ID NO: 297008 - DNA, 1887 bp, Homo sapiens
ctaatagaaaagtgaaaccacaaacctgccaatagcagaatctttagagaaatgacgcgaaactcctgccttaaagccctaaatggcggcttcaatatcagccccactgagcatgaaattcatttacttaaataaaatctgaatctcagcccaaacctgggagattcaaaacctgagagcggtcttaccaaagacgcccgtatgtctggtgaagtcagttggatgcaagcagtttgtgctggtaccagggccccagctactgatgaagtggcaggagtccacagaagcctacttcgaagttcccggggcttccaggggagattgacgagattcctggggaggcgattcatgacagctgagttccttttggaggatccgtcttcaggcagtctgatcccccaggaaagcagctggaaaacaagagcatgtgaaggaagcgcagcagctcctcgccagccagacagccagccccgcaccgcaggagtcgacatgcacggcagcctagacgccatcagttaaacttatatgtaggcttgttgaggaaaacgactttcaaacacaaggcaaaagaaaaacatgaaaccaagggttccaacattcatcatccagtttcagagacacccttgaaggaatgctacagcctctttcttacccattcaaaccagtcgctctgctgcatacccacatcacaggaggccctcagccccgacacacaggctcactcagcccggggacatcagcacctgtgccagctccgcaaggtatccaccatgcggccagaactgaggcccagcaatagctgaaatgtcctttaaattaacatgtacaacacacaacccccaagagctgacatccccaaagccccaccacaaatagctgactcctacttatacctgcaggagcaggtactgacctctgcaattctaaaccgtccactttgggcaaaattcatcaagctatggatatgaaaaaaggccccaaggatatgattcatagtccagcgtttgagtgagcactccagtcagaacgaactctgcattgtgaacatctgaacagggtggaaacagacactttagttagagatccactgctgtgcgtgcacacatactcacacaggtaagcggggaaacgtacctatgcctctggcaaaatattctcggcataaatgaaggtcattttcacaggatattaaaattatttccgacaaactctaaggaaaagaaaatgagtttctcagtgaccgaacgctgaatgtgatacagggcaatgacggactcgctggcggactccactctacccaccgagttctgcttgtgctccatgagcttccggaaagatggctgcttggataacacctttcctcctgcacactctacgattgccttcatagtggaaagacttgggcagattccagaagaaaagttctctagagatgtgctgtggttcacaggaggaagacctccagtggcaatgtccaagaaggaagccaagagtgtaccttaaagagtggagaaacgtgtgcccgttttaaggattcttccaagctgaaagagaaaagtacttctgcctcagcatctcggagaatgtagttctgctcatctggaaaacagaacagcacatactctgaaaagtgtggacacgtgaagtgtggcaagtgtgacccacaaaattctcgcccatattcagcgtatggaccagtttgctgactgctgggcaggagcaaccacatcatgacagaaatgcagggatctgttcaccaacggccagaaatacaaaatcaatccctgagtcaaccagcagatagaaaggctgctttttaggtgaaaggagaaaaagaatgtctaaaatttggaaaaacaaaaaatgatgaattaaaaaaggaacaaa

SEQ ID NO: 297009 - DNA, 1597 bp, Homo sapiens
ctaatagaaaagtgaaaccacaaacctgccaatagcagaatctttagagaaatgacgcgaaactcctgccttaaagccctaaatggcggcttcaatatcagccccactgagcatgaaattcatttacttaaataaaatctgaatctcagcccaaacctgggagattcaaaacctgagagcggtcttaccaaagacgcccgtatgtctggtgaagtcagttggatgcaagcagtttgtgctggtaccagggccccagctactgatgaagtggcaggagtccacagaagcctacttcgaagttcccggggcttccaggggagattgacgagattcctggggaggcgattcatgacagctgagttccttttggaggatccgtcttcaggcagtctgatcccccaggaaagcagctggaaaacaagagcatgtgaaggaagcgcagcagctcctcgccagccagacagccagccccgcaccgcaggagtcgacatgcacggcagcctagacgccatcagttaaacttatatgtaggcttgttgaggaaaacgactttcaaacacaaggcaaaagaaaaacatgaaaccaagggttccaacattcatcatccagtttcagagacacccttgaaggaatgctacagcctctttcttacccattcaaaccagtcgctctgctgcatacccacatcacaggaggccctcagccccgacacacaggctcactcagcccggggacatcagcacctgtgccagctccgcaaggtatccaccatgcggccagaactgaggcccagcaatagctgaaatgtcctttaaattaacatgtacaacacacaacccccaagagctgacatccccaaagccccaccacaaatagctgactcctacttatacctgcaggagcaggtactgacctctgcaattctaaaccgtccactttgggcaaaattcatcaagctatggatatgaaaaaaggccccaaggatatgattcatagtccagcgtttgagtgagcactccagtcagaacgaactctgcattgtgaacatctgaacagggtggaaacagacactttagttagagatccactgctgtgcgtgcacacatactcacacaggtaagcggggaaacgtacctatgcctctggcaaaatattctcggcataaatgaaggtcattttcacaggatattaaaattatttccgacaaactctaaggaaaagaaaatgagtttctcagtgaccgaacgctgaatgtgatacagggcaatgacggactcgctggcggactccactctacccaccgagttctgcttgtgctccatgagcttccggaaagatggctgcttggataacacctttcctcctgcacactctacgattgccttcatagtggaaagacttgggcagattccaggaggaagacctccagtggcaatgtccaagaaggaagccaagagtgtaccttaaagagtggagaaacgtgtgcccgttttaaggattcttccaagctgaaagagaaaagtacttctgcctcagcatctcggagaatgtctaaaatttggaaaaacaaaaaatgatgaattaaaaaaggaacaaa

SEQ ID NO: 297010 - DNA, 1719 bp, Homo sapiens
ctaatagaaaagtgaaaccacaaacctgccaatagcagaatctttagagaaatgacgcgaaactcctgccttaaagccctaaatggcggcttcaatatcagccccactgagcatgaaattcatttacttaaataaaatctgaatctcagcccaaacctgggagattcaaaacctgagagcggtcttaccaaagacgcccgtatgtctggtgaagtcagttggatgcaagcagtttgtgctggtaccagggccccagctactgatgaagtggcaggagtccacagaagcctacttcgaagttcccggggcttccaggggagtctgatcccccaggaaagcagctggaaaacaagagcatgtgaaggaagcgcagcagctcctcgccagccagacagccagccccgcaccgcaggagtcgacatgcacggcagcctagacgccatcagttaaacttatatgtaggcttgttgaggaaaacgactttcaaacacaaggcaaaagaaaaacatgaaaccaagggttccaacattcatcatccagtttcagagacacccttgaaggaatgctacagcctctttcttacccattcaaaccagtcgctctgctgcatacccacatcacaggaggccctcagccccgacacacaggctcactcagcccggggacatcagcacctgtgccagctccgcaaggtatccaccatgcggccagaactgaggcccagcaatagctgaaatgtcctttaaattaacatgtacaacacacaacccccaagagctgacatccccaaagccccaccacaaatagctgactcctacttatacctgcaggagcaggtactgacctctgcaattctaaaccgtccactttgggcaaaattcatcaagctatggatatgaaaaaaggccccaaggatatgattcatagtccagcgtttgagtgagcactccagtcagaacgaactctgcattgtgaacatctgaacagggtggaaacagacactttagttagagatccactgctgtgcgtgcacacatactcacacaggaaaagaaaatgagtttctcagtgaccgaacgctgaatgtgatacagggcaatgacggactcgctggcggactccactctacccaccgagttctgcttgtgctccatgagcttccggaaagatggctgcttggataacacctttcctcctgcacactctacgattgccttcatagtggaaagacttgggcagattccagaagaaaagttctctagagatgtgctgtggttcacaggaggaagacctccagtggcaatgtccaagaaggaagccaagagtgtaccttaaagagtggagaaacgtgtgcccgttttaaggattcttccaagctgaaagagaaaagtacttctgcctcagcatctcggagaatgtagttctgctcatctggaaaacagaacagcacatactctgaaaagtgtggacacgtgaagtgtggcaagtgtgacccacaaaattctcgcccatattcagcgtatggaccagtttgctgactgctgggcaggagcaaccacatcatgacagaaatgcagggatctgttcaccaacggccagaaatacaaaatcaatccctgagtcaaccagcagatagaaaggctgctttttaggtgaaaggagaaaaagaatgtctaaaatttggaaaaacaaaaaatgatgaattaaaaaaggaacaaa

SEQ ID NO: 297011 - DNA, 1413 bp, Homo sapiens
gcctcagcacctggaaccaggtggtgctgctacagggtcctccaggaactggaaaaacattcctatgtaaagcattagcccacaaattgactattaaactttcaagcaggtattggtatggccaattaattgaaataaatagccctaacctcttttctaaacggttttccgaaattgacaagctgataactaagacgttccagaagattcaggatttgattgattataaagatgctctggcattttcactgattgatgagatagaaagtctcacagccacccataatgaaagccatcgggtgccattggcatggtcaacgctgtcttgacccaaattaatcagattaaaaggcattttaatgtagtgattccagctacttccaacatcaccgtgaagattgacatggcctttgtggacaggtctgatatcaagcagtatatcagtctgcgctctgcagcagccatcttcaaaatttacgttttctgtttggaagaactggtcaagtgccaggtcatataccctcctcagcagctattaaccctccaaaagctggagatgattggcttcattgaaaacaatgtgtcaaaattgagcttccttttgagtgacatttcaaagaagatcgagggcctccatggccagttcctgaggaaactcctttttctggtgcatacactgtgtgtccaggctacaccaggctttctctctggtcgtggacaagcaggttgaagagaaaaaagaagctttcagcttacatttgtcctgggctcaagcagtctacccatctcggcctcccaaagtgctgggattacaggtgtgagccaccacacccagccagaaatgatttttgactacacctaatattcactttatacaataaacttagaacttaatctctatataagctatttattttaaaattcagaaaagcaaaaaaatatttaaatcattcataaactaaaactacccagagataaacactgtcagtaatatattcaatcttttgtatatctatgttatttacatgtagtgggttgagtagtgtcattcagaaactgatgtcaacctaaaacctcagaatgtggccttattttggaaatcgggtcttggcaaatgtaattagttgtagtcatgccggattagggtgggccctaaatccaatgactagtgtccttagaagaagagcagaagatactcagaaacactgggaaggctgttttgtgataaaggagaccggagggatgttcctacaactagggaacaccaaggattgccagcaaccaccagaagctaggagagaagtaacaagcattctccttcatagcttccggaaagaaccaaccttgccaacaccttgatttggggtttctaacctgaactgtaagagaataaatttccattgttttaagtca

SEQ ID NO: 297012 - DNA, 385 bp, Homo sapiens
cttcattgaaaacaatgtgtcaaaattgagcttccttttgagtgacatttcaaagaagatcgagggcctccatggccagttcctgaggaaactcctttttctggtgcatacactgtgtgtccaggctacaccaggctttctctctggtcgtggacaagcaggttgaagagaaaaaagaagctttcagcttacatttggtcctgggcttcccattccatagctttctagtggagagcacacaaatagtaagtaacatcacttgcctcacaacagccaccactctggaaatcctctctataaaaatttgcttaggtctgtctacaagccagaaacctacaacaccaacctttgttacaagtgttacatttactttagcttaaaatgc

SEQ ID NO: 297013 - DNA, 726 bp, Homo sapiens
tgcagtggcaccatgccggctcactgcaacctctgtcttctgggttcaagtgattctcctgcctcagcctcccaagtagttgggattacaggcatgcatccccatgcccagctaatttttgtatttttaggagaaacagggtttcaccatgttggccaggctgctcttgaactcctgacctcaggtgatccgcctgcctcggcctcctgaagtgttgggattacaggcgtgagccactgcgcccggccaattttaacttttcataatagatttgtatatatttatggtagtaaatgataaaatagactagtgtctacatatattatatgaattcatgacacacctttttcttagtttttcagtatttctaagctacatggtgcatctgcaagttttttaaattgttgcaaatttccaaaaaaattttcaatatatttatcaaaatatgcatataagcggtcctatgcagttcaaacccgtgtttgagaatcaactttatgacttccagtgtcattctccaccatttctgcagtttatcacattttgcttcaggcagatttggtaaatcttcaatgatagttctctaggccattgttttgtaacatgatcaaatgcttaatgggaaatagaatatgtatatgtattctttgtctaccaactaccaaagaaacaaatactcctcagtttgacttgacttagtaaataaacttgtgttgggttaatgga

SEQ ID NO: 297014 - DNA, 746 bp, Homo sapiens
tgcagtggcaccatgccggctcactgcaacctctgtcttctgggttcaagtgattctcctgcctcagcctcccaagtagttgggattacaggcatgcatccccatgcccagctaatttttgtatttttaggagaaacagggtttcaccatgttggccaggctgctcttgaactcctgacctcaggtgatccgcctgcctcggcctcctgaagtgttgggattacaggcgtgagccactgcgcccggccaattttaacttttcataatagatttgtatatatttatggtagtaaatgataaaatagactagtgtctacatatattatatgaattcatgacacacctttttcttagtttttcagtatttctaagctacatggtgcatctgcaagttttttaaattgttgcaaatttccaaaaaaattttcaatatatttatcaaaatatgcatataagcggtcctatgcagttcaaacccgtgtttgagaatcaactttatgacttccagtgtcattctccaccatttctgcagtttatcacattttgcttcaggcagatttggtaaatcttcaatgatagttctctaggccattgttttgtaacatgatcaaatgcttaatgggaaatagaatatgtatatgtattctttgtctaccaactaccaaagaaacaaatactcctcagtttaacccaacacaagtttatttactaagtcaagtcaaactgaggagtatttgttgtcgacg

SEQ ID NO: 297015 - DNA, 809 bp, Homo sapiens
tcagattatcagtgctatggagaaagttaactgttacagtacattgcagagatgggttctgtaggcagtgtgtcacacaatgtttaatgtcatatagctttcatgatgttggatattatctccccctttttttttcttttcctttttttttttttttagacaggctctggctctgtcaaccaggctggagtgcagtggtgcaacctcagcttactacaaactctgcctctctggctcaaggtatccacttcagactccctagtagctgggactgcaggcacacaccaccacacctggttaatttttttccatattttgtagagacagggtctcactttgttgtccaggctggtcttgaattcctgagctcaagcaatctgcccaccttggcttcccaaagtgctggaattacaggtgtgagccactgtgcttggctcccaattttttttctaattaaccccacatctgctgaattaaaggagagtgttaaatacaaaaatgaatttattatgcaaatctgcagttatcgtgtatgttcttttggacttgtaataagggagtatgttctagtattgaagaaatagaaccagagaggaatactgctgtaaaaattaaaaaaaaaaaattcaaaatagggtagcttccagcgaccatgcatgccaacagttagcatgccagcctgttggacctgacaaagtggtccctggctgctgtccatagtgcactattggcaggtctgtttttgttgaaactttgggtcaccatgtgtcagcctatgtatattgtcttctgtcattttttttttcgta

SEQ ID NO: 297016 - DNA, 1520 bp, Homo sapiens
ccctcgtgactcgattatttatttatttatttatttatttattttgagacagggtctcactctgccacccaggctggaatggctcattgcagcctcgacctccagggctgaagcgatcctcccacctcagcctcccaaggaactgggactacaggcacgcaccaccacgcccggctaatttttgtattcttttgtagagacagggtttcgccgtgttgcccagggtggtctcgaactcctgggctcgaagcaattcgtccacctcggcctcacaaagtgctgggattacaggcgtgagtcaccgcgcccggccctgacttgatttttttctgccaccaaatcactgtgttattgataaaccacattcctctctggacctcagttcgaccgagcaaatcctgctccagcactctagaacttagctgtatctaactcccgagtcaatccaaatgtgttctttcctcttggcagcgttcctgcctcctggcatggcaatcctcttccctgagactggcagttgctcaagataggaagctcccgggaccagacccgagcgccagccggctacgccgtccgctggcctgagcaaataaacgcgtgtcttcaaaaaactacaatccccatggtggcacgcgcctgtagtcccagctactctggtggctgaggcaggagaatggcgtaaacccgggaggcggagcttacagtgagccgagatcgcgccactgcactccagcctgggcgacagagcgctcaaaaaaaaaacaaaaaacaaaaaacaaaaaactacaacccccatgaagctttagtgcctttgaggggaggagtggcgcatgtttgttcacgcacgaaaaagaaattaaacctaactaccgttcccccagggcgccgctctgcaaattacccaatcagctctaagtacaaagcatcgcgagtctttagtgctctttggcgctataagcccgtgggaacgagcattggagacccttttcacaagatggcgccgaaagcgaagaaggaagctcctgcccctcctaaagctgaagccaaagcgaaggctttaaaggccaagaaggcagtgttgaaaggtgtccacagccacaaaaagaagaagatccgcacgtcacccaccttccggcggccgaagacactgcgactccggagacagcccaaatatcctcggaagagcgctcccaggagaaacaagcttgaccactatgctatcatcaagtttccgctgaccactgagtctgccatgaagaagatagaagacaacaacacacttgtgttcattgtggatgttaaagccaacaagcaccagattaaacaggctgtgaagaagctgtatgacattgatgtggccaaggtcaacaccctgattcggcctgatggagagaagaaggcatatgttcgactggctcctgattacgatgctttggatgttgccaacaaaattgggatcatctaaactgagtccagctgcctaattctgaatatatatatatatatatcttttcaccata

SEQ ID NO: 297017 - DNA, 592 bp, Homo sapiens
  misc_feature (3)..(3): n is a, c, g, or t
  misc_feature (55)..(55): n is a, c, g, or t
cgntcgagcttgataccgaattcccgccgcttcgacacggtgcgagagacgacanagggcccacagatggcgccgaaagcgaagaaggaagctcctgcccctcctaaagctgaagccaaagcgaaggctttaaaggccaagaaggcagtgttgaaaggtgtccacagccacaaaaagaagaagatccgcacgtcacccaccttccggcggccgaagacactgcgactccggagacagcccaaatatcctcggaagagcgctcccaggagaaacaagcttgaccactatgctatcatcaagtttccgctgaccactgagtctgccatgaagaagatagaagacaacaacacacttgtgttcattgtggatgttaaagccaacaagcaccagattaaacaggctgtgaagaagctgtatgacattgatgtggccaaggtcaacaccctgattcggcctgatggagagaagaaggcatatgttcgactggctcctgattacgatgctttggatgttgccaacaaaattgggatcatctaaactgagtccagctgcctaattctgaatatatatatatatatatcttttcaccata

SEQ ID NO: 297018 - DNA, 559 bp, Homo sapiens
acaacccatcaggcagtacgaggctgggtgtagatggcgccgaaagcgaagaaggaagctcctgcccctcctaaagctgaagccaaagcgaaggctttaaaggccaagaaggcagtgttgaaaggtgtccacagccacaaaaagaagaagatccgcacgtcacccaccttccggcggccgaagacactgcgactccggagacagcccaaatatcctcggaagagcgctcccaggagaaacaagcttgaccactatgctatcatcaagtttccgctgaccactgagtctgccatgaagaagatagaagacaacaacacacttgtgttcattgtggatgttaaagccaacaagcaccagattaaacaggctgtgaagaagctgtatgacattgatgtggccaaggtcaacaccctgattcggcctgatggagagaagaaggcatatgttcgactggctcctgattacgatgctttggatgttgccaacaaaattgggatcatctaaactgagtccagctgcctaattctgaatatatatatatatatatcttttcaccata

SEQ ID NO: 297019 - DNA, 802 bp, Homo sapiens
  misc_feature (11)..(11): n is a, c, g, or t
  misc_feature (14)..(14): n is a, c, g, or t
  misc_feature (16)..(16): n is a, c, g, or t
  misc_feature (36)..(36): n is a, c, g, or t
  misc_feature (614)..(614): n is a, c, g, or t
  misc_feature (620)..(620): n is a, c, g, or t
atcgacccccnttngnatcggtacgcgctccattgngttaggacttcggaattcggccattatggccggggccttttcacaagatggcgccgaaagcgaagaaggaagctcctgcccctcctaaagctgaagccaaagcgaaggctttaaaggccaagaaggcagtgttgaaaggtgtccacagccacaaaaagaagaagatccgcacgtcacccaccttccggcggccgaagacactgcgactccggagacagcccaaatatcctcggaagagcgctcccaggagaaacaagcttgaccactatgctatcatcaagtttccgctgaccactgagtctgccatgaagaagatagaagacaacaacacacttgtgttcattgtggatgttaaagccaacaagcaccagattaaacaggctgtgaagaagctgtatgacattgatgtggccaaggtcaacaccctgattcggcctgatggagagaagaaggcatatgttcgactggctcctgattacgatgctttggatgttgccaacaaaattgggatcatctaaactgagtccagctgcctaattctgaatatatatatatatatatcttttcaccataatatntttttnaccgtataaaaaaagacccttatcaaaaaaaaactatgtcgcccggctttggccaagtcgacttttggatttgagcaagctttaatcatggcggccgaattttgaggttaattgggccaaatttgccctaaagggagccgatttacaattcaattgcccgtggtttaaccgttggctgggct

SEQ ID NO: 297020 - DNA, 530 bp, Homo sapiens
  misc_feature (15)..(15): n is a, c, g, or t
  misc_feature (510)..(510): n is a, c, g, or t
atttcggaacgagcngcgaagaaggaagctcctgcccctcctaaagctgaagccaaagcgaaggctttaaaggccaagaaggcagtgttgaaaggtgtccacagccacaaaaagaagaagatccgcacgtcacccaccttccggcggccgaagacactgcgactccggagacagcccaaatatcctcggaagagcgctcccaggagaaacaagcttgaccactatgctatcatcaagtttccgctgaccactgagtctgccatgaagaagatagaagacaacaacacacttgtgttcattgtggatgttaaagccaacaagcaccagattaaacaggctgtgaagaagctgtatgacattgatgtggccaaggtcaacaccctgattcggcctgatggagagaagaaggcatatgttcgactggctcctgattacgatgctttggagtgccaactaacatcggtcatctaactgagtgccactttcaactcccggtgggtgaatatatangtatatataatctttcccca

SEQ ID NO: 297021 - DNA, 355 bp, Homo sapiens
  misc_feature (320)..(320): n is a, c, g, or t
gcggccgcctactactactaaattcgcggccaaaagaagaagatccgcacgtcacccaccttccggcggccgaagacactgcgactccggagacagcccaaatatcctcggaagagcgctcccaggagaaacaagcttgaccactatgctatcatcaagtttccgctgaccactgagtctgccatgaagaagatagaagacaacaacacacttgtgttcattgtggatgttaaagccaacaagcaccagattaaacaggctgtgaagaagctgtatgacattgatgtggccaaggtcaacaccctgattcggcctgatgnagagggagcagcagaggatcctctagatcacccag

SEQ ID NO: 297022 - DNA, 410 bp, Homo sapiens
tgggtccctacttctattgggaaaggcaactagagggcgacacgtggcaaattaccttggtttaagtcttaatgtggcctgtggtgtttcccataaaaaaattggctttgtggcttcatggtgtcctctgggctaatgatggaaaaatcattattggaaaagaatgacatgaacaaaggaaccactgaagtgccggaggactggaggaggaagggggagggtgtgggggcagtgagggtggcagggactaaggcttccttctctaccctagcctgatggagagaagaaggcatatgttcgactggctcctgattacgatgctttggatgttgccaacaaaattgggatcatctaaactgagtccagctgcctaattctgaatatatatatatatatatcttttcaccata

SEQ ID NO: 297023 - DNA, 572 bp, Homo sapiens
  misc_feature (186)..(186): n is a, c, g, or t
gcctggtgatagctggttgtccaagatagaatcttagttcaactttaaatttgcccacagaacccctctaaatccccttgtaaatttacctgttagtccaaagaggaacagctctttggacactaggaaaaaaccttgtagagagagtaaaaaatctaacacccatagtaggcctaaaagcagccnccaattaagaaagcgtccaaggtcaacaccctgattcggcctgatggagagaagaaggcatatgttcgactggctcctgattacgatgctttggatgttgccaacaaaattgggatcatctaaactgagtccagctgcctaattctgaatatatatatatatatatcttttcaccataatcttttcaccataaaaaaaaaaaaaaaaaaaaaacgggggggtcaagggcggggggcgggaaaaagggggtaaggacaggggccagggggcaaagcgggtgcccggaccaagtttccgggtgcaagcgggggacaatgggcgggccccctataggggaggggaaataattccgaaagccggggtaccggatagatacgggcagaaac

SEQ ID NO: 297024 - DNA, 2196 bp, Homo sapiens
ccctcgtgactcgattatttatttatttatttatttatttattttgagacagggtctcactctgccacccaggctggaatggctcattgcagcctcgacctccagggctgaagcgatcctcccacctcagcctcccaaggaactgggactacaggcacgcaccaccacgcccggctaatttttgtattcttttgtagagacagggtttcgccgtgttgcccagggtggtctcgaactcctgggctcgaagcaattcgtccacctcggcctcacaaagtgctgggattacaggcgtgagtcaccgcgcccggccctgacttgatttttttctgccaccaaatcactgtgttattgataaaccacattcctctctggacctcagttcgaccgagcaaatcctgctccagcactctagaacttagctgtatctaactcccgagtcaatccaaatgtgttctttcctcttggcagcgttcctgcctcctggcatggcaatcctcttccctgagactggcagttgctcaagataggaagctcccgggaccagacccgagcgccagccggctacgccgtccgctggcctgagcaaataaacgcgtgtcttcaaaaaactacaatccccatggtggcacgcgcctgtagtcccagctactctggtggctgaggcaggagaatggcgtaaacccgggaggcggagcttacagtgagccgagatcgcgccactgcactccagcctgggcgacagagcgctcaaaaaaaaaacaaaaaacaaaaaacaaaaaactacaacccccatgaagctttagtgcctttgaggggaggagtggcgcatgtttgttcacgcacgaaaaagaaattaaacctaactaccgttcccccagggcgccgctctgcaaattacccaatcagctctaagtacaaagcatcgcgagtctttagtgctctttggcgctataagcccgtgggaacgagcattggagacccttttcacaagatggcgccgaaagcgaagaaggaaggtgtgtgttggtgatggggccgcagctggtttaccggggattgccgcgccgcagagcgaacgaattgggaacacggctgctgggctaagccctgagggctctgctccggggctgctccctgcgtttcggacacgctgcagtatacgtgggccgcgtgggcccagcctcgtgggctgagttccggtagagggagttgggggggggcaacgcggcaggcatcatccgccagggagggccagacattcggttctgggaagctacatgcatccactggttggagctccatgtccccgggcctgtaaggaattagtgccctcagctttaaccattttccttctggttcatgttcaaccgggctacattacccgcccctctctccgcagcgtggttttgcgatggggtatgtgtaaaattcgtaggacattttctggaaagtatcaagcgttcattcagtgctactttgtttcatagtcgtatccctggagttacttagagttggtcgctttcgcctctggtatcgtgcatatgatggaaaagttttaatctcctgacacttgtgatgtcttcaaaggaaccactgatgcacctgtggccagggtggcccactgcagttcttggggccggaagtgaccgatttctaaatcccgcacccacgttttctttccttttctcccagctcctgcccctcctaaagctgaagccaaagcgaaggctttaaaggccaagaaggcagtgttgaaaggtgtccacagccacaaaaagaagaagatccgcacgtcacccaccttccggcggccgaagacactgcgactccggagacagcccaaatatcctcggaagagcgctcccaggagaaacaagcttgaccactatgctatcatcaagtttccgctgaccactgagtctgccatgaagaagatagaagacaacaacacacttgtgttcattgtggatgttaaagccaacaagcaccagattaaacaggctgtgaagaagctgtatgacattgatgtggccaaggtcaacaccctgattcggcctgatggagagaagaaggcatatgttcgactggctcctgattacgatgctttggatgttgccaacaaaattgggatcatctaaactgagtccagctgcctaattctgaatatatatatatatatatcttttcaccata

SEQ ID NO: 297025 - DNA, 533 bp, Homo sapiens
aaaggctaggtacgaggcggggggagaaggagctcctgcccctcctaaagctgaagccaaagcgaaggctttaaaggccaagaaggcagtgttgaaaggtgtccacagccacaaaaagaagaagatccgcacgtcacccaccttccggcggccgaagacactgcgactccggagacagcccaaatatcctcggaagagcgctcccaggagaaacaagcttgaccactatgctatcatcaagtttccgctgaccactgagtctgccatgaagaagatagaagacaacaacacacttgtgttcattgtggatgttaaagccaacaagcaccagattaaacaggctgtgaagaagctgtatgacattgatgtggccaaggtcaacaccctgattcggcctgatggagagaagaaggcatatgttcgactggctcctgattacgatgctttggatgttgccaacaaaattgggatcatctaaactgagtccagctgcctaattctgaatatatatatatatatatcttttcaccata

SEQ ID NO: 297026 - DNA, 2438 bp, Homo sapiens
  misc_feature (2438)..(2438): n is a, c, g, or t
ccctcgtgactcgattatttatttatttatttatttatttattttgagacagggtctcactctgccacccaggctggaatggctcattgcagcctcgacctccagggctgaagcgatcctcccacctcagcctcccaaggaactgggactacaggcacgcaccaccacgcccggctaatttttgtattcttttgtagagacagggtttcgccgtgttgcccagggtggtctcgaactcctgggctcgaagcaattcgtccacctcggcctcacaaagtgctgggattacaggcgtgagtcaccgcgcccggccctgacttgatttttttctgccaccaaatcactgtgttattgataaaccacattcctctctggacctcagttcgaccgagcaaatcctgctccagcactctagaacttagctgtatctaactcccgagtcaatccaaatgtgttctttcctcttggcagcgttcctgcctcctggcatggcaatcctcttccctgagactggcagttgctcaagataggaagctcccgggaccagacccgagcgccagccggctacgccgtccgctggcctgagcaaataaacgcgtgtcttcaaaaaactacaatccccatggtggcacgcgcctgtagtcccagctactctggtggctgaggcaggagaatggcgtaaacccgggaggcggagcttacagtgagccgagatcgcgccactgcactccagcctgggcgacagagcgctcaaaaaaaaaacaaaaaacaaaaaacaaaaaactacaacccccatgaagctttagtgcctttgaggggaggagtggcgcatgtttgttcacgcacgaaaaagaaattaaacctaactaccgttcccccagggcgccgctctgcaaattacccaatcagctctaagtacaaagcatcgcgagtctttagtgctctttggcgctataagcccgtgggaacgagcattggagacccttttcacaagatggcgccgaaagcgaagaaggaagctcctgcccctcctaaagctgaagccaaagcgaaggctttaaaggccaagaaggcagtgttgaaaggtgtccacagccacaaaaagaagaagatccgcacgtcacccaccttccggcggccgaagacactgcgactccggagacagcccaaatatcctcggaagagcgctcccaggagaaacaagcttgaccactatgctatcatcaagtttccgctgaccactgagtctgccatgaagaagatagaagacaacaacacacttgtgttcattgtggatgttaaagccaacaagcaccagattaaacaggctgtgaagaagctgtatgacattgatgtggccaaggtcaacaccctgattcggcctgatggagagaagaaggcatatgttcgactggctcctgattacgatgctttggatgttgccaacaaaattgggatcatctaaactgagtccagctgcctaattctgaatatatatatatatatatcttttcaccatatacatgcctgtctgtcaatttctggttgggctgggaggccacacacacacactgacatgacagggcttgggcaagactcctgttctacttatccttttgaaatacctcaccctgccactccaccatgtatgatcattccagagatctttgtgactagagttagtgtcctaggaaaaccagaactcagaacttgcctccatggttgagtaacaagctgtacaagaaccccttttatccctggaagaggctgtgtatgaaaccaatgcccagggtttgaagggtgttagcatccatttcaggggagtgtggattggctggctctctggtagcattttgtcctcacacacccatctactatgtccaaccggtctgtctgcttccctcaccccttgcccaataaaggacaaggactttcagagcaaaaaaaaaaacaacaaaaaacaaaacaaacaaaagagaaaaacaacacaaaaaaaaacaaaaaaacaaaaaacaaacacacttgtgtgtgcggcgcgcgcctgcgcgcgccctccggaagaaaccttctttaaacacaccccgcggggtgggcgcccggcgggcccccattggtggatagagaagaaaccgcgtgtggaccaacgggtggtctcacggagaaaaaaatcccggaggacaaaacgaaaatcgggcggagaggcgagcttctcccccacgaaatatataaaaaaacccccgcgcggcggggagaaccacacagcgagcttgttctactgaacgacaacactcccaacaaagggagggggatctcagagagaggaggctaacgaaagagagggggcatcaatccaaaccaggcggggaggacaaccaaagagagagcggcaattgattataataaaatttccggcccggcggctggtcgcggggggggan

SEQ ID NO: 297027 - DNA, 1647 bp, Homo sapiens
  misc_feature (1553)..(1553): n is a, c, g, or t
  misc_feature (1556)..(1556): n is a, c, g, or t
ccctcgtgactcgattatttatttatttatttatttatttattttgagacagggtctcactctgccacccaggctggaatggctcattgcagcctcgacctccagggctgaagcgatcctcccacctcagcctcccaaggaactgggactacaggcacgcaccaccacgcccggctaatttttgtattcttttgtagagacagggtttcgccgtgttgcccagggtggtctcgaactcctgggctcgaagcaattcgtccacctcggcctcacaaagtgctgggattacaggcgtgagtcaccgcgcccggccctgacttgatttttttctgccaccaaatcactgtgttattgataaaccacattcctctctggacctcagttcgaccgagcaaatcctgctccagcactctagaacttagctgtatctaactcccgagtcaatccaaatgtgttctttcctcttggcagcgttcctgcctcctggcatggcaatcctcttccctgagactggcagttgctcaagataggaagctcccgggaccagacccgagcgccagccggctacgccgtccgctggcctgagcaaataaacgcgtgtcttcaaaaaactacaatccccatggtggcacgcgcctgtagtcccagctactctggtggctgaggcaggagaatggcgtaaacccgggaggcggagcttacagtgagccgagatcgcgccactgcactccagcctgggcgacagagcgctcaaaaaaaaaacaaaaaacaaaaaacaaaaaactacaacccccatgaagctttagtgcctttgaggggaggagtggcgcatgtttgttcacgcacgaaaaagaaattaaacctaactaccgttcccccagggcgccgctctgcaaattacccaatcagctctaagtacaaagcatcgcgagtctttagtgctctttggcgctataagcccgtgggaacgagcattggagacccttttcacaagatggcgccgaaagcgaagaaggaagctcctgcccctcctaaagctgaagccaaagcgaaggctttaaaggccaagaaggcagtgttgaaaggtgtccacagccacaaaaagaagaagatccgcacgtcacccaccttccggcggccgaagacactgcgactccggagacagcccaaatatcctcggaagagcgctcccaggagaaacaagcttgaccactatgctatcatcaagtttccgctgaccactgagtctgccatgaagaagatagaagacaacaacacacttgtgttcattgtggatgttaaagccaacaagcaccagattaaacaggctgtgaagaagctgtatgacattgatgtggccaaggtcaacaccctgattcggcctgatggagagaagaaggcatatgttcgactggctcctgattacgatgctttggatgttgccaacaaaattgggatcatctaaactgagtccagctgcctaattctgaatatatatatatatatatcttttcaccataaaaaaaaaaaaaacaaaacagaagaacaaaagncgngatgcgaacaaagcggctaagaaagggaccaggggcataacgtactacagaacccagcttcagaacacgagagaaaccgccgatccccaat

SEQ ID NO: 297028 - DNA, 1944 bp, Homo sapiens
ccctcgtgactcgattatttatttatttatttatttatttattttgagacagggtctcactctgccacccaggctggaatggctcattgcagcctcgacctccagggctgaagcgatcctcccacctcagcctcccaaggaactgggactacaggcacgcaccaccacgcccggctaatttttgtattcttttgtagagacagggtttcgccgtgttgcccagggtggtctcgaactcctgggctcgaagcaattcgtccacctcggcctcacaaagtgctgggattacaggcgtgagtcaccgcgcccggccctgacttgatttttttctgccaccaaatcactgtgttattgataaaccacattcctctctggacctcagttcgaccgagcaaatcctgctccagcactctagaacttagctgtatctaactcccgagtcaatccaaatgtgttctttcctcttggcagcgttcctgcctcctggcatggcaatcctcttccctgagactggcagttgctcaagataggaagctcccgggaccagacccgagcgccagccggctacgccgtccgctggcctgagcaaataaacgcgtgtcttcaaaaaactacaatccccatggtggcacgcgcctgtagtcccagctactctggtggctgaggcaggagaatggcgtaaacccgggaggcggagcttacagtgagccgagatcgcgccactgcactccagcctgggcgacagagcgctcaaaaaaaaaacaaaaaacaaaaaacaaaaaactacaacccccatgaagctttagtgcctttgaggggaggagtggcgcatgtttgttcacgcacgaaaaagaaattaaacctaactaccgttcccccagggcgccgctctgcaaattacccaatcagctctaagtacaaagcatcgcgagtctttagtgctctttggcgctataagcccgtgggaacgagcattggagacccttttcacaagatggcgccgaaagcgaagaaggaagctcctgcccctcctaaagctgaagccaaagcgaaggctttaaaggccaagaaggcagtgttgaaaggtgtccacagccacaaaaagaagaagatccgcacgtcacccaccttccggcggccgaagacactgcgactccggagacagcccaaatatcctcggaagagcgctcccaggagaaacaagcttgaccactatgctatcatcaagtttccgctgaccactgagtctgccatgaagaagatagaagacaacaacacacttgtgttcattgtggatgttaaagccaacaagcaccagattaaacaggctgtgaagaagctgtatgacattgatgtggccaaggtcaacaccctgattcggcctgatggagagaagaaggcatatgttcgactggctcctgattacgatgctttggatgttgccaacaaaattgggatcatctaaactgagtccagctgcctaattctgaatatatatatatatatatcttttcaccatatacatgcctgtctgtcaatttctggttgggctgggaggccacacacacacactgacatgacagggcttgggcaagactcctgttctacttatccttttgaaatacctcaccctgccactccaccatgtatgatcattccagagcctaggaaaaccagaactcagaacttgcctccatggttgagtaacaagctgtacaagaaccccttttatccctggaagaggctgtgtatgaaaccaatgcccagggtttgaagggtgttagcatccatttcaggggagtgtggattggctggctctctggtagcattttgtcctcacacacccatctactatgtccaaccggtctgtctgcttccctcaccccttgcccaataaaggacaaggacttcagaggaaaaaaaggggggcgacaccaagagccg

SEQ ID NO: 297029 - DNA, 1730 bp, Homo sapiens
ccctcgtgactcgattatttatttatttatttatttatttattttgagacagggtctcactctgccacccaggctggaatggctcattgcagcctcgacctccagggctgaagcgatcctcccacctcagcctcccaaggaactgggactacaggcacgcaccaccacgcccggctaatttttgtattcttttgtagagacagggtttcgccgtgttgcccagggtggtctcgaactcctgggctcgaagcaattcgtccacctcggcctcacaaagtgctgggattacaggcgtgagtcaccgcgcccggccctgacttgatttttttctgccaccaaatcactgtgttattgataaaccacattcctctctggacctcagttcgaccgagcaaatcctgctccagcactctagaacttagctgtatctaactcccgagtcaatccaaatgtgttctttcctcttggcagcgttcctgcctcctggcatggcaatcctcttccctgagactggcagttgctcaagataggaagctcccgggaccagacccgagcgccagccggctacgccgtccgctggcctgagcaaataaacgcgtgtcttcaaaaaactacaatccccatggtggcacgcgcctgtagtcccagctactctggtggctgaggcaggagaatggcgtaaacccgggaggcggagcttacagtgagccgagatcgcgccactgcactccagcctgggcgacagagcgctcaaaaaaaaaacaaaaaacaaaaaacaaaaaactacaacccccatgaagctttagtgcctttgaggggaggagtggcgcatgtttgttcacgcacgaaaaagaaattaaacctaactaccgttcccccagggcgccgctctgcaaattacccaatcagctctaagtacaaagcatcgcgagtctttagtgctctttggcgctataagcccgtgggaacgagcattggagacccttttcacaagatggcgccgaaagcgaagaaggaagctcctgcccctcctaaagctgaagccaaagcgaaggctttaaaggccaagaaggcagtgttgaaaggtgtccacagccacaaaaagaagaagatccgcacgtcacccaccttccggcggccgaagacactgcgactccggagacagcccaaatatcctcggaagagcgctcccaggagaaacaagcttgaccactatgctatcatcaagtttccgctgaccactgagtctgccatgaagaagatagaagacaacaacacacttgtgttcattgtggatgttaaagccaacaagcaccagattaaacaggctgtgaagaagctgtatgacattgatgtggccaaggtcaacaccctgattcggcctgatggagagaagaaggcatatgttcgactggctcctgattacgatgctttggatgttgccaacaaaattgggatcatctaaactgagtccagctgcctaattctgaatatatatatatatatatcttttcaccataaaaaaaaaaaaaaaaaaaaaaaaaaaaaaaaaaaaaaaaaaaaaaaaaaaaagtcgcggggtttttttggggggggggaaaaaaggggtgtagaaaaaggggaggtggtagatgagttgttccgcgaacacccgtttttttgaaacagggggggaatcggggggccccaagaaggaggggaaaaaattgaaaaacgggtaccgtattagg

SEQ ID NO: 297030 - DNA, 1801 bp, Homo sapiens
ccctcgtgactcgattatttatttatttatttatttatttattttgagacagggtctcactctgccacccaggctggaatggctcattgcagcctcgacctccagggctgaagcgatcctcccacctcagcctcccaaggaactgggactacaggcacgcaccaccacgcccggctaatttttgtattcttttgtagagacagggtttcgccgtgttgcccagggtggtctcgaactcctgggctcgaagcaattcgtccacctcggcctcacaaagtgctgggattacaggcgtgagtcaccgcgcccggccctgacttgatttttttctgccaccaaatcactgtgttattgataaaccacattcctctctggacctcagttcgaccgagcaaatcctgctccagcactctagaacttagctgtatctaactcccgagtcaatccaaatgtgttctttcctcttggcagcgttcctgcctcctggcatggcaatcctcttccctgagactggcagttgctcaagataggaagctcccgggaccagacccgagcgccagccggctacgccgtccgctggcctgagcaaataaacgcgtgtcttcaaaaaactacaatccccatggtggcacgcgcctgtagtcccagctactctggtggctgaggcaggagaatggcgtaaacccgggaggcggagcttacagtgagccgagatcgcgccactgcactccagcctgggcgacagagcgctcaaaaaaaaaacaaaaaacaaaaaacaaaaaactacaacccccatgaagctttagtgcctttgaggggaggagtggcgcatgtttgttcacgcacgaaaaagaaattaaacctaactaccgttcccccagggcgccgctctgcaaattacccaatcagctctaagtacaaagcatcgcgagtctttagtgctctttggcgctataagcccgtgggaacgagcattggagacccttttcacaagatggcgccgaaagcgaagaaggaagctcctgcccctcctaaagctgaagccaaagcgaaggctttaaaggccaagaaggcagtgttgaaaggtgtccacagccacaaaaagaagaagatccgcacgtcacccaccttccggcggccgaagacactgcgactccggagacagcccaaatatcctcggaagagcgctcccaggagaaacaagcttgaccactatgctatcatcaagtttccgctgaccactgagtctgccatgaagaagatagaagacaacaacacacttgtgttcattgtggatgttaaagccaacaagcaccagattaaacaggctgtgaagaagctgtatgacattgatgtggccaaggtcaacaccctgattcggcctgatggagagaagaaggcatatgttcgactggctcctgattacgatgctttggatgttgccaacaaaattgggatcatctaaactgagtccagctgcctaattctgaatatatatatatatatatcttttcaccataaaaaaaaaaaaaaaaaaaaaaaaaaaaaaaaaaaaaaaaaaataatcgagagagactatattatggaggggggggagaaaaaagagaggatagtagaaggaagagggacgtgagtgggactataactgtgtggttgatcgttgagaaccaatagattttcttgttgataaaaggggggaaataatgggcggggggcctcctcttataatgagagggggagaataatagtgtgaaaaagcccgggagtacccgggttttaattagttttctggagcaaaaaa

SEQ ID NO: 297031 - DNA, 1644 bp, Homo sapiens
ccctcgtgactcgattatttatttatttatttatttatttattttgagacagggtctcactctgccacccaggctggaatggctcattgcagcctcgacctccagggctgaagcgatcctcccacctcagcctcccaaggaactgggactacaggcacgcaccaccacgcccggctaatttttgtattcttttgtagagacagggtttcgccgtgttgcccagggtggtctcgaactcctgggctcgaagcaattcgtccacctcggcctcacaaagtgctgggattacaggcgtgagtcaccgcgcccggccctgacttgatttttttctgccaccaaatcactgtgttattgataaaccacattcctctctggacctcagttcgaccgagcaaatcctgctccagcactctagaacttagctgtatctaactcccgagtcaatccaaatgtgttctttcctcttggcagcgttcctgcctcctggcatggcaatcctcttccctgagactggcagttgctcaagataggaagctcccgggaccagacccgagcgccagccggctacgccgtccgctggcctgagcaaataaacgcgtgtcttcaaaaaactacaatccccatggtggcacgcgcctgtagtcccagctactctggtggctgaggcaggagaatggcgtaaacccgggaggcggagcttacagtgagccgagatcgcgccactgcactccagcctgggcgacagagcgctcaaaaaaaaaacaaaaaacaaaaaacaaaaaactacaacccccatgaagctttagtgcctttgaggggaggagtggcgcatgtttgttcacgcacgaaaaagaaattaaacctaactaccgttcccccagggcgccgctctgcaaattacccaatcagctctaagtacaaagcatcgcgagtctttagtgctctttggcgctataagcccgtgggaacgagcattggagacccttttcacaagatggcgccgaaagcgaagaaggaagctcctgcccctcctaaagctgaagccaaagcgaaggctttaaaggccaagaaggcagtgttgaaaggtgtccacagccacaaaaagaagaagatccgcacgtcacccaccttccggcggccgaagacactgcgactccggagacagcccaaatatcctcggaagagcgctcccaggagaaacaagcttgaccactatgctatcatcaagtttccgctgaccactgagtctgccatgaagaagatagaagacaacaacacacttgtgttcattgtggatgttaaagccaacaagcaccagattaaacaggctgtgaagaagctgtatgacattgatgtggccaaggtcaacaccctgattcggcctgatggagagaagaaggcatatgttcgactggctcctgattacgatgctttggatgttgccaacaaaattgggatcatctaaactgagtccagctgcctaattctgaatatatatatatatatatcttttcaccataaaaaaaagacattaacacacacaaagaacaacttttggggggcgccttggcccttcgaaaaagttttaaaacccctctgttggggcgccggggccccatttggtttatgagcaccctgggccag

SEQ ID NO: 297032 - DNA, 1550 bp, Homo sapiens
ccctcgtgactcgattatttatttatttatttatttatttattttgagacagggtctcactctgccacccaggctggaatggctcattgcagcctcgacctccagggctgaagcgatcctcccacctcagcctcccaaggaactgggactacaggcacgcaccaccacgcccggctaatttttgtattcttttgtagagacagggtttcgccgtgttgcccagggtggtctcgaactcctgggctcgaagcaattcgtccacctcggcctcacaaagtgctgggattacaggcgtgagtcaccgcgcccggccctgacttgatttttttctgccaccaaatcactgtgttattgataaaccacattcctctctggacctcagttcgaccgagcaaatcctgctccagcactctagaacttagctgtatctaactcccgagtcaatccaaatgtgttctttcctcttggcagcgttcctgcctcctggcatggcaatcctcttccctgagactggcagttgctcaagataggaagctcccgggaccagacccgagcgccagccggctacgccgtccgctggcctgagcaaataaacgcgtgtcttcaaaaaactacaatccccatggtggcacgcgcctgtagtcccagctactctggtggctgaggcaggagaatggcgtaaacccgggaggcggagcttacagtgagccgagatcgcgccactgcactccagcctgggcgacagagcgctcaaaaaaaaaacaaaaaacaaaaaacaaaaaactacaacccccatgaagctttagtgcctttgaggggaggagtggcgcatgtttgttcacgcacgaaaaagaaattaaacctaactaccgttcccccagggcgccgctctgcaaattacccaatcagctctaagtacaaagcatcgcgagtctttagtgctctttggcgctataagcccgtgggaacgagcattggagacccttttcacaagatggcgccgaaagcgaagaaggaagctcctgcccctcctaaagctgaagccaaagcgaaggctttaaaggccaagaaggcagtgttgaaaggtgtccacagccacaaaaagaagaagatccgcacgtcacccaccttccggcggccgaagacactgcgactccggagacagcccaaatatcctcggaagagcgctcccaggagaaacaagcttgaccactatgctatcatcaagtttccgctgaccactgagtctgccatgaagaagatagaagacaacaacacacttgtgttcattgtggatgttaaagccaacaagcaccagattaaacaggctgtgaagaagctgtatgacattgatgtggccaaggtcaacaccctgattcggcctgatggagagaagaaggcatatgttcgactggctcctgattacgatgctttggatgttgccaacaaaattgggatcatctaaactgagtccagctgcctaattctgaatatatatatatatatatcttttcaccataatagacataagagaatagataagacacaac

SEQ ID NO: 297033 - DNA, 1591 bp, Homo sapiens
  misc_feature (1591)..(1591): n is a, c, g, or t
ccctcgtgactcgattatttatttatttatttatttatttattttgagacagggtctcactctgccacccaggctggaatggctcattgcagcctcgacctccagggctgaagcgatcctcccacctcagcctcccaaggaactgggactacaggcacgcaccaccacgcccggctaatttttgtattcttttgtagagacagggtttcgccgtgttgcccagggtggtctcgaactcctgggctcgaagcaattcgtccacctcggcctcacaaagtgctgggattacaggcgtgagtcaccgcgcccggccctgacttgatttttttctgccaccaaatcactgtgttattgataaaccacattcctctctggacctcagttcgaccgagcaaatcctgctccagcactctagaacttagctgtatctaactcccgagtcaatccaaatgtgttctttcctcttggcagcgttcctgcctcctggcatggcaatcctcttccctgagactggcagttgctcaagataggaagctcccgggaccagacccgagcgccagccggctacgccgtccgctggcctgagcaaataaacgcgtgtcttcaaaaaactacaatccccatggtggcacgcgcctgtagtcccagctactctggtggctgaggcaggagaatggcgtaaacccgggaggcggagcttacagtgagccgagatcgcgccactgcactccagcctgggcgacagagcgctcaaaaaaaaaacaaaaaacaaaaaacaaaaaactacaacccccatgaagctttagtgcctttgaggggaggagtggcgcatgtttgttcacgcacgaaaaagaaattaaacctaactaccgttcccccagggcgccgctctgcaaattacccaatcagctctaagtacaaagcatcgcgagtctttagtgctctttggcgctataagcccgtgggaacgagcattggagacccttttcacaagatggcgccgaaagcgaagaaggaagctcctgcccctcctaaagctgaagccaaagcgaaggctttaaaggccaagaaggcagtgttgaaaggtgtccacagccacaaaaagaagaagatccgcacgtcacccaccttccggcggccgaagacactgcgactccggagacagcccaaatatcctcggaagagcgctcccaggagaaacaagcttgaccactatgctatcatcaagtttccgctgaccactgagtctgccatgaagaagatagaagacaacaacacacttgtgttcattgtggatgttaaagccaacaagcaccagattaaacaggctgtgaagaagctgtatgacattgatgtggccaaggtcaacaccctgattcggcctgatggagagaagaaggcatatgttcgactggctcctgattacgatgctttggatgttgccaacaaaattgggatcatctaaactgagtccagctgcctaattctgaatatatatatatatatatcttttcaccatatgggtactaaagctcaagaaatgatacttgaaccgcaaaaagtgttacaattcactggccgcggttttaan

SEQ ID NO: 297034 - DNA, 944 bp, Homo sapiens
atcactggttggagctcatgtcccgggcctctcctgcccctcctaaagctgaagccaaagcgaaggctttaaaggccaagaaggcagtgttgaaaggtgtccacagccacaaaaagaagaagatccgcacgtcacccaccttccggcggccgaagacactgcgactccggagacagcccaaatatcctcggaagagcgctcccaggagaaacaagcttgaccactatgctatcatcaagtttccgctgaccactgagtctgccatgaagaagatagaagacaacaacacacttgtgttcattgtggatgttaaagccaacaagcaccagattaaacaggctgtgaagaagctgtatgacattgatgtggccaaggtcaacaccctgattcggcctgatggagagaagaaggcatatgttcgactggctcctgattacgatgctttggatgttgccaacaaaattgggatcatctaaactgagtccagctgcctaattctgaatatatatatatatatatcttttcaccatatacatgcctgtctgtcaatttctggttgggctgggaggccacacacacacactgacatgacagggcttgggcaagactcctgttctacttatccttttgaaatacctcaccctgccactccaccatgtatgatcattccagagatctttgtgactagagttagtgtcctaggaaaaccagaactcagaacttgcctccatggttgagtaacaagctgtacaagaaccccttttatccctggaagaggctgtgtatgaaaccaatgcccagggtttgaagggtgttagcatccatttcaggggagtgtggattggctggctctctggtagcattttgtcctcacacacccatctactatgtccaaccggtctgtctgcttccctcaccccttgcccaataaaggacaaggactt

SEQ ID NO: 297035 - DNA, 1480 bp, Homo sapiens
ccctcgtgactcgattatttatttatttatttatttatttattttgagacagggtctcactctgccacccaggctggaatggctcattgcagcctcgacctccagggctgaagcgatcctcccacctcagcctcccaaggaactgggactacaggcacgcaccaccacgcccggctaatttttgtattcttttgtagagacagggtttcgccgtgttgcccagggtggtctcgaactcctgggctcgaagcaattcgtccacctcggcctcacaaagtgctgggattacaggcgtgagtcaccgcgcccggccctgacttgatttttttctgccaccaaatcactgtgttattgataaaccacattcctctctggacctcagttcgaccgagcaaatcctgctccagcactctagaacttagctgtatctaactcccgagtcaatccaaatgtgttctttcctcttggcagcgttcctgcctcctggcatggcaatcctcttccctgagactggcagttgctcaagataggaagctcccgggaccagacccgagcgccagccggctacgccgtccgctggcctgagcaaataaacgcgtgtcttcaaaaaactacaatccccatggtggcacgcgcctgtagtcccagctactctggtggctgaggcaggagaatggcgtaaacccgggaggcggagcttacagtgagccgagatcgcgccactgcactccagcctgggcgacagagcgctcaaaaaaaaaacaaaaaacaaaaaacaaaaaactacaacccccatgaagctttagtgcctttgaggggaggagtggcgcatgtttgttcacgcacgaaaaagaaattaaacctaactaccgttcccccagggcgccgctctgcaaattacccaatcagctctaagtacaaagcatcgcgagtctttagtgctctttggcgctataagcccgtgggaacgagcattggagacccttttcacaagatggcgccgaaagcgaagaaggaagctcctgcccctcctaaagctgaagccaaagcgaaggctttaaaggccaagaaggcagtgttgaaaggtgtccacagccacagaagacactgcgactccggagacagcccaaatatcctcggaagagcgctcccaggagaaacaagcttgaccactatgctatcatcaagtttccgctgaccactgagtctgccatgaagaagatagaagacaacaacacacttgtgttcattgtggatgttaaagccaacaagcaccagattaaacaggctgtgaagaagctgtatgacattgatgtggccaaggtcaacaccctgattcggcctgatggagagaagaaggcatatgttcgactggctcctgattacgatgctttggatgttgccaacaaaattgggatcatctaaactgagtccagctgcctaattctgaatatatatatatatatatcttttcaccata

SEQ ID NO: 297036 - DNA, 2193 bp, Homo sapiens
ccctcgtgactcgattatttatttatttatttatttatttattttgagacagggtctcactctgccacccaggctggaatggctcattgcagcctcgacctccagggctgaagcgatcctcccacctcagcctcccaaggaactgggactacaggcacgcaccaccacgcccggctaatttttgtattcttttgtagagacagggtttcgccgtgttgcccagggtggtctcgaactcctgggctcgaagcaattcgtccacctcggcctcacaaagtgctgggattacaggcgtgagtcaccgcgcccggccctgacttgatttttttctgccaccaaatcactgtgttattgataaaccacattcctctctggacctcagttcgaccgagcaaatcctgctccagcactctagaacttagctgtatctaactcccgagtcaatccaaatgtgttctttcctcttggcagcgttcctgcctcctggcatggcaatcctcttccctgagactggcagttgctcaagataggaagctcccgggaccagacccgagcgccagccggctacgccgtccgctggcctgagcaaataaacgcgtgtcttcaaaaaactacaatccccatggtggcacgcgcctgtagtcccagctactctggtggctgaggcaggagaatggcgtaaacccgggaggcggagcttacagtgagccgagatcgcgccactgcactccagcctgggcgacagagcgctcaaaaaaaaaacaaaaaacaaaaaacaaaaaactacaacccccatgaagctttagtgcctttgaggggaggagtggcgcatgtttgttcacgcacgaaaaagaaattaaacctaactaccgttcccccagggcgccgctctgcaaattacccaatcagctctaagtacaaagcatcgcgagtctttagtgctctttggcgctataagcccgtgggaacgagcattggagacccttttcacaagatggcgccgaaagcgaagaaggaagctcctgcccctcctaaagctgaagccaaagcgaaggctttaaaggccaagaaggcagtgttgaaaggtgtccacagccacaaaaagaagaagatccgcacgtcacccaccttccggcggccgaagacactgcgactccggagacagcccaaatatcctcggaagagcgctcccaggagaaacaagcttgaccactatgctatcatcaagtttccgctgaccactgagtctgccatgaagaagatagaagacaacaacacacttgtgttcattgtggatgttaaagccaacaagcaccagattaaacaggctgtgaagaagctgtatgacattgatgtggccaaggtcaacaccctgattcggcctgatggagagaagaaggcatatgttcgactggctcctgattacgatgctttggatgttgccaacaaagtaagtttccttcctacaaaccccttaatgctcaccccttgggtgcaaatgatgcatatgttagcgaccaaagcctgatctttgctgattagtcataattaactgactgcacccctatccttgacaaaccttatcctcacattcctcattttgctttctaaaaataacattccagcttaatcttcatatttcaactccagtaacgaggctcccttttgtttttcagattgggatcatctaaactgagtccagctgcctaattctgaatatatatatatatatatcttttcaccatatacatgcctgtctgtcaatttctggttgggctgggaggccacacacacacactgacatgacagggcttgggcaagactcctgttctacttatccttttgaaatacctcaccctgccactccaccatgtatgatcattccagagatctttgtgactagagttagtgtcctaggaaaaccagaactcagaacttgcctccatggttgagtaacaagctgtacaagaaccccttttatccctggaagaggctgtgtatgaaaccaatgcccagggtttgaagggtgttagcatccatttcaggggagtgtggattggctggctctctggtagcattttgtcctcacacacccatctactatgtccaaccggtctgtctgcttccctcaccccttgcccaataaaggacaaggacttcagaggaaaaaaaggggggcgacaccaagagccg

SEQ ID NO: 297037 - DNA, 1521 bp, Homo sapiens
  misc_feature (1501)..(1501): n is a, c, g, or t
ccctcgtgactcgattatttatttatttatttatttatttattttgagacagggtctcactctgccacccaggctggaatggctcattgcagcctcgacctccagggctgaagcgatcctcccacctcagcctcccaaggaactgggactacaggcacgcaccaccacgcccggctaatttttgtattcttttgtagagacagggtttcgccgtgttgcccagggtggtctcgaactcctgggctcgaagcaattcgtccacctcggcctcacaaagtgctgggattacaggcgtgagtcaccgcgcccggccctgacttgatttttttctgccaccaaatcactgtgttattgataaaccacattcctctctggacctcagttcgaccgagcaaatcctgctccagcactctagaacttagctgtatctaactcccgagtcaatccaaatgtgttctttcctcttggcagcgttcctgcctcctggcatggcaatcctcttccctgagactggcagttgctcaagataggaagctcccgggaccagacccgagcgccagccggctacgccgtccgctggcctgagcaaataaacgcgtgtcttcaaaaaactacaatccccatggtggcacgcgcctgtagtcccagctactctggtggctgaggcaggagaatggcgtaaacccgggaggcggagcttacagtgagccgagatcgcgccactgcactccagcctgggcgacagagcgctcaaaaaaaaaacaaaaaacaaaaaacaaaaaactacaacccccatgaagctttagtgcctttgaggggaggagtggcgcatgtttgttcacgcacgaaaaagaaattaaacctaactaccgttcccccagggcgccgctctgcaaattacccaatcagctctaagtacaaagcatcgcgagtctttagtgctctttggcgctataagcccgtgggaacgagcattggagacccttttcacaagatggcgccgaaagcgaagaaggaagctcctgcccctcctaaagctgaagccaaagcgaaggctttaaaggccaagaaggcagtgttgaaaggtgtccacagccacaaaaagaagaagatccgcacgtcacccaccttccggcggccgaagacactgcgactccggagacagcccaaatatcctcggaagagcgctcccaggagaaacaagcttgaccactatgctatcatcaagtttccgctgaccactgagtctgccatgaagaagatagaagacaacaacacacttgtgttcattgtggatgttaaagccaacaagcaccagattaaacaggctgtgaagaagctgtatgacattgatgtggccaaggtcaacaccctgattcggcctgatggagagaagaaggcatatgttcgactggctcctgattacgatgctttggagtgccaactaacatcggtcatctaactgagtgccactttcaactcccggtgggtgaatatatangtatatataatctttcccca

SEQ ID NO: 297038 - DNA, 2857 bp, Homo sapiens
  misc_feature (2074)..(2074): n is a, c, g, or t
  misc_feature (2094)..(2094): n is a, c, g, or t
ccctcgtgactcgattatttatttatttatttatttatttattttgagacagggtctcactctgccacccaggctggaatggctcattgcagcctcgacctccagggctgaagcgatcctcccacctcagcctcccaaggaactgggactacaggcacgcaccaccacgcccggctaatttttgtattcttttgtagagacagggtttcgccgtgttgcccagggtggtctcgaactcctgggctcgaagcaattcgtccacctcggcctcacaaagtgctgggattacaggcgtgagtcaccgcgcccggccctgacttgatttttttctgccaccaaatcactgtgttattgataaaccacattcctctctggacctcagttcgaccgagcaaatcctgctccagcactctagaacttagctgtatctaactcccgagtcaatccaaatgtgttctttcctcttggcagcgttcctgcctcctggcatggcaatcctcttccctgagactggcagttgctcaagataggaagctcccgggaccagacccgagcgccagccggctacgccgtccgctggcctgagcaaataaacgcgtgtcttcaaaaaactacaatccccatggtggcacgcgcctgtagtcccagctactctggtggctgaggcaggagaatggcgtaaacccgggaggcggagcttacagtgagccgagatcgcgccactgcactccagcctgggcgacagagcgctcaaaaaaaaaacaaaaaacaaaaaacaaaaaactacaacccccatgaagctttagtgcctttgaggggaggagtggcgcatgtttgttcacgcacgaaaaagaaattaaacctaactaccgttcccccagggcgccgctctgcaaattacccaatcagctctaagtacaaagcatcgcgagtctttagtgctctttggcgctataagcccgtgggaacgagcattggagacccttttcacaagatggcgccgaaagcgaagaaggaagctcctgcccctcctaaagctgaagccaaagcgaaggctttaaaggccaagaaggcagtgttgaaaggtgtccacagccacaaaaagaagaagatccgcacgtcacccaccttccggcggccgaagacactgcgactccggagacagcccaaatatcctcggaagagcgctcccaggagaaacaagtcagtactgccccctgtacccatgaaaagatttgggtattctccattggtaatttggaaattcactcactctgcgtgatggtttctcaaacgcaaattgtgtccagtgtgcttctctaattggaagtatgaggagattgtttctgctgcatttacaaaactggcaggatcagcccagaggccgggcgcggtggctcacgtctgtaatcccagcactttgggaggccgagggggggcggatcacttgaggtcaggggttcgagaccagcctgagtgacatggagaaaccccgcgtctattaaaaatagaaaattcgccgggcatggtggcgcatgtctgtaatcccagctactcgcgggaggctgaggcaggagaatcgcttgaacccgggaggtggaggttgcggtgagcggagatcgtaccattgcattccagcctgggcaataagagtgaactctgtctcaaaaaaaaaaaaaccctgagtctctcaaaatttgttaggttaattattgcttcacatgtggtcacggtttgaaaacttattttggggggagtataaagtagaatacagagattccttgctcatagctcctactgctatcgggaacaatccttgagggtgagaacgtggattgattcttgattgatagtggggattccattatctgtatttggcagttatggcctgctgcggtgtatagaagcttctttccattcattttcccgaattttcatactgctcaaggaacagttgggggggaatgggcagaaggttgggcacttgagtatttgagctatcggtaataactgactttttagggagcacagatttgagtagagccatggtagtagttagtaccaatgggttttngctgcttctactctttcttnacagaaaaagtggattgtgttcatataggaaagcagttcacagactgtcttcctgcccctcccgccaccaagctggacctagaatcaagtgtgactttaaatggggaaagctgtgttacagttgtgcttaagccactgctgtggcttaacctcagcctcccaaagtgctgggaatacagccatgagccagcacacctggcccagagatgattctttaatcacttgaggttgtaagagcccttcaagagaaagaaaatgcacaacgttctgcccctgggattggggcttcaggcccttagatttcagggtgcagatgatgacactgtaaagcgaccaaagtctgaacaaagtgattggtacctcgttgtctgatgcacctaggctctcctggctctgggctccaaaagaatgggcccaggccaggtgaccccattttgcctctccaagcttgaccactatgctatcatcaagtttccgctgaccactgagtctgccatgaagaagatagaagacaacaacacacttgtgttcattgtggatgttaaagccaacaagcaccagattaaacaggctgtgaagaagctgtatgacattgatgtggccaaggtcaacaccctgattcggcctgatggagagaagaaggcatatgttcgactggctcctgattacgatgctttggatgttgccaacaaaattgggatcatctaaactgagtccagctgcctaattctgaatatatatatatatatatcttttcaccata

SEQ ID NO: 297039 - DNA, 1483 bp, Homo sapiens
ccctcgtgactcgattatttatttatttatttatttatttattttgagacagggtctcactctgccacccaggctggaatggctcattgcagcctcgacctccagggctgaagcgatcctcccacctcagcctcccaaggaactgggactacaggcacgcaccaccacgcccggctaatttttgtattcttttgtagagacagggtttcgccgtgttgcccagggtggtctcgaactcctgggctcgaagcaattcgtccacctcggcctcacaaagtgctgggattacaggcgtgagtcaccgcgcccggccctgacttgatttttttctgccaccaaatcactgtgttattgataaaccacattcctctctggacctcagttcgaccgagcaaatcctgctccagcactctagaacttagctgtatctaactcccgagtcaatccaaatgtgttctttcctcttggcagcgttcctgcctcctggcatggcaatcctcttccctgagactggcagttgctcaagataggaagctcccgggaccagacccgagcgccagccggctacgccgtccgctggcctgagcaaataaacgcgtgtcttcaaaaaactacaatccccatggtggcacgcgcctgtagtcccagctactctggtggctgaggcaggagaatggcgtaaacccgggaggcggagcttacagtgagccgagatcgcgccactgcactccagcctgggcgacagagcgctcaaaaaaaaaacaaaaaacaaaaaacaaaaaactacaacccccatgaagctttagtgcctttgaggggaggagtggcgcatgtttgttcacgcacgaaaaagaaattaaacctaactaccgttcccccagggcgccgctctgcaaattacccaatcagctctaagtacaaagcatcgcgagtctttagtgctctttggcgctataagcccgtgggaacgagcattggagacccttttcacaagatggcgccgaaagcgaagaaggaagctcctgcccctcctaaagctgaagccaaagcgaaggctttaaaggccaagaaggcagtgttgaaaggtgtccacagccacaaaaagaagaagatccgcacgtcacccaccttccggcggcccggaagagcgctcccaggagaaacaagcttgaccactatgctatcatcaagtttccgctgaccactgagtctgccatgaagaagatagaagacaacaacacacttgtgttcattgtggatgttaaagccaacaagcaccagattaaacaggctgtgaagaagctgtatgacattgatgtggccaaggtcaacaccctgattcggcctgatggagagaagaaggcatatgttcgactggctcctgattacgatgctttggatgttgccaacaaaattgggatcatctaaactgagtccagctgcctaattctgaatatatatatatatatatcttttcaccata

SEQ ID NO: 297040 - DNA, 1633 bp, Homo sapiens
  misc_feature (850)..(850): n is a, c, g, or t
  misc_feature (870)..(870): n is a, c, g, or t
taaaaggatagcgtactgctcgatgggtactaggcacatttacgcactcatggtcataggctgctccctgtctaatatgtgtcctccgtaattctctaattggaagtatgaggagattgtttctgctgcatttacaaaactggcaggatcagcccagaggccgggcgcggtggctcacgtctgtaatcccagcactttgggaggccgagggggggcggatcacttgaggtcaggggttcgagaccagcctgagtgacatggagaaaccccgcgtctattaaaaatagaaaattcgccgggcatggtggcgcatgtctgtaatcccagctactcgcgggaggctgaggcaggagaatcgcttgaacccgggaggtggaggttgcggtgagcggagatcgtaccattgcattccagcctgggcaataagagtgaactctgtctcaaaaaaaaaaaaaccctgagtctctcaaaatttgttaggttaattattgcttcacatgtggtcacggtttgaaaacttattttggggggagtataaagtagaatacagagattccttgctcatagctcctactgctatcgggaacaatccttgagggtgagaacgtggattgattcttgattgatagtggggattccattatctgtatttggcagttatggcctgctgcggtgtatagaagcttctttccattcattttcccgaattttcatactgctcaaggaacagttgggggggaatgggcagaaggttgggcacttgagtatttgagctatcggtaataactgactttttagggagcacagatttgagtagagccatggtagtagttagtaccaatgggttttngctgcttctactctttcttnacagaaaaagtggattgtgttcatataggaaagcagttcacagactgtcttcctgcccctcccgccaccaagctggacctagaatcaagtgtgactttaaatggggaaagctgtgttacagttgtgcttaagccactgctgtggcttaacctcagcctcccaaagtgctgggaatacagccatgagccagcacacctggcccagagatgattctttaatcacttgaggttgtaagagcccttcaagagaaagaaaatgcacaacgttctgcccctgggattggggcttcaggcccttagatttcagggtgcagatgatgacactgtaaagcgaccaaagtctgaacaaagtgattggtacctcgttgtctgatgcacctaggctctcctggctctgggctccaaaagaatgggcccaggccaggtgaccccattttgcctctccaagcttgaccactatgctatcatcaagtttccgctgaccactgagtctgccatgaagaagatagaagacaacaacacacttgtgttcattgtggatgttaaagccaacaagcaccagattaaacaggctgtgaagaagctgtatgacattgatgtggccaaggtcaacaccctgattcggcctgatggagagaagaaggcatatgttcgactggctcctgattacgatgctttggatgttgccaacaaaattgggatcatctaaactgagtccagctgcctaattctgaatatatatatatatatatcttttcaccata

SEQ ID NO: 297041 - DNA, 903 bp, Homo sapiens
  misc_feature (212)..(212): n is a, c, g, or t
  misc_feature (232)..(232): n is a, c, g, or t
aggacatggctgtagaagtacttttcctcctcctttttgtttttttttgagacagagtcttacctgttgcccaggctggagtgcagtgacacaatcaaggctcactgtagcttcaacctccggggaacaagcaatcctcccacctcagccttctgagtagctgcgactacaggcataagcccccatacccagcttttttttttgccgggggnagggtgggcgtagagatggnatcctcactatgttgctcaggccggtcttgaactcctgggctcaagccattctcccacattgtcttcccaaagtgctgggaatacagccatgagccagcacacctggcccagagatgattctttaatcacttgaggttgtaagagcccttcaagagaaagaaaatgcacaacgttctgcccctgggattggggcttcaggcccttagatttcagggtgcagatgatgacactgtaaagcgaccaaagtctgaacaaagtgattggtacctcgttgtctgatgcacctaggctctcctggctctgggctccaaaagaatgggcccaggccaggtgaccccattttgcctctccaagcttgaccactatgctatcatcaagtttccgctgaccactgagtctgccatgaagaagatagaagacaacaacacacttgtgttcattgtggatgttaaagccaacaagcaccagattaaacaggctgtgaagaagctgtatgacattgatgtggccaaggtcaacaccctgattcggcctgatggagagaagaaggcatatgttcgactggctcctgattacgatgctttggatgttgccaacaaaattgggatcatctaaactgagtccagctgcctaattctgaatatatatatatatatatcttttcaccata

SEQ ID NO: 297042 - DNA, 1791 bp, Homo sapiens
ccctcgtgactcgattatttatttatttatttatttatttattttgagacagggtctcactctgccacccaggctggaatggctcattgcagcctcgacctccagggctgaagcgatcctcccacctcagcctcccaaggaactgggactacaggcacgcaccaccacgcccggctaatttttgtattcttttgtagagacagggtttcgccgtgttgcccagggtggtctcgaactcctgggctcgaagcaattcgtccacctcggcctcacaaagtgctgggattacaggcgtgagtcaccgcgcccggccctgacttgatttttttctgccaccaaatcactgtgttattgataaaccacattcctctctggacctcagttcgaccgagcaaatcctgctccagcactctagaacttagctgtatctaactcccgagtcaatccaaatgtgttctttcctcttggcagcgttcctgcctcctggcatggcaatcctcttccctgagactggcagttgctcaagataggaagctcccgggaccagacccgagcgccagccggctacgccgtccgctggcctgagcaaataaacgcgtgtcttcaaaaaactacaatccccatggtggcacgcgcctgtagtcccagctactctggtggctgaggcaggagaatggcgtaaacccgggaggcggagcttacagtgagccgagatcgcgccactgcactccagcctgggcgacagagcgctcaaaaaaaaaacaaaaaacaaaaaacaaaaaactacaacccccatgaagctttagtgcctttgaggggaggagtggcgcatgtttgttcacgcacgaaaaagaaattaaacctaactaccgttcccccagggcgccgctctgcaaattacccaatcagctctaagtacaaagcatcgcgagtctttagtgctctttggcgctataagcccgtgggaacgagcattggagacccttttcacaagatggcgccgaaagcgaagaaggaagctcctgcccctcctaaagctgaagccaaagcgaaggctttaaaggccaagaaggcagtgttgaaaggtgtccacagccacaaaaagaagaagatccgcacgtcacccaccttccggcggccgaagacactgcgactccggagacagcccaaatatcctcggaagagcgctcccaggagaaacaagcttgaccactatgctatcatcaagtttccgctgaccactgagtctgccatgaagaagatagaagacaacaacacacttgtgttcattgtggatgttaaagccaacaagcaccagattaaacaggctgtgaagaagctgtatgacattgatgtggccaaggtcaacaccctgattcggcctgatgggagcaagatggccatcagatgtacttagtacctcattacataagtaaatattctgtaaactggtgaagagcgggtacaaacaaagatgtcatgtccatgaagtcaagttaaatgctttagaaatttagctgttgaattggtgttaataagctgagattaggcaaggaaaagtaaaagcagagggttgttcagcatattctttgagagctcattccaccataagtaaacaaaaatggaaaccacaaacgattccccatgggtgtgttttctcgctagaaaccctgtgatatgatttggatgtttgtcctcttcaaatctcatgttgaaatgtgctttccaatttggatatgagggggccctgatggtagcaagactgcggtgtatcctctagagtcagccaga

SEQ ID NO: 297043 - DNA, 1386 bp, Homo sapiens
  misc_feature (1370)..(1370): n is a, c, g, or t
ccctcgtgactcgattatttatttatttatttatttatttattttgagacagggtctcactctgccacccaggctggaatggctcattgcagcctcgacctccagggctgaagcgatcctcccacctcagcctcccaaggaactgggactacaggcacgcaccaccacgcccggctaatttttgtattcttttgtagagacagggtttcgccgtgttgcccagggtggtctcgaactcctgggctcgaagcaattcgtccacctcggcctcacaaagtgctgggattacaggcgtgagtcaccgcgcccggccctgacttgatttttttctgccaccaaatcactgtgttattgataaaccacattcctctctggacctcagttcgaccgagcaaatcctgctccagcactctagaacttagctgtatctaactcccgagtcaatccaaatgtgttctttcctcttggcagcgttcctgcctcctggcatggcaatcctcttccctgagactggcagttgctcaagataggaagctcccgggaccagacccgagcgccagccggctacgccgtccgctggcctgagcaaataaacgcgtgtcttcaaaaaactacaatccccatggtggcacgcgcctgtagtcccagctactctggtggctgaggcaggagaatggcgtaaacccgggaggcggagcttacagtgagccgagatcgcgccactgcactccagcctgggcgacagagcgctcaaaaaaaaaacaaaaaacaaaaaacaaaaaactacaacccccatgaagctttagtgcctttgaggggaggagtggcgcatgtttgttcacgcacgaaaaagaaattaaacctaactaccgttcccccagggcgccgctctgcaaattacccaatcagctctaagtacaaagcatcgcgagtctttagtgctctttggcgctataagcccgtgggaacgagcattggagacccttttcacaagatggcgccgaaagcgaagaaggaagctcctgcccctcctaaagctgaagccaaagcgaaggctttaaaggccaagaaggcagtgttgaaaggtgtccacagccacaaaaagaagaagatccgcacgtcacccaccttccggcggccgaagacactgcgactccggagacagcccaaatatcctcggaagagcgctcccaggagaaacaagcttgaccactatgctatcatcaagtttccgctgaccactgagtctgccatgaagaagatagaagacaacaacacacttgtgttcattgtggatgttaaagccaacaagcaccagattaaacaggctgtgaagaagctgtatgacattgatgtggtgcctgctacgnggatcctgcagagtca

SEQ ID NO: 297044 - DNA, 2933 bp, Homo sapiens
  misc_feature (2074)..(2074): n is a, c, g, or t
  misc_feature (2094)..(2094): n is a, c, g, or t
ccctcgtgactcgattatttatttatttatttatttatttattttgagacagggtctcactctgccacccaggctggaatggctcattgcagcctcgacctccagggctgaagcgatcctcccacctcagcctcccaaggaactgggactacaggcacgcaccaccacgcccggctaatttttgtattcttttgtagagacagggtttcgccgtgttgcccagggtggtctcgaactcctgggctcgaagcaattcgtccacctcggcctcacaaagtgctgggattacaggcgtgagtcaccgcgcccggccctgacttgatttttttctgccaccaaatcactgtgttattgataaaccacattcctctctggacctcagttcgaccgagcaaatcctgctccagcactctagaacttagctgtatctaactcccgagtcaatccaaatgtgttctttcctcttggcagcgttcctgcctcctggcatggcaatcctcttccctgagactggcagttgctcaagataggaagctcccgggaccagacccgagcgccagccggctacgccgtccgctggcctgagcaaataaacgcgtgtcttcaaaaaactacaatccccatggtggcacgcgcctgtagtcccagctactctggtggctgaggcaggagaatggcgtaaacccgggaggcggagcttacagtgagccgagatcgcgccactgcactccagcctgggcgacagagcgctcaaaaaaaaaacaaaaaacaaaaaacaaaaaactacaacccccatgaagctttagtgcctttgaggggaggagtggcgcatgtttgttcacgcacgaaaaagaaattaaacctaactaccgttcccccagggcgccgctctgcaaattacccaatcagctctaagtacaaagcatcgcgagtctttagtgctctttggcgctataagcccgtgggaacgagcattggagacccttttcacaagatggcgccgaaagcgaagaaggaagctcctgcccctcctaaagctgaagccaaagcgaaggctttaaaggccaagaaggcagtgttgaaaggtgtccacagccacaaaaagaagaagatccgcacgtcacccaccttccggcggccgaagacactgcgactccggagacagcccaaatatcctcggaagagcgctcccaggagaaacaagtcagtactgccccctgtacccatgaaaagatttgggtattctccattggtaatttggaaattcactcactctgcgtgatggtttctcaaacgcaaattgtgtccagtgtgcttctctaattggaagtatgaggagattgtttctgctgcatttacaaaactggcaggatcagcccagaggccgggcgcggtggctcacgtctgtaatcccagcactttgggaggccgagggggggcggatcacttgaggtcaggggttcgagaccagcctgagtgacatggagaaaccccgcgtctattaaaaatagaaaattcgccgggcatggtggcgcatgtctgtaatcccagctactcgcgggaggctgaggcaggagaatcgcttgaacccgggaggtggaggttgcggtgagcggagatcgtaccattgcattccagcctgggcaataagagtgaactctgtctcaaaaaaaaaaaaaccctgagtctctcaaaatttgttaggttaattattgcttcacatgtggtcacggtttgaaaacttattttggggggagtataaagtagaatacagagattccttgctcatagctcctactgctatcgggaacaatccttgagggtgagaacgtggattgattcttgattgatagtggggattccattatctgtatttggcagttatggcctgctgcggtgtatagaagcttctttccattcattttcccgaattttcatactgctcaaggaacagttgggggggaatgggcagaaggttgggcacttgagtatttgagctatcggtaataactgactttttagggagcacagatttgagtagagccatggtagtagttagtaccaatgggttttngctgcttctactctttcttnacagaaaaagtggattgtgttcatataggaaagcagttcacagactgtcttcctgcccctcccgccaccaagctggacctagaatcaagtgtgactttaaatggggaaagctgtgttacagttgtgcttaagccactgctgtggcttaacctcagcctcccaaagtgctgggaatacagccatgagccagcacacctggcccagagatgattctttaatcacttgaggttgtaagagcccttcaagagaaagaaaatgcacaacgttctgcccctgggattggggcttcaggcccttagatttcagggtgcagatgatgacactgtaaagcgaccaaagtctgaacaaagtgattggtacctcgttgtctgatgcacctaggctctcctggctctgggctccaaaagaatgggcccaggccaggtgaccccattttgcctctccaagcttgaccactatgctatcatcaagtttccgctgaccactgagtctgccatgaagaagatagaagacaacaacacacttgtgttcattgtggatgttaaagccaacaagcaccagattaaacaggctgtgaagaagctgtatgacattgatgtggccaaggtcaacaccctgattcggtgagttgggcctcaagggatggggagcaggctggaccagcagtctggagccaaaaaaacctgcattccatgaagctttttgatgtttaggtagtcctggtaatgcaggactacacgtgtagtccgagctatgcaggaggatctcttgaggccaggaatcacccatgattgccccattgtactccagcctgagcaaccaagcaaggccctttttaa

SEQ ID NO: 297045 - DNA, 445 bp, Homo sapiens
cgagctcggcacccgtacccaggttgggctgggaggccacacacacacactgacatgacagggcttgggcaagactcctgttctacttatccttttgaaatacctcaccctgccactccaccatgtatgatcattccagagatctttgtgactagagttagtgtcctaggaaaaccagaactcagaacttgcctccatggttgagtaacaagctgtacaagaaccccttttatccctggaagaggctgtgtatgaaaccaatgcccagggtttgaagggtgttagcatccatttcaggggagtgtggattggctggctctctggtagcattttgtcctcacacacccatctactatgtccaaccggtctgtctgcttccctcaccccttgcccaataaaggacaaggacttcagaggaaaaaaaggggggcgacaccaagagccg

SEQ ID NO: 297046 - DNA, 562 bp, Homo sapiens
  misc_feature (18)..(18): n is a, c, g, or t
  misc_feature (30)..(30): n is a, c, g, or t
cgacaggctgcgagaagncgacagaagggntcacagatggcgccgaaagcgaagaaggaagctcctgcccctcctaaagctgaagccaaagcgaaggctttaaaggccaagaaggcagtgttgaaaggtgtccacagccacaaaaagaagaagatccgcacgtcacccaccttccggcggccgaagacactgcgactccggagacagcccaaatatcctcggaagagcgctcccaggagaaacaagcttgaccactatgctatcatcaagtttccgctgaccactgagtctgccatgaagaagatagaagacaacaacacacttgtgttcattgtggatgttaaagccaacaagcaccagattaaacaggctgtgaagaagctgtatgacattgatgtggccaaggtcaacaccctgattcggcctgatggagagaagaaggcatatgttcgactggctcctgattacgatgctttggatgttgccaacaaaattgggatcatctaaactgagtccagctgcctaattctgaatatatatatatatatatcttttcaccata

SEQ ID NO: 297047 - DNA, 772 bp, Homo sapiens
  misc_feature (27)..(27): n is a, c, g, or t
aggggagtggacaaacatcggctaggncgaggctggagatggcgccgaaagcgaagaaggaagctcctgcccctcctaaagctgaagccaaagcgaaggctttaaaggccaagaaggcagtgttgaaaggtgtccacagccacaaaaagaagaagatccgcacgtcacccaccttccggcggccgaagacactgcgactccggagacagcccaaatatcctcggaagagcgctcccaggagaaacaagcttgaccactatgctatcatcaagtttccgctgaccactgagtctgccatgaagaagatagaagacaacaacacacttgtgttcattgtggatgttaaagccaacaagcaccagattaaacaggctgtgaagaagctgtatgacattgatgtggccaaggtcaacaccctgattcggcctgatggagagaagaaggcatatgttcgactggctcctgattacgatgctttggatgttgccaacaaaattgggatcatctaaactgagtccagctgcctaattctgaatatatatatatatatatcttttcaccataatcttttcaccataaaaaaaaaaaaaaaaaaaaaacgggggggtcaagggcggggggcgggaaaaagggggtaaggacaggggccagggggcaaagcgggtgcccggaccaagtttccgggtgcaagcgggggacaatgggcgggccccctataggggaggggaaataattccgaaagccggggtaccggatagatacgggcagaaac

SEQ ID NO: 297048 - DNA, 460 bp, Homo sapiens
gagagagagagagagagagagagagagacactgcgactccggagggtgggtgacgtgccttcggccgccggaaggtgggtgaagacactgcgactccggagacagcccaaatatcctcggaagagcgctcccaggagaaacaagcttgaccactatgctatcatcaagtttccgctgaccactgagtctgccatgaagaagatagaagacaacaacacacttgtgttcattgtggatgttaaagccaacaagcaccagattaaacaggctgtgaagaagctgtatgacattgatgtggccaaggtcaacaccctgattcggcctgatggagagaagaaggcatatgttcgactggctcctgattacgatgctttggatgttgccaacaaaattgggatcatctaaactgagtccagctgcctaattctgaatatatatatatatatatcttttcaccata

SEQ ID NO: 297049 - DNA, 529 bp, Homo sapiens
  misc_feature (15)..(15): n is a, c, g, or t
atttcggaacgagcngcgaagaaggaagctcctgcccctcctaaagctgaagccaaagcgaaggctttaaaggccaagaaggcagtgttgaaaggtgtccacagccacaaaaagaagaagatccgcacgtcacccaccttccggcggccgaagacactgcgactccggagacagcccaaatatcctcggaagagcgctcccaggagaaacaagcttgaccactatgctatcatcaagtttccgctgaccactgagtctgccatgaagaagatagaagacaacaacacacttgtgttcattgtggatgttaaagccaacaagcaccagattaaacaggctgtgaagaagctgtatgacattgatgtggccaaggtcaacaccctgattcggcctgatggagagaagaaggcatatgttcgactggctcctgattacgatgctttggatgttgccaacaaaattgggatcatctaaactgagtccagctgcctaattctgaatatatatatatatatatcttttcaccata

SEQ ID NO: 297050 - DNA, 1933 bp, Homo sapiens
ccctcgtgactcgattatttatttatttatttatttatttattttgagacagggtctcactctgccacccaggctggaatggctcattgcagcctcgacctccagggctgaagcgatcctcccacctcagcctcccaaggaactgggactacaggcacgcaccaccacgcccggctaatttttgtattcttttgtagagacagggtttcgccgtgttgcccagggtggtctcgaactcctgggctcgaagcaattcgtccacctcggcctcacaaagtgctgggattacaggcgtgagtcaccgcgcccggccctgacttgatttttttctgccaccaaatcactgtgttattgataaaccacattcctctctggacctcagttcgaccgagcaaatcctgctccagcactctagaacttagctgtatctaactcccgagtcaatccaaatgtgttctttcctcttggcagcgttcctgcctcctggcatggcaatcctcttccctgagactggcagttgctcaagataggaagctcccgggaccagacccgagcgccagccggctacgccgtccgctggcctgagcaaataaacgcgtgtcttcaaaaaactacaatccccatggtggcacgcgcctgtagtcccagctactctggtggctgaggcaggagaatggcgtaaacccgggaggcggagcttacagtgagccgagatcgcgccactgcactccagcctgggcgacagagcgctcaaaaaaaaaacaaaaaacaaaaaacaaaaaactacaacccccatgaagctttagtgcctttgaggggaggagtggcgcatgtttgttcacgcacgaaaaagaaattaaacctaactaccgttcccccagggcgccgctctgcaaattacccaatcagctctaagtacaaagcatcgcgagtctttagtgctctttggcgctataagcccgtgggaacgagcattggagacccttttcacaagatggcgccgaaagcgaagaaggaagctcctgcccctcctaaagctgaagccaaagcgaaggctttaaaggccaagaaggcagtgttgaaaggtgtccacagccacaaaaagaagaagatccgcacgtcacccaccttccggcggccgaagacactgcgactccggagacagcccaaatatcctcggaagagcgctcccaggagaaacaagcttgaccactatgctatcatcaagtttccgctgaccactgagtctgccatgaagaagatagaagacaacaacacacttgtgttcattgtggatgttaaagccaacaagcaccagattaaacaggctgtgaagaagctgtatgacattgatgtggccaaggtcaacaccctgattcggcctgatggagagaagaaggcatatgttcgactggctcctgattacgatgctttggatgttgccaacaaaattgggatcatctaaactgagtccagctgcctaattctgaatatatatatatatatatcttttcaccatatacatgcctgtctgtcaatttctggttgggctgggaggccacacacacacactgacatgacagggcttgggcaagactcctgttctacttatccttttgaaatacctcaccctgccactccaccatgtatgatcattccagagatctttgtgactagagttagtgtcctaggaaaaccagaactcagaacttgcctccatggttgagtaacaagctgtacaagaaccccttttatccctggaagaggctgtgtatgaaaccaatgcccagggtttgaagggtgttagcatccatttcaggggagtgtggattggctggctctctggtagcattttgtcctcacacacccatctactatgtccaaccggtctgtctgcttccctcaccccttgcccaataaaggacaaggactt

SEQ ID NO: 297051 - DNA, 1967 bp, Homo sapiens
ccctcgtgactcgattatttatttatttatttatttatttattttgagacagggtctcactctgccacccaggctggaatggctcattgcagcctcgacctccagggctgaagcgatcctcccacctcagcctcccaaggaactgggactacaggcacgcaccaccacgcccggctaatttttgtattcttttgtagagacagggtttcgccgtgttgcccagggtggtctcgaactcctgggctcgaagcaattcgtccacctcggcctcacaaagtgctgggattacaggcgtgagtcaccgcgcccggccctgacttgatttttttctgccaccaaatcactgtgttattgataaaccacattcctctctggacctcagttcgaccgagcaaatcctgctccagcactctagaacttagctgtatctaactcccgagtcaatccaaatgtgttctttcctcttggcagcgttcctgcctcctggcatggcaatcctcttccctgagactggcagttgctcaagataggaagctcccgggaccagacccgagcgccagccggctacgccgtccgctggcctgagcaaataaacgcgtgtcttcaaaaaactacaatccccatggtggcacgcgcctgtagtcccagctactctggtggctgaggcaggagaatggcgtaaacccgggaggcggagcttacagtgagccgagatcgcgccactgcactccagcctgggcgacagagcgctcaaaaaaaaaacaaaaaacaaaaaacaaaaaactacaacccccatgaagctttagtgcctttgaggggaggagtggcgcatgtttgttcacgcacgaaaaagaaattaaacctaactaccgttcccccagggcgccgctctgcaaattacccaatcagctctaagtacaaagcatcgcgagtctttagtgctctttggcgctataagcccgtgggaacgagcattggagacccttttcacaagatggcgccgaaagcgaagaaggaagctcctgcccctcctaaagctgaagccaaagcgaaggctttaaaggccaagaaggcagtgttgaaaggtgtccacagccacaaaaagaagaagatccgcacgtcacccaccttccggcggccgaagacactgcgactccggagacagcccaaatatcctcggaagagcgctcccaggagaaacaagcttgaccactatgctatcatcaagtttccgctgaccactgagtctgccatgaagaagatagaagacaacaacacacttgtgttcattgtggatgttaaagccaacaagcaccagattaaacaggctgtgaagaagctgtatgacattgatgtggccaaggtcaacaccctgattcggcctgatggagagaagaaggcatatgttcgactggctcctgattacgatgctttggatgttgccaacaaaattgggatcatctaaactgagtccagctgcctaattctgaatatatatatatatatatcttttcaccatatacatgcctgtctgtcaatttctggttgggctgggaggccacacacacacactgacatgacagggcttgggcaagactcctgttctacttatccttttgaaatacctcaccctgccactccaccatgtatgatcattccagagatctttgtgactagagttagtgtcctaggaaaaccagaactcagaacttgcctccatggttgagtaacaagctgtacaagaaccccttttatccctggaagaggctgtgtatgaaaccaatgcccagggtttgaagggtgttagcatccatttcaggggagtgtggattggctggctctctggtagcattttgtcctcacacacccatctactatgtccaaccggtctgtctgcttccctcaccccttgcccaataaaggacaaggacttcagaggaaaaaaaggggggcgacaccaagagccg

SEQ ID NO: 297052 - DNA, 2543 bp, Homo sapiens
ccctcgtgactcgattatttatttatttatttatttatttattttgagacagggtctcactctgccacccaggctggaatggctcattgcagcctcgacctccagggctgaagcgatcctcccacctcagcctcccaaggaactgggactacaggcacgcaccaccacgcccggctaatttttgtattcttttgtagagacagggtttcgccgtgttgcccagggtggtctcgaactcctgggctcgaagcaattcgtccacctcggcctcacaaagtgctgggattacaggcgtgagtcaccgcgcccggccctgacttgatttttttctgccaccaaatcactgtgttattgataaaccacattcctctctggacctcagttcgaccgagcaaatcctgctccagcactctagaacttagctgtatctaactcccgagtcaatccaaatgtgttctttcctcttggcagcgttcctgcctcctggcatggcaatcctcttccctgagactggcagttgctcaagataggaagctcccgggaccagacccgagcgccagccggctacgccgtccgctggcctgagcaaataaacgcgtgtcttcaaaaaactacaatccccatggtggcacgcgcctgtagtcccagctactctggtggctgaggcaggagaatggcgtaaacccgggaggcggagcttacagtgagccgagatcgcgccactgcactccagcctgggcgacagagcgctcaaaaaaaaaacaaaaaacaaaaaacaaaaaactacaacccccatgaagctttagtgcctttgaggggaggagtggcgcatgtttgttcacgcacgaaaaagaaattaaacctaactaccgttcccccagggcgccgctctgcaaattacccaatcagctctaagtacaaagcatcgcgagtctttagtgctctttggcgctataagcccgtgggaacgagcattggagacccttttcacaagatggcgccgaaagcgaagaaggaagctcctgcccctcctaaagctgaagccaaagcgaaggctttaaaggccaagaaggcagtgttgaaaggtgtccacagccacaaaaagaagaagatccgcacgtcacccaccttccggcggccgaagacactgcgactccggagacagcccaaatatcctcggaagagcgctcccaggagaaacaagcttgaccactatgctatcatcaagtttccgctgaccactgagtctgccatgaagaagatagaagacaacaacacacttgtgttcattgtggatgttaaagccaacaagcaccagattaaacaggctgtgaagaagctgtatgacattgatgtggccaaggtcaacaccctgattcggcctgatggagagaagaaggcatatgttcgactggctcctgattacgatgctttggatgttgccaacaaaattgggatcatctaaactgagtccagctgcctaattctgaatatatatatatatatatcttttcaccatatacatgcctgtctgtcaatttctggttgggctgggaggccacacacacacactgacatgacagggcttgggcaagactcctgttctacttatccttttgaaatacctcaccctgccactccaccatgtatgatcattccagagatctttgtgactagagttagtgtcctaggaaaaccagaactcagaacttgcctccatggttgagtaacaagctgtacaagaaccccttttatccctggaagaggctgtgtatgaaaccaatgcccagggtttgaagggtgttagcatccatttcaggggagtgtggattggctggctctctggtagcattttgtcctcacacacccatctactatgtccaaccggtctgtctgcttccctcaccccttgcccaataaaggacaaggacttcagaggaaaaaaaaaaaaaaaaaaaaaaaaaaaaaacaaaagaaaaaaaagaaaacaagggggcgcgcgcgcgccactaaaaagatctccccacagaggggccagccaaggttagacggcgtacccgagctagtctgttcacacacaaggggggccccaactagaagagaaccgcgcatatagtacagcgaagaggcagggcgcgcagagtacaaccagcacgccgctcgcacgcgcggagacacacactgcgtcgaccgccgctggggacacccacgtgtgtggagaagcgacaccacaaacgacagcggcgaggggcagggaacccaataatagctggcggccagacaacaccctcaccctcacacgaggaggtaagttaaaacggcacacctaaagagggcgaacaacaaataaaaaagcctagcacgacgcgcgtctactaacactggtgctgtgcacgaaacacacaccgccgacgacaaaactacgacctggcgaagccgagacaaaaaaaaatgcggcggacacccacagggacgttataatagcggaaagcagaaatactaaaccccgcaggggcagcgtggctactcaataaacggaggag

SEQ ID NO: 297053 - DNA, 443 bp, Homo sapiens
  misc_feature (18)..(18): n is a, c, g, or t
acccgtagcagcgcagcnacatcaaaagaagaagatccgcacgtcacccaccttccggcggccgaagacactgcgactccggagacagcccaaatatcctcggaagagcgctcccaggagaaacaagcttgaccactatgctatcatcaagtttccgctgaccactgagtctgccatgaagaagatagaagacaacaacacacttgtgttcattgtggatgttaaagccaacaagcaccagattaaacaggctgtgaagaagctgtatgacattgatgtggccaaggtcaacaccctgattcggcctgatggagagaagaaggcatatgttcgactggctcctgattacgatgctttggatgttgccaacaaaattgggatcatctaaactgagtccagctgcctaattctgaatatatatatatatatatcttttcaccata

SEQ ID NO: 297054 - DNA, 1728 bp, Homo sapiens
ccctcgtgactcgattatttatttatttatttatttatttattttgagacagggtctcactctgccacccaggctggaatggctcattgcagcctcgacctccagggctgaagcgatcctcccacctcagcctcccaaggaactgggactacaggcacgcaccaccacgcccggctaatttttgtattcttttgtagagacagggtttcgccgtgttgcccagggtggtctcgaactcctgggctcgaagcaattcgtccacctcggcctcacaaagtgctgggattacaggcgtgagtcaccgcgcccggccctgacttgatttttttctgccaccaaatcactgtgttattgataaaccacattcctctctggacctcagttcgaccgagcaaatcctgctccagcactctagaacttagctgtatctaactcccgagtcaatccaaatgtgttctttcctcttggcagcgttcctgcctcctggcatggcaatcctcttccctgagactggcagttgctcaagataggaagctcccgggaccagacccgagcgccagccggctacgccgtccgctggcctgagcaaataaacgcgtgtcttcaaaaaactacaatccccatggtggcacgcgcctgtagtcccagctactctggtggctgaggcaggagaatggcgtaaacccgggaggcggagcttacagtgagccgagatcgcgccactgcactccagcctgggcgacagagcgctcaaaaaaaaaacaaaaaacaaaaaacaaaaaactacaacccccatgaagctttagtgcctttgaggggaggagtggcgcatgtttgttcacgcacgaaaaagaaattaaacctaactaccgttcccccagggcgccgctctgcaaattacccaatcagctctaagtacaaagcatcgcgagtctttagtgctctttggcgctataagcccgtgggaacgagcattggagacccttttcacaagatggcgccgaaagcgaagaaggaagctcctgcccctcctaaagctgaagccaaagcgaaggctttaaaggccaagaaggcagtgttgaaaggtgtccacagccacaaaaagaagaagatccgcacgtcacccaccttccggcggccgaagacactgcgactccggagacagcccaaatatcctcggaagagcgctcccaggagaaacaagcttgaccactatgctatcatcaagtttccgctgaccactgagtctgccatgaagaagatagaagacaacaacacacttgtgttcattgtggatgttaaagccaacaagcaccagattaaacaggctgtgaagaagctgtatgacattgatgtggccaaggtcaacaccctgattcggcctgatggagagaagaaggcatatgttcgactggctcctgattacgatgctttggatgttgccaacaaaattgggatcatctaaactgagtccagctgcctaattctgaatatatatatatatatatcttttcaccataatcttttcaccataaaaaaaaaaaaaaaaaaaaaacgggggggtcaagggcggggggcgggaaaaagggggtaaggacaggggccagggggcaaagcgggtgcccggaccaagtttccgggtgcaagcgggggacaatgggcgggccccctataggggaggggaaataattccgaaagccggggtaccggatagatacgggcagaaac

SEQ ID NO: 297055 - DNA, 1576 bp, Homo sapiens
ccctcgtgactcgattatttatttatttatttatttatttattttgagacagggtctcactctgccacccaggctggaatggctcattgcagcctcgacctccagggctgaagcgatcctcccacctcagcctcccaaggaactgggactacaggcacgcaccaccacgcccggctaatttttgtattcttttgtagagacagggtttcgccgtgttgcccagggtggtctcgaactcctgggctcgaagcaattcgtccacctcggcctcacaaagtgctgggattacaggcgtgagtcaccgcgcccggccctgacttgatttttttctgccaccaaatcactgtgttattgataaaccacattcctctctggacctcagttcgaccgagcaaatcctgctccagcactctagaacttagctgtatctaactcccgagtcaatccaaatgtgttctttcctcttggcagcgttcctgcctcctggcatggcaatcctcttccctgagactggcagttgctcaagataggaagctcccgggaccagacccgagcgccagccggctacgccgtccgctggcctgagcaaataaacgcgtgtcttcaaaaaactacaatccccatggtggcacgcgcctgtagtcccagctactctggtggctgaggcaggagaatggcgtaaacccgggaggcggagcttacagtgagccgagatcgcgccactgcactccagcctgggcgacagagcgctcaaaaaaaaaacaaaaaacaaaaaacaaaaaactacaacccccatgaagctttagtgcctttgaggggaggagtggcgcatgtttgttcacgcacgaaaaagaaattaaacctaactaccgttcccccagggcgccgctctgcaaattacccaatcagctctaagtacaaagcatcgcgagtctttagtgctctttggcgctataagcccgtgggaacgagcattggagacccttttcacaagatggcgccgaaagcgaagaaggaagctcctgcccctcctaaagctgaagccaaagcgaaggctttaaaggccaagaaggcagtgttgaaaggtgtccacagccacaaaaagaagaagatccgcacgtcacccaccttccggcggccgaagacactgcgactccggagacagcccaaatatcctcggaagagcgctcccaggagaaacaagcttgaccactatgctatcatcaagtttccgctgaccactgagtctgccatgaagaagatagaagacaacaacacacttgtgttcattgtggatgttaaagccaacaagcaccagattaaacaggctgtgaagaagctgtatgacattgatgtggccaaggtcaacaccctgattcggcctgatggagagaagaaggcatatgttcgactggctcctgattacgatgctttggatgttgccaacaaaattgggatcatctaaactgagtccagctgcctaattctgaatatatatatatatatatcttttcaccataaaacaagacacatgtagggctgatttgcccaataagccctttaaagaaattcttgt

SEQ ID NO: 297056 - DNA, 1557 bp, Homo sapiens
ccctcgtgactcgattatttatttatttatttatttatttattttgagacagggtctcactctgccacccaggctggaatggctcattgcagcctcgacctccagggctgaagcgatcctcccacctcagcctcccaaggaactgggactacaggcacgcaccaccacgcccggctaatttttgtattcttttgtagagacagggtttcgccgtgttgcccagggtggtctcgaactcctgggctcgaagcaattcgtccacctcggcctcacaaagtgctgggattacaggcgtgagtcaccgcgcccggccctgacttgatttttttctgccaccaaatcactgtgttattgataaaccacattcctctctggacctcagttcgaccgagcaaatcctgctccagcactctagaacttagctgtatctaactcccgagtcaatccaaatgtgttctttcctcttggcagcgttcctgcctcctggcatggcaatcctcttccctgagactggcagttgctcaagataggaagctcccgggaccagacccgagcgccagccggctacgccgtccgctggcctgagcaaataaacgcgtgtcttcaaaaaactacaatccccatggtggcacgcgcctgtagtcccagctactctggtggctgaggcaggagaatggcgtaaacccgggaggcggagcttacagtgagccgagatcgcgccactgcactccagcctgggcgacagagcgctcaaaaaaaaaacaaaaaacaaaaaacaaaaaactacaacccccatgaagctttagtgcctttgaggggaggagtggcgcatgtttgttcacgcacgaaaaagaaattaaacctaactaccgttcccccagggcgccgctctgcaaattacccaatcagctctaagtacaaagcatcgcgagtctttagtgctctttggcgctataagcccgtgggaacgagcattggagacccttttcacaagatggcgccgaaagcgaagaaggaagctcctgcccctcctaaagctgaagccaaagcgaaggctttaaaggccaagaaggcagtgttgaaaggtgtccacagccacaaaaagaagaagatccgcacgtcacccaccttccggcggccgaagacactgcgactccggagacagcccaaatatcctcggaagagcgctcccaggagaaacaagcttgaccactatgctatcatcaagtttccgctgaccactgagtctgccatgaagaagatagaagacaacaacacacttgtgttcattgtggatgttaaagccaacaagcaccagattaaacaggctgtgaagaagctgtatgacattgatgtggccaaggtcaacaccctgattcggcctgatggagagaagaaggcatatgttcgactggctcctgattacgatgctttggatgttgccaacaaaattgggatcatctaaactgagtccagctgcctaattctgaatatatatatatatatatcttttcaccatacaagcaaattagtataagttcacaattccttgtcgcc

SEQ ID NO: 297057 - DNA, 1911 bp, Homo sapiens
ccctcgtgactcgattatttatttatttatttatttatttattttgagacagggtctcactctgccacccaggctggaatggctcattgcagcctcgacctccagggctgaagcgatcctcccacctcagcctcccaaggaactgggactacaggcacgcaccaccacgcccggctaatttttgtattcttttgtagagacagggtttcgccgtgttgcccagggtggtctcgaactcctgggctcgaagcaattcgtccacctcggcctcacaaagtgctgggattacaggcgtgagtcaccgcgcccggccctgacttgatttttttctgccaccaaatcactgtgttattgataaaccacattcctctctggacctcagttcgaccgagcaaatcctgctccagcactctagaacttagctgtatctaactcccgagtcaatccaaatgtgttctttcctcttggcagcgttcctgcctcctggcatggcaatcctcttccctgagactggcagttgctcaagataggaagctcccgggaccagacccgagcgccagccggctacgccgtccgctggcctgagcaaataaacgcgtgtcttcaaaaaactacaatccccatggtggcacgcgcctgtagtcccagctactctggtggctgaggcaggagaatggcgtaaacccgggaggcggagcttacagtgagccgagatcgcgccactgcactccagcctgggcgacagagcgctcaaaaaaaaaacaaaaaacaaaaaacaaaaaactacaacccccatgaagctttagtgcctttgaggggaggagtggcgcatgtttgttcacgcacgaaaaagaaattaaacctaactaccgttcccccagggcgccgctctgcaaattacccaatcagctctaagtacaaagcatcgcgagtctttagtgctctttggcgctataagcccgtgggaacgagcattggagacccttttcacaagatggcgccgaaagcgaagaaggaagctcctgcccctcctaaagctgaagccaaagcgaaggctttaaaggccaagaaggcagtgttgaaaggtgtccacagccacaaaaagaagaagatccgcacgtcacccaccttccggcggccgaagacactgcgactccggagacagcccaaatatcctcggaagagcgctcccaggagaaacaagcttgaccactatgctatcatcaagtttccgctgaccactgagtctgccatgaagaagatagaagacaacaacacacttgtgttcattgtggatgttaaagccaacaagcaccagattaaacaggctgtgaagaagctgtatgacattgatgtggccaaggtcaacaccctgattcggcctgatggagagaagaaggcatatgttcgactggctcctgattacgatgctttggatgttgccaactatatcttttcaccatatacatgcctgtctgtcaatttctggttgggctgggaggccacacacacacactgacatgacagggcttgggcaagactcctgttctacttatccttttgaaatacctcaccctgccactccaccatgtatgatcattccagagatctttgtgactagagttagtgtcctaggaaaaccagaactcagaacttgcctccatggttgagtaacaagctgtacaagaaccccttttatccctggaagaggctgtgtatgaaaccaatgcccagggtttgaagggtgttagcatccatttcaggggagtgtggattggctggctctctggtagcattttgtcctcacacacccatctactatgtccaaccggtctgtctgcttccctcaccccttgcccaataaaggacaaggacttcagaggaaaaaaaggggggcgacaccaagagccg

SEQ ID NO: 297058 - DNA, 1424 bp, Homo sapiens
  misc_feature (1389)..(1389): n is a, c, g, or t
ccctcgtgactcgattatttatttatttatttatttatttattttgagacagggtctcactctgccacccaggctggaatggctcattgcagcctcgacctccagggctgaagcgatcctcccacctcagcctcccaaggaactgggactacaggcacgcaccaccacgcccggctaatttttgtattcttttgtagagacagggtttcgccgtgttgcccagggtggtctcgaactcctgggctcgaagcaattcgtccacctcggcctcacaaagtgctgggattacaggcgtgagtcaccgcgcccggccctgacttgatttttttctgccaccaaatcactgtgttattgataaaccacattcctctctggacctcagttcgaccgagcaaatcctgctccagcactctagaacttagctgtatctaactcccgagtcaatccaaatgtgttctttcctcttggcagcgttcctgcctcctggcatggcaatcctcttccctgagactggcagttgctcaagataggaagctcccgggaccagacccgagcgccagccggctacgccgtccgctggcctgagcaaataaacgcgtgtcttcaaaaaactacaatccccatggtggcacgcgcctgtagtcccagctactctggtggctgaggcaggagaatggcgtaaacccgggaggcggagcttacagtgagccgagatcgcgccactgcactccagcctgggcgacagagcgctcaaaaaaaaaacaaaaaacaaaaaacaaaaaactacaacccccatgaagctttagtgcctttgaggggaggagtggcgcatgtttgttcacgcacgaaaaagaaattaaacctaactaccgttcccccagggcgccgctctgcaaattacccaatcagctctaagtacaaagcatcgcgagtctttagtgctctttggcgctataagcccgtgggaacgagcattggagacccttttcacaagatggcgccgaaagcgaagaaggaagctcctgcccctcctaaagctgaagccaaagcgaaggctttaaaggccaagaaggcagtgttgaaaggtgtccacagccacaaaaagaagaagatccgcacgtcacccaccttccggcggccgaagacactgcgactccggagacagcccaaatatcctcggaagagcgctcccaggagaaacaagcttgaccactatgctatcatcaagtttccgctgaccactgagtctgccatgaagaagatagaagacaacaacacacttgtgttcattgtggatgttaaagccaacaagcaccagattaaacaggctgtgaagaagctgtatgacattgatgtggccaaggtcaacaccctgattcggcctgatgnagagggagcagcagaggatcctctagatcacccag

SEQ ID NO: 297059 - DNA, 1596 bp, Homo sapiens
ccctcgtgactcgattatttatttatttatttatttatttattttgagacagggtctcactctgccacccaggctggaatggctcattgcagcctcgacctccagggctgaagcgatcctcccacctcagcctcccaaggaactgggactacaggcacgcaccaccacgcccggctaatttttgtattcttttgtagagacagggtttcgccgtgttgcccagggtggtctcgaactcctgggctcgaagcaattcgtccacctcggcctcacaaagtgctgggattacaggcgtgagtcaccgcgcccggccctgacttgatttttttctgccaccaaatcactgtgttattgataaaccacattcctctctggacctcagttcgaccgagcaaatcctgctccagcactctagaacttagctgtatctaactcccgagtcaatccaaatgtgttctttcctcttggcagcgttcctgcctcctggcatggcaatcctcttccctgagactggcagttgctcaagataggaagctcccgggaccagacccgagcgccagccggctacgccgtccgctggcctgagcaaataaacgcgtgtcttcaaaaaactacaatccccatggtggcacgcgcctgtagtcccagctactctggtggctgaggcaggagaatggcgtaaacccgggaggcggagcttacagtgagccgagatcgcgccactgcactccagcctgggcgacagagcgctcaaaaaaaaaacaaaaaacaaaaaacaaaaaactacaacccccatgaagctttagtgcctttgaggggaggagtggcgcatgtttgttcacgcacgaaaaagaaattaaacctaactaccgttcccccagggcgccgctctgcaaattacccaatcagctctaagtacaaagcatcgcgagtctttagtgctctttggcgctataagcccgtgggaacgagcattggagacccttttcacaagatggcgccgaaagcgaagaaggaagctcctgcccctcctaaagctgaagccaaagcgaaggctttaaaggccaagaaggcagtgttgaaaggtgtccacagccacaaaaagaagaagatccgcacgtcacccaccttccggcggccgaagacactgcgactccggagacagcccaaatatcctcggaagagcgctcccaggagaaacaagcttgaccactatgctatcatcaagtttccgctgaccactgagtctgccatgaagaagatagaagacaacaacacacttgtgttcattgtggatgttaaagccaacaagcaccagattaaacaggctgtgaagaagctgtatgacattgatgtggccaaggtcaacaccctgattcggtgagttgggcctcaagggatggggagcaggctggaccagcagtctggagccaaaaaaacctgcattccatgaagctttttgatgtttaggtagtcctggtaatgcaggactacacgtgtagtccgagctatgcaggaggatctcttgaggccaggaatcacccatgattgccccattgtactccagcctgagcaaccaagcaaggccctttttaa

SEQ ID NO: 297060 - DNA, 2090 bp, Homo sapiens
  misc_feature (4)..(4): n is a, c, g, or t
  misc_feature (6)..(6): n is a, c, g, or t
gggngngagggccggcctggacccggcgggcgcacggctccgagcccagcgcagccgagccggtctgcagaggggcccccagaactttgtgtgtgtgtgtgcacgcgcgcgcgtgtgtgcccaggtgcgagggttcgcgcgtgtgctggcggggagggaaccgacccgaaagagagccccacgctggcaaagtggctcgcccatctcacagccggttggcgctcgcggagctctttattttccatgtgtgagcctgtgcctgtggtttatctctggaggatgtgcctgagggaggagacatatactgcctggactgcctggctgatgtgagctagtttgtctggttgagttggatgtttaaatagaaggcagaacaacaacaggtactccacatcagcattctcaagactggagaagttaggcctcagacatcccaagccttctcctttcattggaaacttgacatttttccgccagggtttttgggaaagccaaatggagctcagaaagctgtatggacctctgtgtgggtactatcttggtcgtcggatgtttattgttatttctgagccagacatgatcaagcaggtgttggttgagaacttcagtaactttaccaacagaatggcgtcgggtttggagttcaagtcggtagccgacagcgttctgtttttacgtgacaaaagatgggaagaggtcagaggtgccctgatgtctgctttcagtcctgaaaagctgaacgagatggttcccctcatcagccaagcctgcgaccttctcctggctcatttaaaacgctatgcggaatctggggacgcatttgacatccagaggtgctactgcaattacaccacagatgtggttgccagcgtcgcctttggcaccccggtggactcctggcaggcccctgaggatccctttgtgaaacactgcaagcgtttcttcgaattctgcatccccagacctatcctggttttactcttatcatttccatccataatggtcccactggcccggattttgcccaataagaaccgagacgaactgaatggcttttttaacaaactcattaggaatgtgattgccttgcgggaccagcaagctgccgaagagaggcggagagacttcctccaaatggtcctggatgcccgacattctgcaagtcccatgggcgtgcaagactttgacatcgtcagagacgttttctcctctactgggtgcaagccgaacccttcccggcaacaccagcccagccctatggccaggcctttgactgtggatgagattgtgggccaggccttcatcttcctcatcgctggctatgaaatcatcaccaacacactttcttttgccacctacctactggccaccaaccctgactgccaagagaagcttctgagagaggtagacgtttttaaggagaaacacatggcccctgagttctgcagcctcgaggaaggcctgccctatctggacatggtgattgcagagacgctgaggatgtacccgccagctttcagattcacacgggaggcagctcaggactgcgaggtgctggggcagcgcatccccgcaggcgctgtgctagagatggccgtgggtgccctgcaccatgaccctgagcactggccaagcccggagaccttcaaccctgaaaggttcacggctgaggcccggcagcagcaccggcccttcacgtacctgcccttcggggccggcccacggagctgcctcggggtgcgtctagggctgcttgaggtcaagttgacactgctccacgtgctgcacaagttccggttccaagcctgccctgagacccaggtaccgctgcagctagaatccaaatctgccctaggtccaaaaaatggtgtctatatcaagatcgtatcccgctgacacagaaggctgccgggtggggggagggcacccccaaattcaaagaaaaccctaagtgtggatgttcagaattttggaaaaatgtcactgaagtgattgaaagagtgcctggcatgcaaggataagaggttctttacataacatttcctaaatgcttaataaacgtttgttgcacttggttttgacattgccaa

SEQ ID NO: 297061 - DNA, 736 bp, Homo sapiens
  misc_feature (4)..(4): n is a, c, g, or t
  misc_feature (6)..(6): n is a, c, g, or t
gggngngagggccggcctggacccggcgggcgcacggctccgagcccagcgcagccgagccggtctgcagaggggcccccagaactttgtgtgtgtgtgtgcacgcgcgcgcgtgtgtgcccaggtgcgagggttcgcgcgtgtgctggcggggagggaaccgacccgaaagagagccccacgctggcaaagtggctcgcccatctcacagccggttggcgctcgcggaggctcacagaacatttcctgcctgttgctcacactctgttgtccacagcatacccgcaccctagatggctgactcttgtcttctgtctctttattttccatgtgtgagcctgtgcctgtggtttatctctggaggatgtgcctgagggaggagacatatactgcctggactgcctggctgatgtgagctagtttgtctggttgagttggatgtttaaatagaaggcagaacaacaacagaagctttgaggaagagccataactacctggagcagaatgattatttggagccacagaaaatcattttagggagcagtgggtccaggttcagtgttgtgtgttcaactcggaaagaacacagttgggtggctgaccgggttacttctcccctgtggctctgcttgcattggtcattgaggtcaggcaggggtttggccacagtgttagccattggccctgcattgatcctcacatagtaacatcttgtttggttattaaagtgactgaa

SEQ ID NO: 297062 - DNA, 537 bp, Homo sapiens
  misc_feature (4)..(4): n is a, c, g, or t
  misc_feature (6)..(6): n is a, c, g, or t
gggngngagggccggcctggacccggcgggcgcacggctccgagcccagcgcagccgagccggtctgcagaggggcccccagaactttgtgtgtgctggcggggagggaaccgacccgaaagagagccccacgctggcaaagtggctcgcccatctcacagccggttggcgctcgcggaggagacatatactgcctggactgcctggctgatgtgagctagtttgtctggttgagttggatgtttaaatagaaggcagaacaacaacagaagctttgaggaagagccataactacctggagcagaatgattatttggagccacagaaaatcattttagggagcagtgggtccaggttcagtgttgtgtgttcaactcggaaagaacacagttgggtggctgaccgggttacttctcccctgtggctctgcttgcattggtcattgaggtcaggcaggggtttggccacagtgttagccattggccctgcattgatcctcacatagtaacatcttgtttggttattaaagtgactgaa

SEQ ID NO: 297063 - DNA, 452 bp, Homo sapiens
ggctcgcggagaataaaggagcgtggggtgggcgcggaaagaaatgggaaggggcgcggggcggagagcgaagtggaaaggaggtgctccgaaaggagacatatactgcctggactgcctggctgatgtgagctagtttgtctggttgagttggatgtttaaatagaaggcagaacaacaacagaagctttgaggaagagccataactacctggagcagaatgattatttggagccacagaaaatcattttagggagcagtgggtccaggttcagtgttgtgtgttcaactcggaaagaacacagttgggtggctgaccgggttacttctcccctgtggctctgcttgcattggtcattgaggtcaggcaggggtttggccacagtgttagccattggccctgcattgatcctcacatagtaacatcttgtttggttattaaagtgactgaa

SEQ ID NO: 297064 - DNA, 2034 bp, Homo sapiens
aaggaataaagttgctgattcattcctttacactgaaaccctttgttgtgccctcctcttccttcctctttatagggagacactctgagaaagagcacattgtgggggcccactccatgtgatgtttgcttggttgcctgttcccttttctacctgcagagcacggttcccataagggcggcgagatcagcctcctgtctcatctggaagaccaccactctggggtctcagaggaatgatggaagccttggggtttctaaaattggaagtgaatggccccatggtgacggtggccctgtcagtggctctcttggccctcctgaaatggtactccacatcagcattctcaagactggagaagttaggcctcagacatcccaagccttctcctttcattggaaacttgacatttttccgccagggtttttgggaaagccaaatggagctcagaaagctgtatggacctctgtgtgggtactatcttggtcgtcggatgtttattgttatttctgagccagacatgatcaagcaggtgttggttgagaacttcagtaactttaccaacagaatggcgtcgggtttggagttcaagtcggtagccgacagcgttctgtttttacgtgacaaaagatgggaagaggtcagaggtgccctgatgtctgctttcagtcctgaaaagctgaacgagatggttcccctcatcagccaagcctgcgaccttctcctggctcatttaaaacgctatgcggaatctggggacgcatttgacatccagaggtgctactgcaattacaccacagatgtggttgccagcgtcgcctttggcaccccggtggactcctggcaggcccctgaggatccctttgtgaaacactgcaagcgtttcttcgaattctgcatccccagacctatcctggttttactcttatcatttccatccataatggtcccactggcccggattttgcccaataagaaccgagacgaactgaatggcttttttaacaaactcattaggaatgtgattgccttgcgggaccagcaagctgccgaagagaggcggagagacttcctccaaatggtcctggatgcccgacattctgcaagtcccatgggcgtgcaagactttgacatcgtcagagacgttttctcctctactgggtgcaagccgaacccttcccggcaacaccagcccagccctatggccaggcctttgactgtggatgagattgtgggccaggccttcatcttcctcatcgctggctatgaaatcatcaccaacacactttcttttgccacctacctactggccaccaaccctgactgccaagagaagcttctgagagaggtagacgtttttaaggagaaacacatggcccctgagttctgcagcctcgaggaaggcctgccctatctggacatggtgattgcagagacgctgaggatgtacccgccagctttcagattcacacgggaggcagctcaggactgcgaggtgctggggcagcgcatccccgcaggcgctgtgctagagatggccgtgggtgccctgcaccatgaccctgagcactggccaagcccggagaccttcaaccctgaaaggttcacggctgaggcccggcagcagcaccggcccttcacgtacctgcccttcggggccggcccacggagctgcctcggggtgcgtctagggctgcttgaggtcaagttgacactgctccacgtgctgcacaagttccggttccaagcctgccctgagacccaggtaccgctgcagctagaatccaaatctgccctaggtccaaaaaatggtgtctatatcaagatcgtatcccgctgacacagaaggctgccgggtggggggagggcacccccaaattcaaagaaaaccctaagtgtggatgttcagaattttggaaaaatgtcactgaagtgattgaaagagtgcctggcatgcaaggataagaggttctttacataacatttcctaaatgcttaataaacgtttgttgcacttggttttgacattgccaa

SEQ ID NO: 297065 - DNA, 1970 bp, Homo sapiens
tggcatcctggtcctctcacatggctccttaaaattggctgtggcttgttttttgtgatgtttgcttggttgcctgttcccttttctacctgcagagcacggttcccataagggcggcgagatcagcctcctgtctcatctggaagaccaccactctggggtctcagaggaatgatggaagccttggggtttctaaaattggaagtgaatggccccatggtgacggtggccctgtcagtggctctcttggccctcctgaaatggtactccacatcagcattctcaagactggagaagttaggcctcagacatcccaagccttctcctttcattggaaacttgacatttttccgccagggtttttgggaaagccaaatggagctcagaaagctgtatggacctctgtgtgggtactatcttggtcgtcggatgtttattgttatttctgagccagacatgatcaagcaggtgttggttgagaacttcagtaactttaccaacagaatggcgtcgggtttggagttcaagtcggtagccgacagcgttctgtttttacgtgacaaaagatgggaagaggtcagaggtgccctgatgtctgctttcagtcctgaaaagctgaacgagatggttcccctcatcagccaagcctgcgaccttctcctggctcatttaaaacgctatgcggaatctggggacgcatttgacatccagaggtgctactgcaattacaccacagatgtggttgccagcgtcgcctttggcaccccggtggactcctggcaggcccctgaggatccctttgtgaaacactgcaagcgtttcttcgaattctgcatccccagacctatcctggttttactcttatcatttccatccataatggtcccactggcccggattttgcccaataagaaccgagacgaactgaatggcttttttaacaaactcattaggaatgtgattgccttgcgggaccagcaagctgccgaagagaggcggagagacttcctccaaatggtcctggatgcccgacattctgcaagtcccatgggcgtgcaagactttgacatcgtcagagacgttttctcctctactgggtgcaagccgaacccttcccggcaacaccagcccagccctatggccaggcctttgactgtggatgagattgtgggccaggccttcatcttcctcatcgctggctatgaaatcatcaccaacacactttcttttgccacctacctactggccaccaaccctgactgccaagagaagcttctgagagaggtagacgtttttaaggagaaacacatggcccctgagttctgcagcctcgaggaaggcctgccctatctggacatggtgattgcagagacgctgaggatgtacccgccagctttcagattcacacgggaggcagctcaggactgcgaggtgctggggcagcgcatccccgcaggcgctgtgctagagatggccgtgggtgccctgcaccatgaccctgagcactggccaagcccggagaccttcaaccctgaaaggttcacggctgaggcccggcagcagcaccggcccttcacgtacctgcccttcggggccggcccacggagctgcctcggggtgcgtctagggctgcttgaggtcaagttgacactgctccacgtgctgcacaagttccggttccaagcctgccctgagacccaggtaccgctgcagctagaatccaaatctgccctaggtccaaaaaatggtgtctatatcaagatcgtatcccgctgacacagaaggctgccgggtggggggagggcacccccaaattcaaagaaaaccctaagtgtggatgttcagaattttggaaaaatgtcactgaagtgattgaaagagtgcctggcatgcaaggataagaggttctttacataacatttcctaaatgcttaataaacgtttgttgcacttggttttgacattgccaa

SEQ ID NO: 297066 - DNA, 2404 bp, Homo sapiens
aaggaataaagttgctgattcattcctttacactgaaaccctttgttgtgccctcctcttccttcctctttatagggagacactctgagaaagagcacattgtgggggcccactccatgtgatgtttgcttggttgcctgttcccttttctacctgcagagcacggttcccataagggcggcgagatcagcctcctgtctcatctggaagaccaccactctggggtctcagaggaatgatggaagccttggggtttctaaaattggaagtgaatggccccatggtgacggtggccctgtcagtggctctcttggccctcctgaaatggtactccacatcagcattctcaagactggagaagttaggcctcagacatcccaagccttctcctttcattggaaacttgacatttttccgccagggtttttgggaaagccaaatggagctcagaaagctgtatggacctctgtgtgggtactatcttggtcgtcggatgtttattgttatttctgagccagacatgatcaagcaggtgttggttgagaacttcagtaactttaccaacagaatggcgtcgggtttggagttcaagtcggtagccgacagcgttctgtttttacgtgacaaaagatgggaagaggtcagaggtgccctgatgtctgctttcagtcctgaaaagctgaacgagatggttcccctcatcagccaagcctgcgaccttctcctggctcatttaaaacgctatgcggaatctggggacgcatttgacatccagaggtgctactgcaattacaccacagatgtggttgccagcgtcgcctttggcaccccggtggactcctggcaggcccctgaggatccctttgtgaaacactgcaagcgtttcttcgaattctgcatccccagacctatcctggttttactcttatcatttccatccataatggtcccactggcccggattttgcccaataagaaccgagacgaactgaatggcttttttaacaaactcattaggaatgtgattgccttgcgggaccagcaagctgccgaagagaggcggagagacttcctccaaatggtcctggatgcccgacattctgcaagtcccatgggcgtgcaagactttgacatcgtcagagacgttttctcctctactgggtgcaagccgaacccttcccggcaacaccagcccagccctatggccaggcctttgactgtggatgagattgtgggccaggccttcatcttcctcatcgctggctatgaaatcatcaccaacacactttcttttgccacctacctactggccaccaaccctgactgccaagagaagcttctgagagaggtagacgtttttaaggagaaacacatggcccctgagttctgcagcctcgaggaaggcctgccctatctggacatggtgattgcagagacgctgaggatgtacccgccagctttcagattcacacgggaggcagctcaggactgcgaggtgctggggcagcgcatccccgcaggcgctgtgctagagatggccgtgggtgccctgcaccatgaccctgagcactggccaagcccggagaccttcaaccctgaaaggttcacggctgaggcccggcagcagcaccggcccttcacgtacctgcccttcggggccggcccacggagctgcctcggggtgcgtctagggctgcttgaggtcaagttgacactgctccacgtgctgcacaagttccggttccaagcctgccctgagacccaggtaccgctgcagctagaatccaaatctgccctaggtccaaaaaatggtgtctatatcaagatcgtatcccgctgacacagaaggctgccgggtggggggagggcacccccaaattcaaagaaaaccctaagtgtggatgttcagaattttggaaaaatgtcactgaagtgattgaaagagtgcctggcatgcaaggataagaggttctttacataacatttcctaaatgcttaataaacgtttgttgcacttggttttgacattgccaaaaaaaaaaaaaaaaaaaaaaaaaaaaaaaaaaaaaaaaaaaaaaaaaaaaaaaaaaaaaaaaaaaaaaaaacaaaaaaaaaaaaaaaaaataaaaaaaaaaaaaattttattttttttttatatttataaaaaaaatattttaaacattttcttctttaaaaaattttaaaaatttatatgtttcggcgcctttccccctttttttttttacaactcactttttttccgccggcctaaaatatgggcactttcggcataccccctctttggcggatgaataacctttcggggcccgtttttaaaacagtgggggcgaacgtgattctaaaggagtgtcccctcctaaaccctctcaaacatattccccaa

SEQ ID NO: 297067 - DNA, 2077 bp, Homo sapiens
aaggaataaagttgctgattcattcctttacactgaaaccctttgttgtgccctcctcttccttcctctttatagggagacactctgagaaagagcacattgtgggggcccactccatgtgatgtttgcttggttgcctgttcccttttctacctgcagagcacggttcccataagggcggcgagatcagcctcctgtctcatctggaagaccaccactctggggtctcagaggaatgatggaagccttggggtttctaaaattggaagtgaatggccccatggtgacggtggccctgtcagtggctctcttggccctcctgaaatggtactccacatcagcattctcaagactggagaagttaggcctcagacatcccaagccttctcctttcattggaaacttgacatttttccgccagggtttttgggaaagccaaatggagctcagaaagctgtatggacctctgtgtgggtactatcttggtcgtcggatgtttattgttatttctgagccagacatgatcaagcaggtgttggttgagaacttcagtaactttaccaacagaatggcgtcgggtttggagttcaagtcggtagccgacagcgttctgtttttacgtgacaaaagatgggaagaggtcagaggtgccctgatgtctgctttcagtcctgaaaagctgaacgagatggttcccctcatcagccaagcctgcgaccttctcctggctcatttaaaacgctatgcggaatctggggacgcatttgacatccagaggtgctactgcaattacaccacagatgtggttgccagcgtcgcctttggcaccccggtggactcctggcaggcccctgaggatccctttgtgaaacactgcaagcgtttcttcgaattctgcatccccagacctatcctggttttactcttatcatttccatccataatggtcccactggcccggattttgcccaataagaaccgagacgaactgaatggcttttttaacaaactcattaggaatgtgattgccttgcgggaccagcaagctgccgaagagaggcggagagacttcctccaaatggtcctggatgcccgacattctgcaagtcccatgggcgtgcaagactttgacatcgtcagagacgttttctcctctactgggtgcaagccgaacccttcccggcaacaccagcccagccctatggccaggcctttgactgtggatgagattgtgggccaggccttcatcttcctcatcgctggctatgaaatcatcaccaacacactttcttttgccacctacctactggccaccaaccctgactgccaagagaagcttctgagagaggtagacgtttttaaggagaaacacatggcccctgagttctgcagcctcgaggaaggcctgccctatctggacatggtgattgcagagacgctgaggatgtacccgccagctttcagattcacacgggaggcagctcaggactgcgaggtgctggggcagcgcatccccgcaggcgctgtgctagagatggccgtgggtgccctgcaccatgaccctgagcactggccaagcccggagaccttcaaccctgaaaggttcacggctgaggcccggcagcagcaccggcccttcacgtacctgcccttcggggccggcccacggagctgcctcggggtgcgtctagggctgcttgaggtcaagttgacactgctccacgtgctgcacaagttccggttccaagcctgccctgagacccaggtaccgctgcagctagaatccaaatctgccctaggtccaaaaaatggtgtctatatcaagatcgtatcccgctgacacagaaggctgccgggtggggggagggcacccccaaattcaaagaaaaccctaagtgtggatgttcagaattttggaaaaatgtcactgaagtgattgaaagagtgcctggcatgcaaggataagaggttctttacataacatttcctaaatgcttaataaacgtttgttgcacttggttttgacattgccaaattgccaatggggtttgaaccagtgctctctctaaatgaagaa

SEQ ID NO: 297068 - DNA, 1871 bp, Homo sapiens
aaggaataaagttgctgattcattcctttacactgaaaccctttgttgtgccctcctcttccttcctctttatagggagacactctgagaaagagcacattgtgggggcccactccatgtgatgtttgcttggttgcctgttcccttttctacctgcagagcacggttcccataagggcggcgagatcagcctcctgtctcatctggaagaccaccactctggggtctcagaggaatgatggaagccttggggtttctaaaattggaagtgaatggccccatggtgacggtggccctgtcagtggctctcttggccctcctgaaatggtactccacatcagcattctcaagactggagaagttaggcctcagacatcccaagccttctcctttcattggaaacttgacatttttccgccagggtttttgggaaagccaaatggagctcagaaagctgtatggacctctgtgtgggtactatcttggtcgtcggatgtttattgttatttctgagccagacatgatcaagcaggtgttggttgagaacttcagtaactttaccaacagaatggcgtcgggtttggagttcaagtcggtagccgacagcgttctgtttttacgtgacaaaagatgggaagaggtcagaggtgccctgatgtctgctttcagtcctgaaaagctgaacgagatggttcccctcatcagccaagcctgcgaccttctcctggctcatttaaaacgctatgcggaatctggggacgcatttgacatccagaggtgctactgcaattacaccacagatgtggttgccagcgtcgcctttggcaccccggtggactcctggcaggcccctgaggatccctttgtgaaacactgcaagcgtttcttcgaattctgcatccccagacctatcctggttttactcttatcatttccatccataatggtcccactggcccggattttgcccaataagaaccgagacgaactgaatggcttttttaacaaactcattaggaatgtgattgccttgcgggaccagcaagctgccgaagagaggcggagagacttcctccaaatggtcctggatgcccgacattctgcaagtcccatgggcgtgcaagactttgacatcgtcagagacgttttctcctctactgggtgcaagccgaacccttcccggcaacaccagcccagccctatggccaggcctttgactgtggatgagattgtgggccaggccttcatcttcctcatcgctggctatgaaatcatcaccaacacactttcttttgccacctacctactggccaccaaccctgactgccaagagaagcttctgagagaggtagacgtttttaaggagaaacacatggcccctgagttctgcagcctcgaggaaggcctgccctatctggacatggtgattgcagagacgctgaggatgtacccgccagctttcagattcacacgggaggcagctcaggactgcgaggtgctggggcagcgcatccccgcaggcgctgtgctagagatggccgtgggtgccctgcaccatgaccctgagcactggccaagcccggagaccttcaaccctgaaaggtaccgctgcagctagaatccaaatctgccctaggtccaaaaaatggtgtctatatcaagatcgtatcccgctgacacagaaggctgccgggtggggggagggcacccccaaattcaaagaaaaccctaagtgtggatgttcagaattttggaaaaatgtcactgaagtgattgaaagagtgcctggcatgcaaggataagaggttctttacataacatttcctaaatgcttaataaacgtttgttgcacttggttttgacattgccaa

SEQ ID NO: 297069 - DNA, 1914 bp, Homo sapiens
aaggaataaagttgctgattcattcctttacactgaaaccctttgttgtgccctcctcttccttcctctttatagggagacactctgagaaagagcacattgtgggggcccactccatgtgatgtttgcttggttgcctgttcccttttctacctgcagagcacggttcccataagggcggcgagatcagcctcctgtctcatctggaagaccaccactctggggtctcagaggaatgatggaagccttggggtttctaaaattggaagtgaatggccccatggtgacggtggccctgtcagtggctctcttggccctcctgaaatggtactccacatcagcattctcaagactggagaagttaggcctcagacatcccaagccttctcctttcattggaaacttgacatttttccgccagggtttttgggaaagccaaatggagctcagaaagctgtatggacctctgtgtgggtactatcttggtcgtcggatgtttattgttatttctgagccagacatgatcaagcaggtgttggttgagaacttcagtaactttaccaacagaatggcgtcgggtttggagttcaagtcggtagccgacagcgttctgtttttacgtgacaaaagatgggaagaggtcagaggtgccctgatgtctgctttcagtcctgaaaagctgaacgagatggttcccctcatcagccaagcctgcgaccttctcctggctcatttaaaacgctatgcggaatctggggacgcatttgacatccagaggtgctactgcaattacaccacagatgtggttgccagcgtcgcctttggcaccccggtggactcctggcaggcccctgaggatccctttgtgaaacactgcaagcgtttcttcgaattctgcatccccagacctatcctggttttactcttatcatttccatccataatggtcccactggcccggattttgcccaataagaaccgagacgaactgaatggcttttttaacaaactcattaggaatgtgattgccttgcgggaccagcaagctgccgaagagaggcggagagacttcctccaaatggtcctggatgcccgacattctgcaagtcccatgggcgtgcaagactttgacatcgtcagagacgttttctcctctactgggtgcaagccgaacccttcccggcaacaccagcccagccctatggccaggcctttgactgtggatgagattgtgggccaggccttcatcttcctcatcgctggctatgaaatcatcaccaacacactttcttttgccacctacctactggccaccaaccctgactgccaagagaagcttctgagagaggtagacgtttttaaggagaaacacatggcccctgagttctgcagcctcgaggaaggcctgccctatctggacatggtgattgcagagacgctgaggatgtacccgccagctttcagattcacacgggaggcagctcaggactgcgaggtgctggggcagcgcatccccgcaggcgctgtgctagagatggccgtgggtgccctgcaccatgaccctgagcactggccaagcccggagaccttcaaccctgaaaggtaccgctgcagctagaatccaaatctgccctaggtccaaaaaatggtgtctatatcaagatcgtatcccgctgacacagaaggctgccgggtggggggagggcacccccaaattcaaagaaaaccctaagtgtggatgttcagaattttggaaaaatgtcactgaagtgattgaaagagtgcctggcatgcaaggataagaggttctttacataacatttcctaaatgcttaataaacgtttgttgcacttggttttgacattgccaaattgccaatggggtttgaaccagtgctctctctaaatgaagaa

SEQ ID NO: 297070 - DNA, 1807 bp, Homo sapiens
tggcatcctggtcctctcacatggctccttaaaattggctgtggcttgttttttgtgatgtttgcttggttgcctgttcccttttctacctgcagagcacggttcccataagggcggcgagatcagcctcctgtctcatctggaagaccaccactctggggtctcagaggaatgatggaagccttggggtttctaaaattggaagtgaatggccccatggtgacggtggccctgtcagtggctctcttggccctcctgaaatggtactccacatcagcattctcaagactggagaagttaggcctcagacatcccaagccttctcctttcattggaaacttgacatttttccgccagggtttttgggaaagccaaatggagctcagaaagctgtatggacctctgtgtgggtactatcttggtcgtcggatgtttattgttatttctgagccagacatgatcaagcaggtgttggttgagaacttcagtaactttaccaacagaatggcgtcgggtttggagttcaagtcggtagccgacagcgttctgtttttacgtgacaaaagatgggaagaggtcagaggtgccctgatgtctgctttcagtcctgaaaagctgaacgagatggttcccctcatcagccaagcctgcgaccttctcctggctcatttaaaacgctatgcggaatctggggacgcatttgacatccagaggtgctactgcaattacaccacagatgtggttgccagcgtcgcctttggcaccccggtggactcctggcaggcccctgaggatccctttgtgaaacactgcaagcgtttcttcgaattctgcatccccagacctatcctggttttactcttatcatttccatccataatggtcccactggcccggattttgcccaataagaaccgagacgaactgaatggcttttttaacaaactcattaggaatgtgattgccttgcgggaccagcaagctgccgaagagaggcggagagacttcctccaaatggtcctggatgcccgacattctgcaagtcccatgggcgtgcaagactttgacatcgtcagagacgttttctcctctactgggtgcaagccgaacccttcccggcaacaccagcccagccctatggccaggcctttgactgtggatgagattgtgggccaggccttcatcttcctcatcgctggctatgaaatcatcaccaacacactttcttttgccacctacctactggccaccaaccctgactgccaagagaagcttctgagagaggtagacgtttttaaggagaaacacatggcccctgagttctgcagcctcgaggaaggcctgccctatctggacatggtgattgcagagacgctgaggatgtacccgccagctttcagattcacacgggaggcagctcaggactgcgaggtgctggggcagcgcatccccgcaggcgctgtgctagagatggccgtgggtgccctgcaccatgaccctgagcactggccaagcccggagaccttcaaccctgaaaggtaccgctgcagctagaatccaaatctgccctaggtccaaaaaatggtgtctatatcaagatcgtatcccgctgacacagaaggctgccgggtggggggagggcacccccaaattcaaagaaaaccctaagtgtggatgttcagaattttggaaaaatgtcactgaagtgattgaaagagtgcctggcatgcaaggataagaggttctttacataacatttcctaaatgcttaataaacgtttgttgcacttggttttgacattgccaa

SEQ ID NO: 297071 - DNA, 2194 bp, Homo sapiens
  misc_feature (4)..(4): n is a, c, g, or t
  misc_feature (6)..(6): n is a, c, g, or t
gggngngagggccggcctggacccggcgggcgcacggctccgagcccagcgcagccgagccggtctgcagaggggcccccagaactttgtgtgtgtgtgtgcacgcgcgcgcgtgtgtgcccaggtgcgagggttcgcgcgtgtgctggcggggagggaaccgacccgaaagagagccccacgctggcaaagtggctcgcccatctcacagccggttggcgctcgcggaggagacatatactgcctggactgcctggctgatgtgagctagtttgtctggttgagttggatgtttaaatagaaggcagaacaacaacagagcacggttcccataagggcggcgagatcagcctcctgtctcatctggaagaccaccactctggggtctcagaggaatgatggaagccttggggtttctaaaattggaagtgaatggccccatggtgacggtggccctgtcagtggctctcttggccctcctgaaatggtactccacatcagcattctcaagactggagaagttaggcctcagacatcccaagccttctcctttcattggaaacttgacatttttccgccagggtttttgggaaagccaaatggagctcagaaagctgtatggacctctgtgtgggtactatcttggtcgtcggatgtttattgttatttctgagccagacatgatcaagcaggtgttggttgagaacttcagtaactttaccaacagaatggcgtcgggtttggagttcaagtcggtagccgacagcgttctgtttttacgtgacaaaagatgggaagaggtcagaggtgccctgatgtctgctttcagtcctgaaaagctgaacgagatggttcccctcatcagccaagcctgcgaccttctcctggctcatttaaaacgctatgcggaatctggggacgcatttgacatccagaggtgctactgcaattacaccacagatgtggttgccagcgtcgcctttggcaccccggtggactcctggcaggcccctgaggatccctttgtgaaacactgcaagcgtttcttcgaattctgcatccccagacctatcctggttttactcttatcatttccatccataatggtcccactggcccggattttgcccaataagaaccgagacgaactgaatggcttttttaacaaactcattaggaatgtgattgccttgcgggaccagcaagctgccgaagagaggcggagagacttcctccaaatggtcctggatgcccgacattctgcaagtcccatgggcgtgcaagactttgacatcgtcagagacgttttctcctctactgggtgcaagccgaacccttcccggcaacaccagcccagccctatggccaggcctttgactgtggatgagattgtgggccaggccttcatcttcctcatcgctggctatgaaatcatcaccaacacactttcttttgccacctacctactggccaccaaccctgactgccaagagaagcttctgagagaggtagacgtttttaaggagaaacacatggcccctgagttctgcagcctcgaggaaggcctgccctatctggacatggtgattgcagagacgctgaggatgtacccgccagctttcagattcacacgggaggcagctcaggactgcgaggtgctggggcagcgcatccccgcaggcgctgtgctagagatggccgtgggtgccctgcaccatgaccctgagcactggccaagcccggagaccttcaaccctgaaaggttcacggctgaggcccggcagcagcaccggcccttcacgtacctgcccttcggggccggcccacggagctgcctcggggtgcgtctagggctgcttgaggtcaagttgacactgctccacgtgctgcacaagttccggttccaagcctgccctgagacccaggtaccgctgcagctagaatccaaatctgccctaggtccaaaaaatggtgtctatatcaagatcgtatcccgctgacacagaaggctgccgggtggggggagggcacccccaaattcaaagaaaaccctaagtgtggatgttcagaattttggaaaaatgtcactgaagtgattgaaagagtgcctggcatgcaaggataagaggttctttacataacatttcctaaatgcttaataaacgtttgttgcacttggttttgacattgccaa

SEQ ID NO: 297072 - DNA, 2194 bp, Homo sapiens
aaggaataaagttgctgattcattcctttacactgaaaccctttgttgtgccctcctcttccttcctctttatagggagacactctgagaaagagcacattgtgggggcccactccatgtgatgtttgcttggttgcctgttcccttttctacctgcagagcacggttcccataagggcggcgagatcagcctcctgtctcatctggaagaccaccactctggggtctcagaggaatgatggaagccttggggtttctaaaattggaagtgaatggccccatggtgacggtggccctgtcagtggctctcttggccctcctgaaatggtactccacatcagcattctcaagactggagaagttaggcctcagacatcccaagccttctcctttcattggaaacttgacatttttccgccagggtttttgggaaagccaaatggagctcagaaagctgtatggacctctgtgtgggtactatcttggtcgtcggatgtttattgttatttctgagccagacatgatcaagcaggtgttggttgagaacttcagtaactttaccaacagaatggcgtcgggtttggagttcaagtcggtagccgacagcgttctgtttttacgtgacaaaagatgggaagaggtcagaggtgccctgatgtctgctttcagtcctgaaaagctgaacgagatggttcccctcatcagccaagcctgcgaccttctcctggctcatttaaaacgctatgcggaatctggggacgcatttgacatccagaggtgctactgcaattacaccacagatgtggttgccagcgtcgcctttggcaccccggtggactcctggcaggcccctgaggatccctttgtgaaacactgcaagcgtttcttcgaattctgcatccccagacctatcctggttttactcttatcatttccatccataatggtcccactggcccggattttgcccaataagaaccgagacgaactgaatggcttttttaacaaactcattaggaatgtgattgccttgcgggaccagcaagctgccgaagagaggcggagagacttcctccaaatggtcctggatgcccgacattctgcaagtcccatgggcgtgcaagactttgacatcgtcagagacgttttctcctctactgggtgcaagccgaacccttcccggcaacaccagcccagccctatggccaggcctttgactgtggatgagattgtgggccaggccttcatcttcctcatcgctggctatgaaatcatcaccaacacactttcttttgccacctacctactggccaccaaccctgactgccaagagaagcttctgagagaggtagacgtttttaaggagaaacacgtgagtacaagttggatccagttacccatgggatatccataggacaattgattttgtgtttgtgggagtgaaacttatttttaatgacttgctaatatcacattctaagcttataagatgaaatagggtcattgcttggcttctcctgctctccgggttagcaagcgaaatgaaatgttgagaacaataaccacaacaaaaagacaaattgtgtgtgcaccttcactgtctggggtagtccatgaagccaggcctggctcgaggaagctgtggaagcccaggaaggtgtcaggcccaaagggcagggatggggaaggagtcatggcttcccaatatctgacttggagctgccacacggagggaggcaggtgtgagccagaaaggagagccaagatagaaggcaggagtggacaaaaggacaggccaagctgaagctggactgaagactggaagctgaggaggaggctcacaaatggaataagggaagatggggcccgtcagcgcccaggccagcttcagggcattttcttctagatgaggcccctcttgatcgcttatagcagatataacgagggtgctgagcaaggctactttatcacctcattttttcctctagatgcttgtgtgtgtataactttgactcatgagttgtcaaagagattcatttttaaaatctgtactttaaaaggaagaccaccacagtggaatcctttctgttacattctgatatgattgctattacattcaccattttgaaaggtggtctgttctgttactggaaccattaaaaaatgtttcatacaatgaactgaaaaccacttc

SEQ ID NO: 297073 - DNA, 2063 bp, Homo sapiens
aaggaataaagttgctgattcattcctttacactgaaaccctttgttgtgccctcctcttccttcctctttatagggagacactctgagaaagagcacattgtgggggcccactccatgtgatgtttgcttggttgcctgttcccttttctacctgcagagcacggttcccataagggcggcgagatcagcctcctgtctcatctggaagaccaccactctggggtctcagaggaatgatggaagccttggggtttctaaaattggaagtgaatggccccatggtgacggtggccctgtcagtggctctcttggccctcctgaaatggtactccacatcagcattctcaagactggagaagttaggcctcagacatcccaagccttctcctttcattggaaacttgacatttttccgccagggtttttgggaaagccaaatggagctcagaaagctgtatggacctctgtgtgggtaagaaggaaactcaacgtttctattatgtactatcttggtcgtcggatgtttattgttatttctgagccagacatgatcaagcaggtgttggttgagaacttcagtaactttaccaacagaatggcgtcgggtttggagttcaagtcggtagccgacagcgttctgtttttacgtgacaaaagatgggaagaggtcagaggtgccctgatgtctgctttcagtcctgaaaagctgaacgagatggttcccctcatcagccaagcctgcgaccttctcctggctcatttaaaacgctatgcggaatctggggacgcatttgacatccagaggtgctactgcaattacaccacagatgtggttgccagcgtcgcctttggcaccccggtggactcctggcaggcccctgaggatccctttgtgaaacactgcaagcgtttcttcgaattctgcatccccagacctatcctggttttactcttatcatttccatccataatggtcccactggcccggattttgcccaataagaaccgagacgaactgaatggcttttttaacaaactcattaggaatgtgattgccttgcgggaccagcaagctgccgaagagaggcggagagacttcctccaaatggtcctggatgcccgacattctgcaagtcccatgggcgtgcaagactttgacatcgtcagagacgttttctcctctactgggtgcaagccgaacccttcccggcaacaccagcccagccctatggccaggcctttgactgtggatgagattgtgggccaggccttcatcttcctcatcgctggctatgaaatcatcaccaacacactttcttttgccacctacctactggccaccaaccctgactgccaagagaagcttctgagagaggtagacgtttttaaggagaaacacatggcccctgagttctgcagcctcgaggaaggcctgccctatctggacatggtgattgcagagacgctgaggatgtacccgccagctttcagattcacacgggaggcagctcaggactgcgaggtgctggggcagcgcatccccgcaggcgctgtgctagagatggccgtgggtgccctgcaccatgaccctgagcactggccaagcccggagaccttcaaccctgaaaggttcacggctgaggcccggcagcagcaccggcccttcacgtacctgcccttcggggccggcccacggagctgcctcggggtgcgtctagggctgcttgaggtcaagttgacactgctccacgtgctgcacaagttccggttccaagcctgccctgagacccaggtaccgctgcagctagaatccaaatctgccctaggtccaaaaaatggtgtctatatcaagatcgtatcccgctgacacagaaggctgccgggtggggggagggcacccccaaattcaaagaaaaccctaagtgtggatgttcagaattttggaaaaatgtcactgaagtgattgaaagagtgcctggcatgcaaggataagaggttctttacataacatttcctaaatgcttaataaacgtttgttgcacttggttttgacattgccaa

SEQ ID NO: 297074 - DNA, 1171 bp, Homo sapiens
ggctcgcggagaataaaggagcgtggggtgggcgcggaaagaaatgggaaggggcgcggggcggagagcgaagtggaaaggaggtgctccgaaaggagacatatactgcctggactgcctggctgatgtgagctagtttgtctggttgagttggatgtttaaatagaaggcagaacaacaacagggtcttgctctgttgcccaggctggagtgcacttgcagtagcataatcacaattcactgcagcctcaacctcccaggctcaatcattcttcctgcctcagcccccaaagtagctgggactacaggcatgcaccaccatggctggctaagttttaaaacttttttgtagagacatggtctctctgtgttgcccaggctggtctaggactcctgggctcaagcaatcctcccacctcagcctcccaaagtgctgagattacaggtgcaaactatctcacccagcctttaatctttttattagtgagatatctgacccaacggctaggatctgatggtctttttagtatggcctcaaatcactgtatcctgtaagcatttttttttttttttgagctggagtctctgttgcccaggctggagtgcaatggcacaatctcagctcactgcaacttctgcctcctggattcaagtgattctcctgcctcagcctcccgagtagctgggatcacaggtgcctgccaccacacccggctaatttttgcatttttactagggatgcggttttgccatgttggccaggctggtcttaaactcctgacctcaagtgatctcccctcctcggcctcccaaagtgctgggattacaggcgtgagccaccgcacccggcctaaacatattttcttctagagtgtttttaggtctgcacacggagtcctaggtcaatgccaacaccaactcacactgagccctaactatggaatcggagcaacatcattatttaggcccatggacaaaataccaaagtaatctgtttctatgttccattatttcctcctctccatacattatacatacaacaatttccctttatcacacgtacctgtgactacgtgggaatcattctatcccaaattgctgcagcacaatctgaggcttactaaatatttgcctcagccataaagctgatagagcattagtttaaaatgca

SEQ ID NO: 297075 - DNA, 509 bp, Homo sapiens
cagcatgaagctgctttccccagagcccctgggccagagggcattgctcagttactggccagaactggagagtgagatggggaggatcagcagggacggctggagtcactgaaagataggtttggggctttgctctctgctttcttcttgtgtgaccttggacaacggacttggccttcttgaacctccaagtcttcatttgtacagtgagatgctactatctctttgacaaatattttaattttctctattttaggtaccgctgcagctagaatccaaatctgccctaggtccaaaaaatggtgtctatatcaagatcgtatcccgctgacacagaaggctgccgggtggggggagggcacccccaaattcaaagaaaaccctaagtgtggatgttcagaattttggaaaaatgtcactgaagtgattgaaagagtgcctggcatgcaaggataagaggttctttacataacatttcctaaatgcttaataaacgtttgttgcacttg

SEQ ID NO: 297076 - DNA, 571 bp, Homo sapiens
gcgtggtggcgcgcgcctgtagtcccagctactcgggaggctgaggcaggggaatcgcttgaacccaggagtcggaggttgcagtaagccgagattgcaccactgcactccagcctggcaacagagcaagactcaaaataaataaataaaataaaataaaataaaatgagtcaggaatgatgttggtgttgaggttggcatacgtatcaaggacagtaactaccatggctcccgaagtgttgccaaaacctcagatgtgtggccttctggccaagcgtctgcgatttcaatgtttggagcattcatggtgtccctgggggttgcagctttgtatgagtttggtgtgggtgatccaagaaagaaggcatatgcagatttctgcagaaattatgagattttgagcagatgaggaaggctggtatctttcagtttaaagtaatcttggaatataaagaatttcttcaggttgaattacctagaagtttgtcactgacttgtgttcctgaactatgacacatgaatatgtgggctaagaaatagttcctcttgataaataatcaattaacaaata

SEQ ID NO: 297077 - DNA, 548 bp, Homo sapiens
cccgacactgcgggttgtcacaacggcaccctcccgctttctctctgcctcggatttagtcgtgactgtgtgtcttcgccgtggtgcagcttcaggcctctcccgcatctactctctcacgcttccgctgcggcctgagggagggcggcgggcggaccacgggaccgggggttggcatacgtatcaaggacagtaactaccatggctcccgaagtgttgccaaaacctcagatgtgtggccttctggccaagcgtctgcgatttcaatgtttggagcattcatggtgtccctgggggttgcagctttgtatgagtttggtgtgggtgatccaagaaagaaggcatatgcagatttctgcagaaattatgagattttgagcagatgaggaaggctggtatctttcagtttaaagtaatcttggaatataaagaatttcttcaggttgaattacctagaagtttgtcactgacttgtgttcctgaactatgacacatgaatatgtgggctaagaaatagttcctcttgataaataatcaattaacaaata

SEQ ID NO: 297078 - DNA, 981 bp, Homo sapiens
gtcccctccccctcccgccgcagcggcggcagcagctgggctcggtgtaaacaagtccaggcgcctgcgaacccgggcccgggggggacggcgcccgccaggagcgccccccactcccaggccagcccaccccggcggaccgggccccgcgcgcccaggcgaggcactgggctccctctgctccccgtgggccgctccccgcgtggggccactgcccccggcccccgccatggtgcggatttcaaagcccaagacgtttcaggcctacttggatgattgtcaccggaggtatagctgtgcccactgccgcgctcacctggccaaccacgacgacctcatctccaagtccttccagggcagtcaggggcgtgcctacctcttcaactcagtggtgaacgtgggctgcgggccagccgaggagcgggtgctgctgaccggcctccatgctgtcgccgacatccactgcgagaactgcaagaccactttgggctggaaatatgaacaggcctttgagagcagccagaagtacaaagaggggaagtacatcattgaactcaaccacatgatcaaagacaacggctgggactgacccccgctcccccgacgcatgtggctccagcccggcctggccgccagggagcgccactggcttcccgccacccgaagggagctctggaccctcagagcccctgcagaggacggatctagctcctgtatatatattttattgcatgcactgtgaccttggggggagaacagaagggggacgacgcccccgcacctcctgcgatctggctggcttggatctcgtttttaacccgttcctgccccacctgccctatagttatggcctgtgttctgctctcctggtcccagtgcaccgtctgctctgtgaactcctcccaccaggcccttcttaccccacgcgtgtctgtccccctcgttctgtagcgtttgtacataataaaacaatggagtgga

SEQ ID NO: 297079 - DNA, 2387 bp, Homo sapiens
gtcccctccccctcccgccgcagcggcggcagcagctgggctcggtgtaaacaagtccaggcgcctgcgaacccgggcccgggggggacggcgcccgccaggagcgccccccactcccaggccagcccaccccggcggaccgggccccgcgcgcccaggcgaggcgaggtgaggcccgcgccgtcagggctccacagcagaccgggctcctcttgtgaccggcgtctctcctttgcctcctagagaatctcgatgctggcctggagcagaaactgagctggaccactggagcctcggtgaggggtctgtaccccacctgggaaaggcagtgggtggctggggctatgtggacagggaggccggaggtatctagaactgccatgtggtgtctgcaaggctctgtccagccaggtttcaaccgtacctgtcactctgccacccccgcgccccaggtgagccccggagtccaggtaaggctccgcgatgcaggtaagagcccctgagcgtagaggaggccttggcgcccgcaggtgagagcccctcccctcctaggtgaccctcaaccttcacggcgaggcctcctacctcctccaggtgggggaccctctccccgatgaaccccctaaaccaccagtgaaccccactgctctccagatgaggtcgcaaggaccaaccagtgcctacccgcccatgctcccccgaaactgggaactgacagcccagcccctccaaagccccttcctccagcttcagctgccaggtcagcaagggtgaggccggaagcaggcgggtgactcaccctgggcacctccgagcctcagtttccccatggatgcaacctgaggcctcctcactgagtcaaaaccgagacgcctctggtccccggagaggctgctggctctggggaaaggagagagcagcccagtgtgacagagcgagtccccacggctctgggagtgcctcgcatgtgtgtggcccaggtcctgacagcccacctactccctccccggcaggcactgggctccctctgctccccgtgggccgctccccgcgtggggccactgcccccggcccccgccatggtgcggatttcaaagcccaagacgtttcaggcctacttggatgattgtcaccggaggtatagctgtgcccactgccgcgctcacctggccaaccacgacgacctcatctccaagtccttccagggcagtcaggggcgtgcctacctcttcaactcagtggtgaacgtgggctgcgggccagccgaggagcgggtgctgctgaccggcctccatgctgtcgccgacatccactgcgagaactgcaagaccactttgggctggaaatatgtgagtcacccacctctgaccccaggctagcctttgacctgaccttccaacacctcctcctgacaagctgtcaccctatagcctttcagattgcataggccgagctcacacaagtcagcatccctgaccacattctctttatcttgcaccttgcaaggggtgtagaacttttctcttaacccatcccttctctcccaggcacttggatccccattagagagttaggatataatcagagtcaccatttatggaatgtttatgtgccttgcactgttgtgtgcctggcgtctattatctcattcaatcattgcagtgatcctctaggtagaagctattattatctctacagaagaagacagggaggcccagagatgttaggtaacttgcccaagatcacccaactggtaagtaacagaatagggaccagaatctgagttggttggttggtttttttttttcactccaaacccttggtcaccagcttatattgtcatttagagtatcagaaaaattgccccagactctgcaacaacatggagcttgggttcaccagcctccctttccatagtcctcattgccactgctgctgtccagggtctgatttcactaccctgagtctcatttccttatctctcagtggaagataaagccactgcctagcacccaggattgttacagggatcagattagatgctcaggaagatgctcttgggacactgcaagggacaggattcttcaggcgtcgcttggaactgtggtgcctctgtgaggtggatgtcccaggcagagccagccagccagccctgacctgagctcgctgctgaccctgccacagattggctgtgtgtctctggacaggtggcttggccactctggacctctaccaaataaagagctggccggccaggcacagtggctcacacctgtaatcccagcactttgggaggccgaggcgggtggatcacaaggtcaggagattgagaccatcctggctaacacggtgaaaccccatctctaccaaaaatacaaaaaaaaaaa

SEQ ID NO: 297080 - DNA, 275 bp, Homo sapiens
gagctcggtacccgcgtgggttccttgcagagcgtgggttgcagaggacggatctagctcctgtatatatattttattgcatgcactgtgaccttggggggagaacagaagggggacgacgcccccgcacctcctgcgatctggctggcttggatctcgtttttaacccgttcctgccccacctgccctatagttatggcctgtgttctgctctcctggtcccagtgcaccgtctgcaagacccacgcggggtcctctagatcgaccagcagcat

SEQ ID NO: 297081 - DNA, 641 bp, Homo sapiens
agaatctgtttacagcttatgaccaggaaattgagtctttgaagaggaacttagctgtcccaacagaggcatccgagaggcctggaggaggtgatgctggacagtaggaattgcctggtccgacgccctggctgccaggggcgcgcatctttgggtcttccctgctagaaggtgaactgagtgtgtccctggcgctctggcaaaagccatggaatgggcccacagtgagaattccagcttcgcctcttactagctggataacctagggagccgcgagacctccctgggcctcagcccccggtacagtggagccaacgggagaaacggcctcacgggattgatgcggggattgagcggggcacgggcggcggacaaacgcgggtcattatactcatctcccccagagcatgcgtcccagcgccacccgcttcctcgctccgcgcccggcctagaccctccgaccccgcccctgcgcgggccacaagcaggaatgcgagcaggcctggggcgcgcgggccgcagccgcatttccgggccggcgggagcgggcggcgggggaggggcggtcggggcctgcgccggccgccgtgtgacgcgccccctcatttgcatgcggagcgcccattggccacggcggccgc

SEQ ID NO: 297082 - DNA, 529 bp, Homo sapiens
ctggcagaagatggtgactggagtggccagagccccgtccccccgataccactgagctcactgcccctgatgccgagctttcaaggataggctttattctgccagccataccaatcataaatctactctgccagggacccgacttcgctccgccccgcacttggatccccattagagagttaggatataatcagagtcaccatttatggaatgtttatgtgccttgcactgttgtgtgcctggcgtctattatctcattcaatcattgcagtgatcctctaggtagaagctattattatctctacagaagaagacagggaggcccagagatgttaggtaacttgcccaagatcacccaactggtaagtaacagaatagggaccagaatctgagttggttggttggtttttttttttcactccaaacccttggtcaccagcttatattgtcatttagagtatcagaaaaattgccccagactctgcaacaacaagacccacgcggggtcctctagatcgaccagcagcat

SEQ ID NO: 297083 - DNA, 1118 bp, Homo sapiens
agaatctgtttacagcttatgaccaggaaattgagtctttgaagaggaacttagctgtcccaacagaggcatccgagaggcctggaggaggtgatgctggacagtaggaattgcctggtccgacgccctggctgccaggggcgcgcatctttgggtcttccctgctagaaggtgaactgagtgtgtccctggcgctctggcaaaagccatggaatgggcccacagtgagaattccagcttcgcctcttactagctggataacctagggagccgcgagacctccctgggcctcagcccccggcactgggctccctctgctccccgtgggccgctccccgcgtggggccactgcccccggcccccgccatggtgcggatttcaaagcccaagacgtttcaggcctacttggatgattgtcaccggaggtatagctgtgcccactgccgcgctcacctggccaaccacgacgacctcatctccaagtccttccagggcagtcaggggcgtgcctacctcttcaactcagtggtgaacgtgggctgcgggccagccgaggagcgggtgctgctgaccggcctccatgctgtcgccgacatccactgcgagaactgcaagaccactttgggctggaaatatgaacaggcctttgagagcagccagaagtacaaagaggggaagtacatcattgaactcaaccacatgatcaaagacaacggctgggactgacccccgctcccccgacgcatgtggctccagcccggcctggccgccagggagcgccactggcttcccgccacccgaagggagctctggaccctcagagcccctgcagaggacggatctagctcctgtatatatattttattgcatgcactgtgaccttggggggagaacagaagggggacgacgcccccgcacctcctgcgatctggctggcttggatctcgtttttaacccgttcctgccccacctgccctatagttatggcctgtgttctgctctcctggtcccagtgcaccgtctgctctgtgaactcctcccaccaggcccttcttaccccacgcgtgtctgtccccctcgttctgtagcgtttgtacataataaaacaatggagtgga

SEQ ID NO: 297084 - DNA, 989 bp, Homo sapiens
agaatctgtttacagcttatgaccaggaaattgagtctttgaagaggaacttagctgtcccaacagaggcatccgagaggcctggaggaggtgatgctggacagtaggaattgcctggtccgacgccctggctgccaggggcgcgcatctttgggtcttccctgctagaaggcactgggctccctctgctccccgtgggccgctccccgcgtggggccactgcccccggcccccgccatggtgcggatttcaaagcccaagacgtttcaggcctacttggatgattgtcaccggaggtatagctgtgcccactgccgcgctcacctggccaaccacgacgacctcatctccaagtccttccagggcagtcaggggcgtgcctacctcttcaactcagtggtgaacgtgggctgcgggccagccgaggagcgggtgctgctgaccggcctccatgctgtcgccgacatccactgcgagaactgcaagaccactttgggctggaaatatgaacaggcctttgagagcagccagaagtacaaagaggggaagtacatcattgaactcaaccacatgatcaaagacaacggctgggactgacccccgctcccccgacgcatgtggctccagcccggcctggccgccagggagcgccactggcttcccgccacccgaagggagctctggaccctcagagcccctgcagaggacggatctagctcctgtatatatattttattgcatgcactgtgaccttggggggagaacagaagggggacgacgcccccgcacctcctgcgatctggctggcttggatctcgtttttaacccgttcctgccccacctgccctatagttatggcctgtgttctgctctcctggtcccagtgcaccgtctgctctgtgaactcctcccaccaggcccttcttaccccacgcgtgtctgtccccctcgttctgtagcgtttgtacataataaaacaatggagtgga

SEQ ID NO: 297085 - DNA, 773 bp, Homo sapiens
ttcggcacgagccacgacgacctcatctccaagtccttccagggcagtcaggggcgtgcctacctcttcaactcagtgtgagtatctggcctcccttcttgctttccctgacctctgttgtgacctgtgacccctggcatcctgctgagactcccagagttccccggtgcaggcaggaaattggtgaacgtgggctgcgggccagccgaggagcgggtgctgctgaccggcctccatgctgtcgccgacatccactgcgagaactgcaagaccactttgggctggaaatatgaacaggcctttgagagcagccagaagtacaaagaggggaagtacatcattgaactcaaccacatgatcaaagacaacggctgggactgacccccgctcccccgacgcatgtggctccagcccggcctggccgccagggagcgccactggcttcccgccacccgaagggagctctggaccctcagagcccctgcagaggacggatctagctcctgtatatatattttattgcatgcactgtgaccttggggggagaacagaagggggacgacgcccccgcacctcctgcgatctggctggcttggatctcgtttttaacccgttcctgccccacctgccctatagttatggcctgtgttctgctctcctggtcccagtgcaccgtctgctctgtgaactcctcccaccaggcccttcttaccccacgcgtgtctgtccccctcgttctgtagcgtttgtacataataaaacaatggagtgga

SEQ ID NO: 297086 - DNA, 2592 bp, Homo sapiens
gtcccctccccctcccgccgcagcggcggcagcagctgggctcggtgtaaacaagtccaggcgcctgcgaacccgggcccgggggggacggcgcccgccaggagcgccccccactcccaggccagcccaccccggcggaccgggccccgcgcgcccaggcgaggcgaggtgaggcccgcgccgtcagggctccacagcagaccgggctcctcttgtgaccggcgtctctcctttgcctcctagagaatctcgatgctggcctggagcagaaactgagctggaccactggagcctcggtgaggggtctgtaccccacctgggaaaggcagtgggtggctggggctatgtggacagggaggccggaggtatctagaactgccatgtggtgtctgcaaggctctgtccagccaggtttcaaccgtacctgtcactctgccacccccgcgccccaggtgagccccggagtccaggtaaggctccgcgatgcaggtaagagcccctgagcgtagaggaggccttggcgcccgcaggtgagagcccctcccctcctaggtgaccctcaaccttcacggcgaggcctcctacctcctccaggtgggggaccctctccccgatgaaccccctaaaccaccagtgaaccccactgctctccagatgaggtcgcaaggaccaaccagtgcctacccgcccatgctcccccgaaactgggaactgacagcccagcccctccaaagccccttcctccagcttcagctgccaggtcagcaagggtgaggccggaagcaggcgggtgactcaccctgggcacctccgagcctcagtttccccatggatgcaacctgaggcctcctcactgagtcaaaaccgagacgcctctggtccccggagaggctgctggctctggggaaaggagagagcagcccagtgtgacagagcgagtccccacggctctgggagtgcctcgcatgtgtgtggcccaggtcctgacagcccacctactccctccccggcaggcactgggctccctctgctccccgtgggccgctccccgcgtggggccactgcccccggcccccgccatggtgcggatttcaaagcccaagacgtttcaggcctacttggatgattgtcaccggaggtatagctgtgcccactgccgcgctcacctggccaaccacgacgacctcatctccaagtccttccagggcagtcaggggcgtgcctacctcttcaactcagtgtgagtatctggcctcccttcttgctttccctgacctctgttgtgacctgtgacccctggcatcctgctgagactcccagagttccccggtgcaggcaggaaattgtgagcatcatttcttggatgctgaggacagacacagtgcttgagggggtgggccctgtgatggcaggaccctccctgggactaccccatgtccccacagggtgaacgtgggctgcgggccagccgaggagcgggtgctgctgaccggcctccatgctgtcgccgacatccactgcgagaactgcaagaccactttgggctggaaatatgtgagtcacccacctctgaccccaggctagcctttgacctgaccttccaacacctcctcctgacaagctgtcaccctatagcctttcagattgcataggccgagctcacacaagtcagcatccctgaccacattctctttatcttgcaccttgcaaggggtgtagaacttttctcttaacccatcccttctctcccaggcacttggatccccattagagagttaggatataatcagagtcaccatttatggaatgtttatgtgccttgcactgttgtgtgcctggcgtctattatctcattcaatcattgcagtgatcctctaggtagaagctattattatctctacagaagaagacagggaggcccagagatgttaggtaacttgcccaagatcacccaactggtaagtaacagaatagggaccagaatctgagttggttggttggtttttttttttcactccaaacccttggtcaccagcttatattgtcatttagagtatcagaaaaattgccccagactctgcaacaacatggagcttgggttcaccagcctccctttccatagtcctcattgccactgctgctgtccagggtctgatttcactaccctgagtctcatttccttatctctcagtggaagataaagccactgcctagcacccaggattgttacagggatcagattagatgctcaggaagatgctcttgggacactgcaagggacaggattcttcaggcgtcgcttggaactgtggtgcctctgtgaggtggatgtcccaggcagagccagccagccagccctgacctgagctcgctgctgaccctgccacagattggctgtgtgtctctggacaggtggcttggccactctggacctctaccaaataaagagctggccggccaggcacagtggctcacacctgtaatcccagcactttgggaggccgaggcgggtggatcacaaggtcaggagattgagaccatcctggctaacacggtgaaaccccatctctaccaaaaatacaaaaaaaaaaa

SEQ ID NO: 297087 - DNA, 476 bp, Homo sapiens
tgattagaggatcccctggctgggaaagaggggaagtacatcattgaactcaaccacatgatcaaagacaacggctgggactgacccccgctcccccgacgcatgtggctccagcccggcctggccgccagggagcgccactggcttcccgccacccgaagggagctctggaccctcagagcccctgcagaggacggatctagctcctgtatatatattttattgcatgcactgtgaccttggggggagaacagaagggggacgacgcccccgcacctcctgcgatctggctggcttggatctcgtttttaacccgttcctgccccacctgccctatagttatggcctgtgttctgctctcctggtcccagtgcaccgtctgctctgtgaactcctcccaccaggcccttcttaccccacgcgtgtctgtccccctcgttctgtagcgtttgtacataataaaacaatggagtgga

SEQ ID NO: 297088 - DNA, 926 bp, Homo sapiens
gtcccctccccctcccgccgcagcggcggcagcagctgggctcggtgtaaacaagtccaggcgcctgcgaacccgggcccgggggggacggcgcccgccaggagcgccccccactcccaggccagcccaccccggcggaccgggccccgcgcgcccaggcgaggcactgggctccctctgctccccgtgggccgctccccgcgtggggccactgcccccggcccccgccatggtgcggatttcaaagcccaagacgtttcaggcctacttggatgattgtcaccggaggtatagctgtgcccactgccgcgctcacctggccaaccacgacgacctcatctccaagtccttccagggcagtcaggggcgtgcctacctcttcaactcagtggtgaacgtgggctgcgggccagccgaggagcgggtgctgctgaccggcctccatgctgtcgccgacatccactgcgagaactgcaagaccactttgggctggaaatatgaacaggcctttgagagcagccagaagtacaaagaggggaagtacatcattgaactcaaccacatgatcaaagacaacggctgggactgacccccgctcccccgacgcatgtggctccagcccggcctggccgccagggagcgccactggcttcccgccacccgaagggagctctggaccctcagagcccctgcagaggacggatctagctcctgtatatatattttattgcatgcactgtgaccttggggggagaacagaagggggacgacgcccccgcacctcctgcgatctggctggcttggatctcgtttttaacccgttcctgccccacctgccctatagttatggcctgtgttctgctctcctggtcccagtgcaccgtctgcaagacccacgcggggtcctctagatcgaccagcagcat

SEQ ID NO: 297089 - DNA, 932 bp, Homo sapiens
gtcccctccccctcccgccgcagcggcggcagcagctgggctcggtgtaaacaagtccaggcgcctgcgaacccgggcccgggggggacggcgcccgccaggagcgccccccactcccaggccagcccaccccggcggaccgggccccgcgcgcccaggcgaggcactgggctccctctgctccccgtgggccgctccccgcgtggggccactgcccccggcccccgccatggtgcggatttcaaagcccaagacgtttcaggcctacttggatgattgtcaccggaggtatagctgtgcccactgccgcgctcacctggccaaccacgacgacctcatctccaagtccttccagggcagtcaggggcgtgcctacctcttcaactcagtggtgaacgtgggctgcgggccagccgaggagcgggtgctgctgaccggcctccatgctgtcgccgacatccactgcgagaactgcaagaccactttgggctggaaatatgaacaggcctttgagagcagccagaagtacaaagaggggaagtacatcattgaactcaaccacatgatcaaagacaacggctgggactgacccccgctcccccgacgcatgtggctccagcccggcctggccgccagggagcgccactggcttcccgccacccgaagggagctctggaccctcagagcccctgcagaggacggatctagctcctgtatatatattttattgcatgcactgtgaccttggggggagaacagaagggggacgacgcccccgcacctcctgccctatagttatggcctgtgttctgctctcctggtcccagtgcaccgtctgctctgtgaactcctcccaccaggcccttcttaccccacgcgtgtctgtccccctcgttctgtagcgtttgtacataataaaacaatggagtgga

SEQ ID NO: 297090 - DNA, 886 bp, Homo sapiens
  misc_feature (326)..(326): n is a, c, g, or t
  misc_feature (563)..(563): n is a, c, g, or t
  misc_feature (592)..(592): n is a, c, g, or t
gtcccctccccctcccgccgcagcggcggcagcagctgggctcggtgtaaacaagtccaggcgcctgcgaacccgggcccgggggggacggcgcccgccaggagcgccccccactcccaggccagcccaccccggcggaccgggccccgcgcgcccaggcgagaataattggatgattgtaaaaggaggtatagatgtgaaaaatgaagagataaaatggaaaaaaaagaagaaataatataaaagtaattaaagggaagtaaggggagtgaataaatattaaaataagtggtgaaagtgggatgagggaaagaagaggagagggngatgatgaaaggaataaatgtgtagaagaaataaaatgagagaaatgaaagaaaaatttgggatggaaatatgaaaaggaatttgagagaagaaagaagtaaaaagaggggaagtaaataattgaaataaaaaaaatgataaaagaaaaaggatgggaatgaaaaaagataaaaagaagaatgtggataaagaaaggaatggaagaaagggagagaaaatggattaaagaagagaangaagggaggtatggaaaataagagaaaangaaggcagaggacggatctagctcctgtatatatattttattgcatgcactgtgaccttggggggagaacagaagggggacgacgcccccgcacctcctgcgatctggctggcttggatctcgtttttaacccgttcctgccccacctgccctatagttatggcctgtgttctgctctcctggtcccagtgcaccgtctgctctgtgaactcctcccaccaggcccttcttaccccacgcgtgtctgtccccctcgttctgtagcgtttgtacataataaaacaatggagtgga

SEQ ID NO: 297091 - DNA, 867 bp, Homo sapiens
ccccccactcccaggccagcccaccccggcggaccgggccccgcgcgcccaggcgaggcgaggtgaggcccgcgccgtcagggctgcgtgtcgccccgcgcccctgcccagcccgcgaggactgccccctcccccggcgcccgcccccacccccgcgccccaggtgagccccggagtccaggtaaggctccgcgatgcaggtaagagcccctgagcgtagaggaggccttggcgcccgcaggtgagagcccctcccctcctaggtgaccctcaaccttcacggcgaggcctcctacctcctccaggtgggggaccctctccccgatgaaccccctaaaccaccagtgaaccccactgctctccagatgaggtcgcaaggaccaaccagtgcctacccgcccatgctcccccgaaactgggaactgacagcccagcccctccaaagccccttcctccagcttcagctgccaggtcagcaagggtgaggccggaagcaggcgggtgactcaccctgggcacctccgagcctcagtttccccatggatgcaacctgaggcctcctcactgagtcaaaaccgagacgcctctggtccccggagaggctgctggctctggggaaaggagagagcagcccagtgtgacagagcgagtccccacggctctgggagtgcctcgcatgtgtgtggcccaggtcctgacagcccacctactccctccccggcaggcactgggctccctctgctccccgtgggccgctccccgcgtggggccactgcccccggcccccgccatggtgcggatttcaaagcccaagacgtttcaggcctacttggatgattgtcaccggaggtatagctgtgcccactg

SEQ ID NO: 297092 - DNA, 682 bp, Homo sapiens
tgcaggctggtacggtccgaagtcgtatgatcgacctcatctccaattccttccagggcagtcaggggcgtgcctacctcttcaactcagtggtgaacgtgggctgcgggccagccgaggagcgggtgctgctgaccggcctccatgctgtcgccgacatccactgcgagaactgcaagaccactttgggctggaaatatgaacaggcctttgagagcagccagaagtacaaagaggggaagtacatcattgaactcaaccacatgatcaaagacaacggctgggactgacccccgctcccccgacgcatgtggctccagcccggcctggccgccagggagcgccactggcttcccgccacccgaagggagctctggaccctcagagcccctgcagaggacggatctagctcctgtatatatattttattgcatgcactgtgaccttggggggagaacagaagggggacgacgcccccgcacctcctgcgatctggctggcttggatctcgtttttaacccgttcctgccccacctgccctatagttatggcctgtgttctgctctcctggtcccagtgcaccgtctgctctgtgaactcctcccaccaggcccttcttaccccacgcgtgtctgtccccctcgttctgtagcgtttgtacataataaaacaatggagtgga

SEQ ID NO: 297093 - DNA, 1831 bp, Homo sapiens
gtcccctccccctcccgccgcagcggcggcagcagctgggctcggtgtaaacaagtccaggcgcctgcgaacccgggcccgggggggacggcgcccgccaggagcgccccccactcccaggccagcccaccccggcggaccgggccccgcgcgcccaggcgaggcgaggtgaggcccgcgccgtcagggctccacagcagaccgggctcctcttgtgaccggcgtctctcctttgcctcctagagaatctcgatgctggcctggagcagaaactgagctggaccactggagcctcggtgaggggtctgtaccccacctgggaaaggcagtgggtggctggggctatgtggacagggaggccggaggtatctagaactgccatgtggtgtctgcaaggctctgtccagccaggtttcaaccgtacctgtcactctgccacccccgcgccccaggtgagccccggagtccaggtaaggctccgcgatgcaggtaagagcccctgagcgtagaggaggccttggcgcccgcaggtgagagcccctcccctcctaggtgaccctcaaccttcacggcgaggcctcctacctcctccaggtgggggaccctctccccgatgaaccccctaaaccaccagtgaaccccactgctctccagatgaggtcgcaaggaccaaccagtgcctacccgcccatgctcccccgaaactgggaactgacagcccagcccctccaaagccccttcctccagcttcagctgccaggtcagcaagggtgaggccggaagcaggcgggtgactcaccctgggcacctccgagcctcagtttccccatggatgcaacctgaggcctcctcactgagtcaaaaccgagacgcctctggtccccggagaggctgctggctctggggaaaggagagagcagcccagtgtgacagagcgagtccccacggctctgggagtgcctcgcatgtgtgtggcccaggtcctgacagcccacctactccctccccggcaggcactgggctccctctgctccccgtgggccgctccccgcgtggggccactgcccccggcccccgccatggtgcggatttcaaagcccaagacgtttcaggcctacttggatgattgtcaccggaggtatagctgtgcccactgccgcgctcacctggccaaccacgacgacctcatctccaagtccttccagggcagtcaggggcgtgcctacctcttcaactcagtggtgaacgtgggctgcgggccagccgaggagcgggtgctgctgaccggcctccatgctgtcgccgacatccactgcgagaactgcaagaccactttgggctggaaatatgaacaggcctttgagagcagccagaagtacaaagaggggaagtacatcattgaactcaaccacatgatcaaagacaacggctgggactgacccccgctcccccgacgcatgtggctccagcccggcctggccgccagggagcgccactggcttcccgccacccgaagggagctctggaccctcagagcccctgcagaggacggatctagctcctgtatatatattttattgcatgcactgtgaccttggggggagaacagaagggggacgacgcccccgcacctcctgcgatctggctggcttggatctcgtttttaacccgttcctgccccacctgccctatagttatggcctgtgttctgctctcctggtcccagtgcaccgtctgctctgtgaactcctcccaccaggcccttcttaccccacgcgtgtctgtccccctcgttctgtagcgtttgtacataataaaacaatggagtgga

SEQ ID NO: 297094 - DNA, 1059 bp, Homo sapiens
  misc_feature (340)..(340): n is a, c, g, or t
  misc_feature (378)..(378): n is a, c, g, or t
gtcccctccccctcccgccgcagcggcggcagcagctgggctcggtgtaaacaagtccaggcgcctgcgaacccgggcccgggggggacggcgcccgccaggagcgccccccactcccaggccagcccaccccggcggaccgggccccgcgcgcccaggcgaggagcagcccaatggctgaggtgactggagctcctctctgcatccccgttgtgtccggctcaccgctgcgttgggtgccatcttgcctcgctcggtctcccgtgcaatggttgcaggaatttcaacatgcacaaacgactgtttcaatagccatatgattgtgactcgagtatgatcnaccgagaaggtgtgtacgcatgatgtccctaacgtgancgtggcctcaacgttgacaaaccatgatggatgctcgtctcaaagtccttccaggatctccttggacgtgtgttacctcttcaactcagtggtgaacgtgggctgcgggccagccgaggagcgggtgctgctgaccggcctccatgctgtcgccgacatccactgcgagaactgcaagaccactttgggctggaaatatgaacaggcctttgagagcagccagaagtacaaagaggggaagtacatcattgaactcaaccacatgatcaaagacaacggctgggactgacccccgctcccccgacgcatgtggctccagcccggcctggccgccagggagcgccactggcttcccgccacccgaagggagctctggaccctcagagcccctgcagaggacggatctagctcctgtatatatattttattgcatgcactgtgaccttggggggagaacagaagggggacgacgcccccgcacctcctgcgatctggctggcttggatctcgtttttaacccgttcctgccccacctgccctatagttatggcctgtgttctgctctcctggtcccagtgcaccgtctgctctgtgaactcctcccaccaggcccttcttaccccacgcgtgtctgtccccctcgttctgtagcgtttgtacataataaaacaatggagtgga

SEQ ID NO: 297095 - DNA, 1922 bp, Homo sapiens
gtcccctccccctcccgccgcagcggcggcagcagctgggctcggtgtaaacaagtccaggcgcctgcgaacccgggcccgggggggacggcgcccgccaggagcgccccccactcccaggccagcccaccccggcggaccgggccccgcgcgcccaggcgaggcgaggtgaggcccgcgccgtcagggctccacagcagaccgggctcctcttgtgaccggcgtctctcctttgcctcctagagaatctcgatgctggcctggagcagaaactgagctggaccactggagcctcggtgaggggtctgtaccccacctgggaaaggcagtgggtggctggggctatgtggacagggaggccggaggtatctagaactgccatgtggtgtctgcaaggctctgtccagccaggtttcaaccgtacctgtcactctgccacccccgcgccccaggtgagccccggagtccaggtaaggctccgcgatgcaggtaagagcccctgagcgtagaggaggccttggcgcccgcaggtgagagcccctcccctcctaggtgaccctcaaccttcacggcgaggcctcctacctcctccaggtgggggaccctctccccgatgaaccccctaaaccaccagtgaaccccactgctctccagatgaggtcgcaaggaccaaccagtgcctacccgcccatgctcccccgaaactgggaactgacagcccagcccctccaaagccccttcctccagcttcagctgccaggtcagcaagggtgaggccggaagcaggcgggtgactcaccctgggcacctccgagcctcagtttccccatggatgcaacctgaggcctcctcactgagtcaaaaccgagacgcctctggtccccggagaggctgctggctctggggaaaggagagagcagcccagtgtgacagagcgagtccccacggctctgggagtgcctcgcatgtgtgtggcccaggtcctgacagcccacctactccctccccggcaggcactgggctccctctgctccccgtgggccgctccccgcgtggggccactgcccccggcccccgccatggtgcggatttcaaagcccaagacgtttcaggcctacttggatgattgtcaccggaggtatagctgtgcccactgccgcgctcacctggccaaccacgacgacctcatctccaagtccttccagggcagtcaggggcgtgcctacctcttcaactcagtggtgaacgtgggctgcgggccagccgaggagcgggtgctgctgaccggcctccatgctgtcgccgacatccactgcgagaactgcaagaccactttgggctggaaatattgatcctctaggtagaagctattattatctctacagaagaagacagggaggcccagagatgttaggtaacttgcccaagatcacccaactggaacaggcctttgagagcagccagaagtacaaagaggggaagtacatcattgaactcaaccacatgatcaaagacaacggctgggactgacccccgctcccccgacgcatgtggctccagcccggcctggccgccagggagcgccactggcttcccgccacccgaagggagctctggaccctcagagcccctgcagaggacggatctagctcctgtatatatattttattgcatgcactgtgaccttggggggagaacagaagggggacgacgcccccgcacctcctgcgatctggctggcttggatctcgtttttaacccgttcctgccccacctgccctatagttatggcctgtgttctgctctcctggtcccagtgcaccgtctgctctgtgaactcctcccaccaggcccttcttaccccacgcgtgtctgtccccctcgttctgtagcgtttgtacataataaaacaatggagtgga

SEQ ID NO: 297096 - DNA, 1005 bp, Homo sapiens
gtcccctccccctcccgccgcagcggcggcagcagctgggctcggtgtaaacaagtccaggcgcctgcgaacccgggcccgggggggacggcgcccgccaggagcgccccccactcccaggccagcccaccccggcggaccgggccccgcgcgcccaggcgaggcactgggctccctctgctccccgtgggccgctccccgcgtggggccactgcccccggcccccgccatggtgcggatttcaaagcccaagacgtttcaggcctacttggatgattgtcaccggaggtatagctgtgcccactgccgcgctcacctggccaaccacgacgacctcatctccaagtccttccagggcagtcaggggcgtgcctacctcttcaactcagtggtgaacgtgggctgcgggccagccgaggagcgggtgctgctgaccggcctccatgctgtcgccgacatccactgcgagaactgcaagaccactttgggctggaaatatgaacaggcctttgagagcagccagaagtacaaagaggggaagtacatcattgaactcaaccacatgatcaaagacaacggctgggactgacccccgctcccccgacgcatgtggctccagcccggcctggccgccagggagcgccactggcttcccgccacccgaagggagctctggaccctcagagcccctgcagaggacggatctagctcctgtatatatattttattgcatgcactgtgaccttggggggagaacagaagggggacgacgcccccgcacctcctgcgatctggctggcttggatctcgtttttaacccgttcctgccccacctgccctatagttatggcctgtgttctgctctcctggtcccagtgcaccgtctgctctgtgaactcctcccaccaggcccttcttaccccacgcgtgtctgtccccctcgttctgtagcgtttgtacataataaaacaatggagtggaaaaaaccaaaacaactcaacacaa

SEQ ID NO: 297097 - DNA, 591 bp, Homo sapiens
agccgacgcctagaggaccccgtggttcccctgaagaagatggccgaccggatcaggaagtatcagatcttgaacaatgaggtttttgccatcctgaacaaatacatgaagtccgtggagacagacagttccactgtggagcatgtgcgctgcttccagccacccatccaccagtccttggccaccacttgctaagcagaagatcctgcagacccttatctggaggaggaagagaagcaggagagagaaagccacagccagcctgccataggatccaactggacaacgtgtgggatggacctggaaacaagcacctccccaaacacatcaccactccctagggcggggcctgtgcatgctctcccatgacatctccatgctggtttctccatagcataaatgaaaaaaaaaaaaaaaaagtaaacagggcagtgtgtgctttttcttttctcccccctcaactatattaagaactcctagtttcaccctttctccatcccatcatcccacctatctgtggttgcttcccaagacctcctcccaagatagacatctcctacccagtgcccttgtgtgaccccaggactcaag

SEQ ID NO: 297098 - DNA, 504 bp, Homo sapiens
tttttttttgtgacagagtctcgcttcgtcacccaggctggagtacagtggctcaatctcagctcactgcaacctccacctcccaggttcaagcaattctgcctcaccctcccgagtagctgggactacagtgcagaatacagaaactgcagccatgaccacgcacgtcaccctggaagatgccctgtccaacgtggacctgcttgaagagcttcccctccccgaccagcagccatgcatcgagcctccaccttcctccatcatgtaccaggctaactttgacacaaactttgaggacaggaatgcatttgtcacgggcattgcaaggtacattgagcaggctacagtccactccagcatgatattttagatgcattgtctcatttgctcctgacatcaaccctgtgagaatgagatgctggaggaaggacatgagtatgcggtcatgctgtacacctggcgcagctgttcccgggccattcccaggtgagactgtccttgttg

SEQ ID NO: 297099 - DNA, 223 bp, Homo sapiens
aagtcttagttcttccttccccagcgtcctacaggcaattcgaaagaccatctgtgactgggagggagggcgagagccccctaatgacccatgcttgagaggggagaaggaccccaaaggtggatttgatatcaaggtgccccggcgtgctgtggggccatccagcacacagctgtactggtgcggaccatgcttgaatcaccaccagaatcttccagtaccg

SEQ ID NO: 297100 - DNA, 4301 bp, Homo sapiens
agcagcggggccggggcggggccgagcgcggcgcagcggagcggggcagagcatcctgcgccccggcgcggggccctgcggtagcctcaggcccctcccctggacccgccgcagagccagtgcagaatacagaaactgcagccatgaccacgcacgtcaccctggaagatgccctgtccaacgtggacctgcttgaagagcttcccctccccgaccagcagccatgcatcgagcctccaccttcctccatcatgtaccaggctaactttgacacaaactttgaggacaggaatgcatttgtcacgggcattgcaaggtacattgagcaggctacagtccactccagcatgaatgagatgctggaggaaggacatgagtatgcggtcatgctgtacacctggcgcagctgttcccgggccattccccaggtgaaatgcaacgagcagcccaaccgagtagagatctatgagaagacagtagaggtgctggagccggaggtcaccaagctcatgaagttcatgtattttcagcgcaaggccatcgagcggttctgcagcgaggtgaagcggctgtgccatgccgagcgcaggaaggactttgtctctgaggcctacctcctgacccttggcaagttcatcaacatgtttgctgtcctggatgagctaaagaacatgaagtgcagcgtcaagaatgaccactctgcctacaagagggcagcacagttcctgcggaagatggcagatccccagtctatccaggagtcgcagaacctttccatgttcctggccaaccacaacaggatcacccagtgtctccaccagcaacttgaagtgatcccaggctatgaggagctgctggctgacattgtcaacatctgtgtggattactacgagaacaagatgtacctgactcccagtgagaaacatatgctcctcaaggtgatgggctttggcctctacctaatggatggaaatgtcagtaacatttacaaactggatgccaagaagagaattaatcttagcaaaattgataaattctttaagcagctgcaggtggtgccccttttcggcgacatgcagatagagctggccagatacattaagaccagtgctcactatgaagagaacaagtccaagtggacgtgcacccagagcagcatcagcccccagtacaatatctgcgagcagatggttcagatccgggatgaccacatccgcttcatctccgagctcgctcgctacagcaacagtgaggtggtgacgggctcagggctggacagccagaagtcagacgaggagtatcgcgagctcttcgacctagccctgcggggtctgcagcttctatccaagtggagcgcccacgtcatggaggtgtactcttggaagctggttcatcccacagacaagttctgcaacaaggactgtcctggcaccgcggaggaatatgagagagccacacgctacaattacaccagtgaggaaaaatttgccttcgttgaggtgatcgccatgatcaaaggcctgcaggtgctcatgggcaggatggagagcgtcttcaaccaggccatcaggaacaccatctacgcggcattgcaggacttcgcccaggtgacgctgcgtgagcccctgcggcaggcggtacggaagaagaagaatgtcctcatcagcgtcctacaggcaattcgaaagaccatctgtgactgggagggagggcgagagccccctaatgacccatgcttgagaggggagaaggaccccaaaggtggatttgatatcaaggtgccccggcgtgctgtggggccatccagcacacagctgtacatggtgcggaccatgcttgaatcactcattgcagacaaaagcggctccaagaagaccctgaggagcagcctggatggacccattgtcctcgccatagaggactttcacaaacagtccttcttcttcacacatctgctcaacatcagtgaagccctgcagcagtgttgtgacctctcccagctctggttccgagaattcttcctggagttaaccatgggccgacgaatccagttccccatcgagatgtccatgccctggattctaacggaccatatcctggaaaccaaagaaccttccatgatggagtatgtcctctaccctctggatctgtacaacgacagcgcctactatgctctgaccaagtttaaaaagcagttcctgtacgatgagatagaagctgaggtgaacctgtgttttgatcagtttgtctacaagctggcagaccagatctttgcttactacaaagccatggctggcagtgtcctgttggataaacgttttcgagctgagtgtaagaattatggcgtcatcattccgtatccaccgtccaatcgctatgaaacactgctgaagcagagacacgtccagctgttgggtagatcaattgacttgaacagactcattacccagcgcatctctgccgccatgtataaatccttggaccaagctatcagccgctttgagagtgaggacctgacctccattgtggagctggagtggctgctggagattaaccggctcacgcatcggctgctctgtaagcatatgacgctggacagcttcgatgccatgttccgagaggccaatcacaatgtgtccgccccctatggccgtatcaccctgcatgtcttctgggaactgaactttgactttctccccaactactgctacaatgggtccactaaccgttttgtgcggactgccattcctttcacccaagaaccacaacgagacaaacctgccaacgtccagccttattacctctatggatccaagcctctcaacattgcctacagccacatctacagctcctacaggaatttcgtggggccacctcatttcaagactatctgcagactcctgggttatcagggcatcgctgtggtcatggaggaactgctaaagattgtgaagagcttgctccaaggaaccattctccagtatgtgaaaacactgatagaggtgatgcccaagatatgccgcttgccccgacatgagtatggctccccagggatcctggagttcttccaccaccagctgaaggacatcattgagtacgcagagctcaaaacagacgtgttccagagcctgagggaagtgggcaatgccatcctcttctgcctcctcatagagcaagctctgtctcaggaggaggtctgcgatttgctccatgccgcacccttccaaaacatcttgcctagagtctacatcaaagagggggagcgcctggaggtccggatgaaacgtctggaagccaagtatgccccgctccacctggtccctctgatcgagcggctggggacccctcagcaaatcgccattgctcgcgagggtgacctcctgaccaaggagcggctgtgctgtggcctgtccatgttcgaggtcatcctgacccgcattcggagctacctgcaggaccccatctggcggggcccaccgcccaccaatggcgtcatgcacgtcgatgagtgtgtggagttccaccggctgtggagcgccatgcagttcgtgtactgcatccctgtgggaaccaacgagttcacagctgagcagtgtttcggcgatggcttgaactgggctggttgctccatcattgtcctgctgggccagcagcgtcgctttgacctgttcgacttctgttaccacctgctaaaagtgcagaggcaggacgggaaggatgaaatcattaagaatgtgcccctgaagaagatggccgaccggatcaggaagtatcagatcttgaacaatgaggtttttgccatcctgaacaaatacatgaagtccgtggagacagacagttccactgtggagcatgtgcgctgcttccagccacccatccaccagtccttggccaccacttgctaagcagaagatcctgcagacccttatctggaggaggaagagaagcaggagagagaaagccacagccagcctgccataggatccaactggacaacgtgtgggatggacctggaaacaagcacctccccaaacacatcaccactccctagggcggggcctgtgcatgctctcccatgacatctccatgctggtttctccatagcataaatgaaaaaaaaaaaaaaaaagtaaacagggcagtgtgtgctttttcttttctcccccctcaactatattaagaactcctagtttcaccctttctccatcccatcatcccacctatctgtggttgcttcccaagacctcctcccaagatagacatctcctacccagtgcccttgtgtgaccccaggactcaag

SEQ ID NO: 297101 - DNA, 4287 bp, Homo sapiens
agcagcggggccggggcggggccgagcgcggcgcagcggagcggggcagagcatcctgcgccccggcgcggggccctgcggtagcctcaggcccctcccctggacccgccgcagagccagtgcagaatacagaaactgcagccatgaccacgcacgtcaccctggaagatgccctgtccaacgtggacctgcttgaagagcttcccctccccgaccagcagccatgcatcgagcctccaccttcctccatcatgtaccaggctaactttgacacaaactttgaggacaggaatgcatttgtcacgggcattgcaaggtacattgagcaggctacagtccactccagcatgaatgagatgctggaggaaggacatgagtatgcggtcatgctgtacacctggcgcagctgttcccgggccattccccaggtgaaatgcaacgagcagcccaaccgagtagagatctatgagaagacagtagaggtgctggagccggaggtcaccaagctcatgaagttcatgtattttcagcgcaaggccatcgagcggttctgcagcgaggtgaagcggctgtgccatgccgagcgcaggaaggactttgtctctgaggcctacctcctgacccttggcaagttcatcaacatgtttgctgtcctggatgagctaaagaacatgaagtgcagcgtcaagaatgaccactctgcctacaagagggcagcacagttcctgcggaagatggcagatccccagtctatccaggagtcgcagaacctttccatgttcctggccaaccacaacaggatcacccagtgtctccaccagcaacttgaagtgatcccaggctatgaggagctgctggctgacattgtcaacatctgtgtggattactacgagaacaagatgtacctgactcccagtgagaaacatatgctcctcaaggtgatgggctttggcctctacctaatggatggaaatgtcagtaacatttacaaactggatgccaagaagagaattaatcttagcaaaattgataaattctttaagcagctgcaggtggtgccccttttcggcgacatgcagatagagctggccagatacattaagaccagtgctcactatgaagagaacaagtccaagtggacgtgcacccagagcagcatcagcccccagtacaatatctgcgagcagatggttcagatccgggatgaccacatccgcttcatctccgagctcgctcgctacagcaacagtgaggtggtgacgggctcagggctggacagccagaagtcagacgaggagtatcgcgagctcttcgacctagccctgcggggtctgcagcttctatccaagtggagcgcccacgtcatggaggtgtactcttggaagctggttcatcccacagacaagttctgcaacaaggactgtcctggcaccgcggaggaatatgagagagccacacgctacaattacaccagtgaggaaaaatttgccttcgttgaggtgatcgccatgatcaaaggcctgcaggtgctcatgggcaggatggagagcgtcttcaaccaggccatcaggaacaccatctacgcggcattgcaggacttcgcccaggtgacgctgcgtgagcccctgcggcaggcggtacggaagaagaagaatgtcctcatcagcgtcctacaggcaattcgaaagaccatctgtgactgggagggagggcgagagccccctaatgacccatgcttgagaggggagaaggaccccaaaggtggatttgatatcaaggtgccccggcgtgctgtggggccatccagcacacagctgtacatggtgcggaccatgcttgaatcactcattgcagacaaaagcggctccaagaagaccctgaggagcagcctggatggacccattgtcctcgccatagaggactttcacaaacagtccttcttcttcacacatctgctcaacatcagtgaagccctgcagcagtgttgtgacctctcccagctctggttccgagaattcttcctggagttaaccatgggccgacgaatccagttccccatcgagatgtccatgccctggattctaacggaccatatcctggaaaccaaagaaccttccatgatggagtatgtcctctaccctctggatctgtacaacgacagcgcctactatgctctgaccaagtttaaaaagcagttcctgtacgatgagatagaagctgaggtgaacctgtgttttgatcagtttgtctacaagctggcagaccagatctttgcttactacaaagccatggctggcagtgtcctgttggataaacgttttcgagctgagtgtaagaattatggcgtcatcattccgtatccaccgtccaatcgctatgaaacactgctgaagcagagacacgtccagctgttgggtagatcaattgacttgaacagactcattacccagcgcatctctgccgccatgtataaatccttggaccaagctatcagccgctttgagagtgaggacctgacctccattgtggagctggagtggctgctggagattaaccggctcacgcatcggctgctctgtaagcatatgacgctggacagcttcgatgccatgttccgagaggccaatcacaatgtgtccgccccctatggccgtatcaccctgcatgtcttctgggaactgaactttgactttctccccaactactgctacaatgggtccactaaccgttttgtgcggactgccattcctttcacccaagaaccacaacgagacaaacctgccaacgtccagccttattacctctatggatccaagcctctcaacattgcctacagccacatctacagctcctacaggaatttcgtggggccacctcatttcaagactatctgcagactcctgggttatcagggcatcgctgtggtcatggaggaactgctaaagattgtgaagagcttgctccaaggaaccattctccagtatgtgaaaacactgatagaggtgatgcccaagatatgccgcttgccccgacatgagtatggctccccagggatcctggagttcttccaccaccagctgaaggacatcattgagtacgcagagctcaaaacagacgtgttccagagcctgagggaagtgggcaatgccatcctcttctgcctcctcatagagcaagctctgtctcaggaggaggtctgcgatttgctccatgccgcacccttccaaaacatcttgcctagagtctacatcaaagagggggagcgcctggaggtccggatgaaacgtctggaagccaagtatgccccgctccacctggtccctctgatcgagcggctggggacccctcagcaaatcgccattgctcgcgagggtgacctcctgaccaaggagcggctgtgctgtggcctgtccatgttcgaggtcatcctgacccgcattcggagctacctgcaggaccccatctggcggggcccaccgcccaccaatggcgtcatgcacgtcgatgagtgtgtggagttccaccggctgtggagcgccatgcagttcgtgtactgcatccctgtgggaaccaacgagttcacagctgagcagtgtttcggcgatggcttgaactgggctggttgctccatcattgtcctgctgggccagcagcgtcgctttgacctgttcgacttctgttaccacctgctaaaagtgcagaggcaggacgggaaggatgaaatcattaagaatgtgcccctgaagaagatggccgaccggatcaggaagtatcagatcttgaacaatgaggtttttgccatcctgaacaaatacatgaagtccgtggagacagacagttccactgtggagcatgtgcgctgcttccagccacccatccaccagtccttggccaccacttgctaagcagaagatcctgcagacccttatctggaggaggaagagaagcaggagagagaaagccacagccagcctgccataggatccaactggacaacgtgtgggatggacctggaaacaagcacctccccaaacacatcaccactccctagggcggggcctgtgcatgctctcccatgacatctccatgctggtttctccatagcataaatgaaaaaaaaaaaaaaaaggtttaaaaaaaaaaaaaaaaaaaaaaaaaaaaaaaaaaaaaaaaaaaagaacaaagggggggggggggcccaaaaaaaaaaacgaataaaaggagaaaaaaaaagaacgccttgggggggggcccggaccccaattccccctaaaggggggggattta

SEQ ID NO: 297102 - DNA, 4452 bp, Homo sapiens
atcaggctaggtagcgaggctgggtggttgtagagttaaggaagggcctcttcctctgtgagaattcagcattttgcaaccatccaaaaatgttgagggcatgctttgcttccagggcagacagagcagcacagtgagcatgggacacaggatccctgacttgctgtgtgcccttaaaccagccactacctctctgacgttcaaaattgagcaatggaaggcagcctgcccaactgttacctgcctgtcatcatgaaagcctgcggatgagtgcagaatacagaaactgcagccatgaccacgcacgtcaccctggaagatgccctgtccaacgtggacctgcttgaagagcttcccctccccgaccagcagccatgcatcgagcctccaccttcctccatcatgtaccaggctaactttgacacaaactttgaggacaggaatgcatttgtcacgggcattgcaaggtacattgagcaggctacagtccactccagcatgaatgagatgctggaggaaggacatgagtatgcggtcatgctgtacacctggcgcagctgttcccgggccattccccaggtgaaatgcaacgagcagcccaaccgagtagagatctatgagaagacagtagaggtgctggagccggaggtcaccaagctcatgaagttcatgtattttcagcgcaaggccatcgagcggttctgcagcgaggtgaagcggctgtgccatgccgagcgcaggaaggactttgtctctgaggcctacctcctgacccttggcaagttcatcaacatgtttgctgtcctggatgagctaaagaacatgaagtgcagcgtcaagaatgaccactctgcctacaagagggcagcacagttcctgcggaagatggcagatccccagtctatccaggagtcgcagaacctttccatgttcctggccaaccacaacaggatcacccagtgtctccaccagcaacttgaagtgatcccaggctatgaggagctgctggctgacattgtcaacatctgtgtggattactacgagaacaagatgtacctgactcccagtgagaaacatatgctcctcaaggtgatgggctttggcctctacctaatggatggaaatgtcagtaacatttacaaactggatgccaagaagagaattaatcttagcaaaattgataaattctttaagcagctgcaggtggtgccccttttcggcgacatgcagatagagctggccagatacattaagaccagtgctcactatgaagagaacaagtccaagtggacgtgcacccagagcagcatcagcccccagtacaatatctgcgagcagatggttcagatccgggatgaccacatccgcttcatctccgagctcgctcgctacagcaacagtgaggtggtgacgggctcagggctggacagccagaagtcagacgaggagtatcgcgagctcttcgacctagccctgcggggtctgcagcttctatccaagtggagcgcccacgtcatggaggtgtactcttggaagctggttcatcccacagacaagttctgcaacaaggactgtcctggcaccgcggaggaatatgagagagccacacgctacaattacaccagtgaggaaaaatttgccttcgttgaggtgatcgccatgatcaaaggcctgcaggtgctcatgggcaggatggagagcgtcttcaaccaggccatcaggaacaccatctacgcggcattgcaggacttcgcccaggtgacgctgcgtgagcccctgcggcaggcggtacggaagaagaagaatgtcctcatcagcgtcctacaggcaattcgaaagaccatctgtgactgggagggagggcgagagccccctaatgacccatgcttgagaggggagaaggaccccaaaggtggatttgatatcaaggtgccccggcgtgctgtggggccatccagcacacagctgtacatggtgcggaccatgcttgaatcactcattgcagacaaaagcggctccaagaagaccctgaggagcagcctggatggacccattgtcctcgccatagaggactttcacaaacagtccttcttcttcacacatctgctcaacatcagtgaagccctgcagcagtgttgtgacctctcccagctctggttccgagaattcttcctggagttaaccatgggccgacgaatccagttccccatcgagatgtccatgccctggattctaacggaccatatcctggaaaccaaagaaccttccatgatggagtatgtcctctaccctctggatctgtacaacgacagcgcctactatgctctgaccaagtttaaaaagcagttcctgtacgatgagatagaagctgaggtgaacctgtgttttgatcagtttgtctacaagctggcagaccagatctttgcttactacaaagccatggctggcagtgtcctgttggataaacgttttcgagctgagtgtaagaattatggcgtcatcattccgtatccaccgtccaatcgctatgaaacactgctgaagcagagacacgtccagctgttgggtagatcaattgacttgaacagactcattacccagcgcatctctgccgccatgtataaatccttggaccaagctatcagccgctttgagagtgaggacctgacctccattgtggagctggagtggctgctggagattaaccggctcacgcatcggctgctctgtaagcatatgacgctggacagcttcgatgccatgttccgagaggccaatcacaatgtgtccgccccctatggccgtatcaccctgcatgtcttctgggaactgaactttgactttctccccaactactgctacaatgggtccactaaccgttttgtgcggactgccattcctttcacccaagaaccacaacgagacaaacctgccaacgtccagccttattacctctatggatccaagcctctcaacattgcctacagccacatctacagctcctacaggaatttcgtggggccacctcatttcaagactatctgcagactcctgggttatcagggcatcgctgtggtcatggaggaactgctaaagattgtgaagagcttgctccaaggaaccattctccagtatgtgaaaacactgatagaggtgatgcccaagatatgccgcttgccccgacatgagtatggctccccagggatcctggagttcttccaccaccagctgaaggacatcattgagtacgcagagctcaaaacagacgtgttccagagcctgagggaagtgggcaatgccatcctcttctgcctcctcatagagcaagctctgtctcaggaggaggtctgcgatttgctccatgccgcacccttccaaaacatcttgcctagagtctacatcaaagagggggagcgcctggaggtccggatgaaacgtctggaagccaagtatgccccgctccacctggtccctctgatcgagcggctggggacccctcagcaaatcgccattgctcgcgagggtgacctcctgaccaaggagcggctgtgctgtggcctgtccatgttcgaggtcatcctgacccgcattcggagctacctgcaggaccccatctggcggggcccaccgcccaccaatggcgtcatgcacgtcgatgagtgtgtggagttccaccggctgtggagcgccatgcagttcgtgtactgcatccctgtgggaaccaacgagttcacagctgagcagtgtttcggcgatggcttgaactgggctggttgctccatcattgtcctgctgggccagcagcgtcgctttgacctgttcgacttctgttaccacctgctaaaagtgcagaggcaggacgggaaggatgaaatcattaagaatgtgcccctgaagaagatggccgaccggatcaggaagtatcagatcttgaacaatgaggtttttgccatcctgaacaaatacatgaagtccgtggagacagacagttccactgtggagcatgtgcgctgcttccagccacccatccaccagtccttggccaccacttgctaagcagaagatcctgcagacccttatctggaggaggaagagaagcaggagagagaaagccacagccagcctgccataggatccaactggacaacgtgtgggatggacctggaaacaagcacctccccaaacacatcaccactccctagggcggggcctgtgcatgctctcccatgacatctccatgctggtttctccatagcataaatgaaaaaaaaaaaaaaaaagtaaacagggcagtgtgtgctttttcttttctcccccctcaactatattaagaactcctagtttcaccctttctccatcccatcatcccacctatctgtggttgcttcccaagacctcctcccaagatagacatctcctacccagtgcccttgtgtgaccccaggactcaag

SEQ ID NO: 297103 - DNA, 4466 bp, Homo sapiens
  misc_feature (13)..(13): n is a, c, g, or t
  misc_feature (17)..(17): n is a, c, g, or t
  misc_feature (35)..(35): n is a, c, g, or t
tcgacggcagtantcanggcgttatgtaggaggcngggtggcggtagagttaaggaagggcctcttcctctgtgagaattcagcattttgcaaccatccaaaaatgttgagggcatgctttgcttccagggcagacagagcagcacagtgagcatgggacacaggatccctgacttgctgtgtgcccttaaaccagccactacctctctgacgttcaaaattgagcaatggaaggcagcctgcccaactgttacctgcctgtcatcatgaaagcctgcggatgagtgcagaatacagaaactgcagccatgaccacgcacgtcaccctggaagatgccctgtccaacgtggacctgcttgaagagcttcccctccccgaccagcagccatgcatcgagcctccaccttcctccatcatgtaccaggctaactttgacacaaactttgaggacaggaatgcatttgtcacgggcattgcaaggtacattgagcaggctacagtccactccagcatgaatgagatgctggaggaaggacatgagtatgcggtcatgctgtacacctggcgcagctgttcccgggccattccccaggtgaaatgcaacgagcagcccaaccgagtagagatctatgagaagacagtagaggtgctggagccggaggtcaccaagctcatgaagttcatgtattttcagcgcaaggccatcgagcggttctgcagcgaggtgaagcggctgtgccatgccgagcgcaggaaggactttgtctctgaggcctacctcctgacccttggcaagttcatcaacatgtttgctgtcctggatgagctaaagaacatgaagtgcagcgtcaagaatgaccactctgcctacaagagggcagcacagttcctgcggaagatggcagatccccagtctatccaggagtcgcagaacctttccatgttcctggccaaccacaacaggatcacccagtgtctccaccagcaacttgaagtgatcccaggctatgaggagctgctggctgacattgtcaacatctgtgtggattactacgagaacaagatgtacctgactcccagtgagaaacatatgctcctcaaggtgatgggctttggcctctacctaatggatggaaatgtcagtaacatttacaaactggatgccaagaagagaattaatcttagcaaaattgataaattctttaagcagctgcaggtggtgccccttttcggcgacatgcagatagagctggccagatacattaagaccagtgctcactatgaagagaacaagtccaagtggacgtgcacccagagcagcatcagcccccagtacaatatctgcgagcagatggttcagatccgggatgaccacatccgcttcatctccgagctcgctcgctacagcaacagtgaggtggtgacgggctcagggctggacagccagaagtcagacgaggagtatcgcgagctcttcgacctagccctgcggggtctgcagcttctatccaagtggagcgcccacgtcatggaggtgtactcttggaagctggttcatcccacagacaagttctgcaacaaggactgtcctggcaccgcggaggaatatgagagagccacacgctacaattacaccagtgaggaaaaatttgccttcgttgaggtgatcgccatgatcaaaggcctgcaggtgctcatgggcaggatggagagcgtcttcaaccaggccatcaggaacaccatctacgcggcattgcaggacttcgcccaggtgacgctgcgtgagcccctgcggcaggcggtacggaagaagaagaatgtcctcatcagcgtcctacaggcaattcgaaagaccatctgtgactgggagggagggcgagagccccctaatgacccatgcttgagaggggagaaggaccccaaaggtggatttgatatcaaggtgccccggcgtgctgtggggccatccagcacacagctgtacatggtgcggaccatgcttgaatcactcattgcagacaaaagcggctccaagaagaccctgaggagcagcctggatggacccattgtcctcgccatagaggactttcacaaacagtccttcttcttcacacatctgctcaacatcagtgaagccctgcagcagtgttgtgacctctcccagctctggttccgagaattcttcctggagttaaccatgggccgacgaatccagttccccatcgagatgtccatgccctggattctaacggaccatatcctggaaaccaaagaaccttccatgatggagtatgtcctctaccctctggatctgtacaacgacagcgcctactatgctctgaccaagtttaaaaagcagttcctgtacgatgagatagaagctgaggtgaacctgtgttttgatcagtttgtctacaagctggcagaccagatctttgcttactacaaagccatggctggcagtgtcctgttggataaacgttttcgagctgagtgtaagaattatggcgtcatcattccgtatccaccgtccaatcgctatgaaacactgctgaagcagagacacgtccagctgttgggtagatcaattgacttgaacagactcattacccagcgcatctctgccgccatgtataaatccttggaccaagctatcagccgctttgagagtgaggacctgacctccattgtggagctggagtggctgctggagattaaccggctcacgcatcggctgctctgtaagcatatgacgctggacagcttcgatgccatgttccgagaggccaatcacaatgtgtccgccccctatggccgtatcaccctgcatgtcttctgggaactgaactttgactttctccccaactactgctacaatgggtccactaaccgttttgtgcggactgccattcctttcacccaagaaccacaacgagacaaacctgccaacgtccagccttattacctctatggatccaagcctctcaacattgcctacagccacatctacagctcctacaggaatttcgtggggccacctcatttcaagactatctgcagactcctgggttatcagggcatcgctgtggtcatggaggaactgctaaagattgtgaagagcttgctccaaggaaccattctccagtatgtgaaaacactgatagaggtgatgcccaagatatgccgcttgccccgacatgagtatggctccccagggatcctggagttcttccaccaccagctgaaggacatcattgagtacgcagagctcaaaacagacgtgttccagagcctgagggaagtgggcaatgccatcctcttctgcctcctcatagagcaagctctgtctcaggaggaggtctgcgatttgctccatgccgcacccttccaaaacatcttgcctagagtctacatcaaagagggggagcgcctggaggtccggatgaaacgtctggaagccaagtatgccccgctccacctggtccctctgatcgagcggctggggacccctcagcaaatcgccattgctcgcgagggtgacctcctgaccaaggagcggctgtgctgtggcctgtccatgttcgaggtcatcctgacccgcattcggagctacctgcaggaccccatctggcggggcccaccgcccaccaatggcgtcatgcacgtcgatgagtgtgtggagttccaccggctgtggagcgccatgcagttcgtgtactgcatccctgtgggaaccaacgagttcacagctgagcagtgtttcggcgatggcttgaactgggctggttgctccatcattgtcctgctgggccagcagcgtcgctttgacctgttcgacttctgttaccacctgctaaaagtgcagaggcaggacgggaaggatgaaatcattaagaatgtgcccctgaagaagatggccgaccggatcaggaagtatcagatcttgaacaatgaggtttttgccatcctgaacaaatacatgaagtccgtggagacagacagttccactgtggagcatgtgcgctgcttccagccacccatccaccagtccttggccaccacttgctaagcagaagatcctgcagacccttatctggaggaggaagagaagcaggagagagaaagccacagccagcctgccataggatccaactggacaacgtgtgggatggacctggaaacaagcacctccccaaacacatcaccactccctagggcggggcctgtgcatgctctcccatgacatctccatgctggtttctccatagcataaatgaaaaaaaaaaaaaaaaagtaaacagggcagtgtgtgctttttcttttctcccccctcaactatattaagaactcctagtttcaccctttctccatcccatcatcccacctatctgtggttgcttcccaagacctcctcccaagatagacatctcctacccagtgcccttgtgtgaccccaggactcaag

SEQ ID NO: 297104 - DNA, 4376 bp, Homo sapiens
agcagcggggccggggcggggccgagcgcggcgcagcggagcggggcagagcatcctgcgccccggcgcggggccctgcggtagcctcaggcccctcccctggacccgccgcagagccagtgcagaatacagaaactgcagccatgaccacgcacgtcaccctggaagatgccctgtccaacgtggacctgcttgaagagcttcccctccccgaccagcagccatgcatcgagcctccaccttcctccatcatgtaccaggctaactttgacacaaactttgaggacaggaatgcatttgtcacgggcattgcaaggtacattgagcaggctacagtccactccagcatgaatgagatgctggaggaaggacatgagtatgcggtcatgctgtacacctggcgcagctgttcccgggccattccccaggtgaaatgcaacgagcagcccaaccgagtagagatctatgagaagacagtagaggtgctggagccggaggtcaccaagctcatgaagttcatgtattttcagcgcaaggccatcgagcggttctgcagcgaggtgaagcggctgtgccatgccgagcgcaggaaggactttgtctctgaggcctacctcctgacccttggcaagttcatcaacatgtttgctgtcctggatgagctaaagaacatgaagtgcagcgtcaagaatgaccactctgcctacaagagggcagcacagttcctgcggaagatggcagatccccagtctatccaggagtcgcagaacctttccatgttcctggccaaccacaacaggatcacccagtgtctccaccagcaacttgaagtgatcccaggctatgaggagctgctggctgacattgtcaacatctgtgtggattactacgagaacaagatgtacctgactcccagtgagaaacatatgctcctcaaggtgatgggctttggcctctacctaatggatggaaatgtcagtaacatttacaaactggatgccaagaagagaattaatcttagcaaaattgataaattctttaagcagctgcaggtggtgccccttttcggcgacatgcagatagagctggccagatacattaagaccagtgctcactatgaagagaacaagtccaagtggacgtgcacccagagcagcatcagcccccagtacaatatctgcgagcagatggttcagatccgggatgaccacatccgcttcatctccgagctcgctcgctacagcaacagtgaggtggtgacgggctcagggctggacagccagaagtcagacgaggagtatcgcgagctcttcgacctagccctgcggggtctgcagcttctatccaagtggagcgcccacgtcatggaggtgtactcttggaagctggttcatcccacagacaagttctgcaacaaggactgtcctggcaccgcggaggaatatgagagagccacacgctacaattacaccagtgaggaaaaatttgccttcgttgaggtgatcgccatgatcaaaggcctgcaggtgctcatgggcaggatggagagcgtcttcaaccaggccatcaggaacaccatctacgcggcattgcaggacttcgcccaggtgacgctgcgtgagcccctgcggcaggcggtacggaagaagaagaatgtcctcatcagcgtcctacaggcaattcgaaagaccatctgtgactgggagggagggcgagagccccctaatgacccatgcttgagaggggagaaggaccccaaaggtggatttgatatcaaggtgccccggcgtgctgtggggccatccagcacacaggcctgccagtggtccccgagggctttgtttcaccccactggtggcacacagggccgaagaggctgccgatccctgctgtacatggtgcggaccatgcttgaatcactcattgcagacaaaagcggctccaagaagaccctgaggagcagcctggatggacccattgtcctcgccatagaggactttcacaaacagtccttcttcttcacacatctgctcaacatcagtgaagccctgcagcagtgttgtgacctctcccagctctggttccgagaattcttcctggagttaaccatgggccgacgaatccagttccccatcgagatgtccatgccctggattctaacggaccatatcctggaaaccaaagaaccttccatgatggagtatgtcctctaccctctggatctgtacaacgacagcgcctactatgctctgaccaagtttaaaaagcagttcctgtacgatgagatagaagctgaggtgaacctgtgttttgatcagtttgtctacaagctggcagaccagatctttgcttactacaaagccatggctggcagtgtcctgttggataaacgttttcgagctgagtgtaagaattatggcgtcatcattccgtatccaccgtccaatcgctatgaaacactgctgaagcagagacacgtccagctgttgggtagatcaattgacttgaacagactcattacccagcgcatctctgccgccatgtataaatccttggaccaagctatcagccgctttgagagtgaggacctgacctccattgtggagctggagtggctgctggagattaaccggctcacgcatcggctgctctgtaagcatatgacgctggacagcttcgatgccatgttccgagaggccaatcacaatgtgtccgccccctatggccgtatcaccctgcatgtcttctgggaactgaactttgactttctccccaactactgctacaatgggtccactaaccgttttgtgcggactgccattcctttcacccaagaaccacaacgagacaaacctgccaacgtccagccttattacctctatggatccaagcctctcaacattgcctacagccacatctacagctcctacaggaatttcgtggggccacctcatttcaagactatctgcagactcctgggttatcagggcatcgctgtggtcatggaggaactgctaaagattgtgaagagcttgctccaaggaaccattctccagtatgtgaaaacactgatagaggtgatgcccaagatatgccgcttgccccgacatgagtatggctccccagggatcctggagttcttccaccaccagctgaaggacatcattgagtacgcagagctcaaaacagacgtgttccagagcctgagggaagtgggcaatgccatcctcttctgcctcctcatagagcaagctctgtctcaggaggaggtctgcgatttgctccatgccgcacccttccaaaacatcttgcctagagtctacatcaaagagggggagcgcctggaggtccggatgaaacgtctggaagccaagtatgccccgctccacctggtccctctgatcgagcggctggggacccctcagcaaatcgccattgctcgcgagggtgacctcctgaccaaggagcggctgtgctgtggcctgtccatgttcgaggtcatcctgacccgcattcggagctacctgcaggaccccatctggcggggcccaccgcccaccaatggcgtcatgcacgtcgatgagtgtgtggagttccaccggctgtggagcgccatgcagttcgtgtactgcatccctgtgggaaccaacgagttcacagctgagcagtgtttcggcgatggcttgaactgggctggttgctccatcattgtcctgctgggccagcagcgtcgctttgacctgttcgacttctgttaccacctgctaaaagtgcagaggcaggacgggaaggatgaaatcattaagaatgtgcccctgaagaagatggccgaccggatcaggaagtatcagatcttgaacaatgaggtttttgccatcctgaacaaatacatgaagtccgtggagacagacagttccactgtggagcatgtgcgctgcttccagccacccatccaccagtccttggccaccacttgctaagcagaagatcctgcagacccttatctggaggaggaagagaagcaggagagagaaagccacagccagcctgccataggatccaactggacaacgtgtgggatggacctggaaacaagcacctccccaaacacatcaccactccctagggcggggcctgtgcatgctctcccatgacatctccatgctggtttctccatagcataaatgaaaaaaaaaaaaaaaaagtaaacagggcagtgtgtgctttttcttttctcccccctcaactatattaagaactcctagtttcaccctttctccatcccatcatcccacctatctgtggttgcttcccaagacctcctcccaagatagacatctcctacccagtgcccttgtgtgaccccaggactcaag

SEQ ID NO: 297105 - DNA, 4765 bp, Homo sapiens
agcagcggggccggggcggggccgagcgcggcgcagcggagcggggcagagcatcctgcgccccggcgcggggccctgcggtagcctcaggcccctcccctggacccgccgcagagccaggtaagcggccctcgcaggcctcgggccgggcacggggactaggatgccgccggggacggggatgaggccgtgaggatgcgcgaagggccgccccctctcccggcccgcggggggcgctcggcgctgtgcccgggctagcccgaggcccggcctcaggccccacgcggcccctttccccctcggacccaccgtgcgtcccgcggcacggaccctctgcccgggaggcgcgggcacatcgcggagctccggcgcggcggcgggggagccgcagcagcaggtgcgcggcctgggccggagccgccagcccgggaggaggcggtgctaatctcagggaccggagacacctgcagcggccgcgagcccggcagcggcgacatcctcgagtccagtgcagaatacagaaactgcagccatgaccacgcacgtcaccctggaagatgccctgtccaacgtggacctgcttgaagagcttcccctccccgaccagcagccatgcatcgagcctccaccttcctccatcatgtaccaggctaactttgacacaaactttgaggacaggaatgcatttgtcacgggcattgcaaggtacattgagcaggctacagtccactccagcatgaatgagatgctggaggaaggacatgagtatgcggtcatgctgtacacctggcgcagctgttcccgggccattccccaggtgaaatgcaacgagcagcccaaccgagtagagatctatgagaagacagtagaggtgctggagccggaggtcaccaagctcatgaagttcatgtattttcagcgcaaggccatcgagcggttctgcagcgaggtgaagcggctgtgccatgccgagcgcaggaaggactttgtctctgaggcctacctcctgacccttggcaagttcatcaacatgtttgctgtcctggatgagctaaagaacatgaagtgcagcgtcaagaatgaccactctgcctacaagagggcagcacagttcctgcggaagatggcagatccccagtctatccaggagtcgcagaacctttccatgttcctggccaaccacaacaggatcacccagtgtctccaccagcaacttgaagtgatcccaggctatgaggagctgctggctgacattgtcaacatctgtgtggattactacgagaacaagatgtacctgactcccagtgagaaacatatgctcctcaaggtgatgggctttggcctctacctaatggatggaaatgtcagtaacatttacaaactggatgccaagaagagaattaatcttagcaaaattgataaattctttaagcagctgcaggtggtgccccttttcggcgacatgcagatagagctggccagatacattaagaccagtgctcactatgaagagaacaagtccaagtggacgtgcacccagagcagcatcagcccccagtacaatatctgcgagcagatggttcagatccgggatgaccacatccgcttcatctccgagctcgctcgctacagcaacagtgaggtggtgacgggctcagggctggacagccagaagtcagacgaggagtatcgcgagctcttcgacctagccctgcggggtctgcagcttctatccaagtggagcgcccacgtcatggaggtgtactcttggaagctggttcatcccacagacaagttctgcaacaaggactgtcctggcaccgcggaggaatatgagagagccacacgctacaattacaccagtgaggaaaaatttgccttcgttgaggtgatcgccatgatcaaaggcctgcaggtgctcatgggcaggatggagagcgtcttcaaccaggccatcaggaacaccatctacgcggcattgcaggacttcgcccaggtgacgctgcgtgagcccctgcggcaggcggtacggaagaagaagaatgtcctcatcagcgtcctacaggcaattcgaaagaccatctgtgactgggagggagggcgagagccccctaatgacccatgcttgagaggggagaaggaccccaaaggtggatttgatatcaaggtgccccggcgtgctgtggggccatccagcacacaggcctgccagtggtccccgagggctttgtttcaccccactggtggcacacagggccgaagaggctgccgatccctgctgtacatggtgcggaccatgcttgaatcactcattgcagacaaaagcggctccaagaagaccctgaggagcagcctggatggacccattgtcctcgccatagaggactttcacaaacagtccttcttcttcacacatctgctcaacatcagtgaagccctgcagcagtgttgtgacctctcccagctctggttccgagaattcttcctggagttaaccatgggccgacgaatccagttccccatcgagatgtccatgccctggattctaacggaccatatcctggaaaccaaagaaccttccatgatggagtatgtcctctaccctctggatctgtacaacgacagcgcctactatgctctgaccaagtttaaaaagcagttcctgtacgatgagatagaagctgaggtgaacctgtgttttgatcagtttgtctacaagctggcagaccagatctttgcttactacaaagccatggctggcagtgtcctgttggataaacgttttcgagctgagtgtaagaattatggcgtcatcattccgtatccaccgtccaatcgctatgaaacactgctgaagcagagacacgtccagctgttgggtagatcaattgacttgaacagactcattacccagcgcatctctgccgccatgtataaatccttggaccaagctatcagccgctttgagagtgaggacctgacctccattgtggagctggagtggctgctggagattaaccggctcacgcatcggctgctctgtaagcatatgacgctggacagcttcgatgccatgttccgagaggccaatcacaatgtgtccgccccctatggccgtatcaccctgcatgtcttctgggaactgaactttgactttctccccaactactgctacaatgggtccactaaccgttttgtgcggactgccattcctttcacccaagaaccacaacgagacaaacctgccaacgtccagccttattacctctatggatccaagcctctcaacattgcctacagccacatctacagctcctacaggaatttcgtggggccacctcatttcaagactatctgcagactcctgggttatcagggcatcgctgtggtcatggaggaactgctaaagattgtgaagagcttgctccaaggaaccattctccagtatgtgaaaacactgatagaggtgatgcccaagatatgccgcttgccccgacatgagtatggctccccagggatcctggagttcttccaccaccagctgaaggacatcattgagtacgcagagctcaaaacagacgtgttccagagcctgagggaagtgggcaatgccatcctcttctgcctcctcatagagcaagctctgtctcaggaggaggtctgcgatttgctccatgccgcacccttccaaaacatcttgcctagagtctacatcaaagagggggagcgcctggaggtccggatgaaacgtctggaagccaagtatgccccgctccacctggtccctctgatcgagcggctggggacccctcagcaaatcgccattgctcgcgagggtgacctcctgaccaaggagcggctgtgctgtggcctgtccatgttcgaggtcatcctgacccgcattcggagctacctgcaggaccccatctggcggggcccaccgcccaccaatggcgtcatgcacgtcgatgagtgtgtggagttccaccggctgtggagcgccatgcagttcgtgtactgcatccctgtgggaaccaacgagttcacagctgagcagtgtttcggcgatggcttgaactgggctggttgctccatcattgtcctgctgggccagcagcgtcgctttgacctgttcgacttctgttaccacctgctaaaagtgcagaggcaggacgggaaggatgaaatcattaagaatgtgcccctgaagaagatggccgaccggatcaggaagtatcagatcttgaacaatgaggtttttgccatcctgaacaaatacatgaagtccgtggagacagacagttccactgtggagcatgtgcgctgcttccagccacccatccaccagtccttggccaccacttgctaagcagaagatcctgcagacccttatctggaggaggaagagaagcaggagagagaaagccacagccagcctgccataggatccaactggacaacgtgtgggatggacctggaaacaagcacctccccaaacacatcaccactccctagggcggggcctgtgcatgctctcccatgacatctccatgctggtttctccatagcataaatgaaaaaaaaaaaaaaaaagtaaacagggcagtgtgtgctttttcttttctcccccctcaactatattaagaactcctagtttcaccctttctccatcccatcatcccacctatctgtggttgcttcccaagacctcctcccaagatagacatctcctacccagtgcccttgtgtgaccccaggactcaag

SEQ ID NO: 297106 - DNA, 4355 bp, Homo sapiens
agcagcggggccggggcggggccgagcgcggcgcagcggagcggggcagagcatcctgcgccccggcgcggggccctgcggtagcctcaggcccctcccctggacccgccgcagagccagtgcagaatacagaaactgcagccatgaccacgcacgtcaccctggaagatgccctgtccaacgtggacctgcttgaagagcttcccctccccgaccagcagccatgcatcgagcctccaccttcctccatcatgtaccaggctaactttgacacaaactttgaggacaggaatgcatttgtcacgggcattgcaaggtacattgagcaggctacagtccactccagcatgaatgagatgctggaggaaggacatgagtatgcggtcatgctgtacacctggcgcagctgttcccgggccattccccaggtgaaatgcaacgagcagcccaaccgagtagagatctatgagaagacagtagaggtgctggagccggaggtcaccaagctcatgaagttcatgtattttcagcgcaaggccatcgagcggttctgcagcgaggtgaagcggctgtgccatgccgagcgcaggaaggactttgtctctgaggcctacctcctgacccttggcaagttcatcaacatgtttgctgtcctggatgagctaaagaacatgaagtgcagcgtcaagaatgaccactctgcctacaagagggcagcacagttcctgcggaagatggcagatccccagtctatccaggagtcgcagaacctttccatgttcctggccaaccacaacaggatcacccagtgtctccaccagcaacttgaagtgatcccaggctatgaggagctgctggctgacattgtcaacatctgtgtggattactacgagaacaagatgtacctgactcccagtgagaaacatatgctcctcaaggtgatgggctttggcctctacctaatggatggaaatgtcagtaacatttacaaactggatgccaagaagagaattaatcttagcaaaattgataaattctttaagcagctgcaggtggtgccccttttcggcgacatgcagatagagctggccagatacattaagaccagtgctcactatgaagagaacaagtccaagtggacgtgcacccagagcagcatcagcccccagtacaatatctgcgagcagatggttcagatccgggatgaccacatccgcttcatctccgagctcgctcgctacagcaacagtgaggtggtgacgggctcagggctggacagccagaagtcagacgaggagtatcgcgagctcttcgacctagccctgcggggtctgcagcttctatccaagtggagcgcccacgtcatggaggtgtactcttggaagctggttcatcccacagacaagttctgcaacaaggactgtcctggcaccgcggaggaatatgagagagccacacgctacaattacaccagtgaggaaaaatttgccttcgttgaggtgatcgccatgatcaaaggcctgcaggtgctcatgggcaggatggagagcgtcttcaaccaggccatcaggaacaccatctacgcggcattgcaggacttcgcccaggtgacgctgcgtgagcccctgcggcaggcggtacggaagaagaagaatgtcctcatcagcgtcctacaggcaattcgaaagaccatctgtgactgggagggagggcgagagccccctaatgacccatgcttgagaggggagaaggaccccaaaggtggatttgatatcaaggtgccccggcgtgctgtggggccatccagcacacagctgtacatggtgcggaccatgcttgaatcactcattgcagacaaaagcggctccaagaagaccctgaggagcagcctggatggacccattgtcctcgccatagaggactttcacaaacagtccttcttcttcacacatctgctcaacatcagtgaagccctgcagcagtgttgtgacctctcccagctctggttccgagaattcttcctggagttaaccatgggccgacgaatccagttccccatcgagatgtccatgccctggattctaacggaccatatcctggaaaccaaagaaccttccatgatggagtatgtcctctaccctctggatctgtacaacgacagcgcctactatgctctgaccaagtttaaaaagcagttcctgtacgatgagatagaagctgaggtgaacctgtgttttgatcagtttgtctacaagctggcagaccagatctttgcttactacaaagccatggctggcagtgtcctgttggataaacgttttcgagctgagtgtaagaattatggcgtcatcattccgtatccaccgtccaatcgctatgaaacactgctgaagcagagacacgtccagctgttgggtagatcaattgacttgaacagactcattacccagcgcatctctgccgccatgtataaatccttggaccaagctatcagccgctttgagagtgaggacctgacctccattgtggagctggagtggctgctggagattaaccgcgtcacgcatcggctgctctgtaagcatatgacgctggacagcttcgatgccatgctcacgcatcggctgctctgtaagcatatgacgctggacagcttcgatgccatgttccgagaggccaatcacaatgtgtccgccccctatggccgtatcaccctgcatgtcttctgggaactgaactttgactttctccccaactactgctacaatgggtccactaaccgttttgtgcggactgccattcctttcacccaagaaccacaacgagacaaacctgccaacgtccagccttattacctctatggatccaagcctctcaacattgcctacagccacatctacagctcctacaggaatttcgtggggccacctcatttcaagactatctgcagactcctgggttatcagggcatcgctgtggtcatggaggaactgctaaagattgtgaagagcttgctccaaggaaccattctccagtatgtgaaaacactgatagaggtgatgcccaagatatgccgcttgccccgacatgagtatggctccccagggatcctggagttcttccaccaccagctgaaggacatcattgagtacgcagagctcaaaacagacgtgttccagagcctgagggaagtgggcaatgccatcctcttctgcctcctcatagagcaagctctgtctcaggaggaggtctgcgatttgctccatgccgcacccttccaaaacatcttgcctagagtctacatcaaagagggggagcgcctggaggtccggatgaaacgtctggaagccaagtatgccccgctccacctggtccctctgatcgagcggctggggacccctcagcaaatcgccattgctcgcgagggtgacctcctgaccaaggagcggctgtgctgtggcctgtccatgttcgaggtcatcctgacccgcattcggagctacctgcaggaccccatctggcggggcccaccgcccaccaatggcgtcatgcacgtcgatgagtgtgtggagttccaccggctgtggagcgccatgcagttcgtgtactgcatccctgtgggaaccaacgagttcacagctgagcagtgtttcggcgatggcttgaactgggctggttgctccatcattgtcctgctgggccagcagcgtcgctttgacctgttcgacttctgttaccacctgctaaaagtgcagaggcaggacgggaaggatgaaatcattaagaatgtgcccctgaagaagatggccgaccggatcaggaagtatcagatcttgaacaatgaggtttttgccatcctgaacaaatacatgaagtccgtggagacagacagttccactgtggagcatgtgcgctgcttccagccacccatccaccagtccttggccaccacttgctaagcagaagatcctgcagacccttatctggaggaggaagagaagcaggagagagaaagccacagccagcctgccataggatccaactggacaacgtgtgggatggacctggaaacaagcacctccccaaacacatcaccactccctagggcggggcctgtgcatgctctcccatgacatctccatgctggtttctccatagcataaatgaaaaaaaaaaaaaaaaagtaaacagggcagtgtgtgctttttcttttctcccccctcaactatattaagaactcctagtttcaccctttctccatcccatcatcccacctatctgtggttgcttcccaagacctcctcccaagatagacatctcctacccagtgcccttgtgtgaccccaggactcaag

SEQ ID NO: 297107 - DNA, 4017 bp, Homo sapiens
agcagcggggccggggcggggccgagcgcggcgcagcggagcggggcagagcatcctgcgccccggcgcggggccctgcggtagcctcaggcccctcccctggacccgccgcagagccagtgcagaatacagaaactgcagccatgaccacgcacgtcaccctggaagatgccctgtccaacgtggacctgcttgaagagcttcccctccccgaccagcagccatgcatcgagcctccaccttcctccatcatgtaccaggctaactttgacacaaactttgaggacaggaatgcatttgtcacgggcattgcaaggtacattgagcaggctacagtccactccagcatgaatgagatgctggaggaaggacatgagtatgcggtcatgctgtacacctggcgcagctgttcccgggccattccccaggtgaaatgcaacgagcagcccaaccgagtagagatctatgagaagacagtagaggtgctggagccggaggtcaccaagctcatgaagttcatgtattttcagcgcaaggccatcgagcggttctgcagcgaggtgaagcggctgtgccatgccgagcgcaggaaggactttgtctctgaggcctacctcctgacccttggcaagttcatcaacatgtttgctgtcctggatgagctaaagaacatgaagtgcagcgtcaagaatgaccactctgcctacaagagggcagcacagttcctgcggaagatggcagatccccagtctatccaggagtcgcagaacctttccatgttcctggccaaccacaacaggatcacccagtgtctccaccagcaacttgaagtgatcccaggctatgaggagctgctggctgacattgtcaacatctgtgtggattactacgagaacaagatgtacctgactcccagtgagaaacatatgctcctcaaggtgatgggctttggcctctacctaatggatggaaatgtcagtaacatttacaaactggatgccaagaagagaattaatcttagcaaaattgataaattctttaagcagctgcaggtggtgccccttttcggcgacatgcagatagagctggccagatacattaagaccagtgctcactatgaagagaacaagtccaagtggacgtgcacccagagcagcatcagcccccagtacaatatctgcgagcagatggttcagatccgggatgaccacatccgcttcatctccgagctcgctcgctacagcaacagtgaggtggtgacgggctcagggctggacagccagaagtcagacgaggagtatcgcgagctcttcgacctagccctgcggggtctgcagcttctatccaagtggagcgcccacgtcatggaggtgtactcttggaagctggttcatcccacagacaagttctgcaacaaggactgtcctggcaccgcggaggaatatgagagagccacacgctacaattacaccagtgaggaaaaatttgccttcgttgaggtgatcgccatgatcaaaggcctgcaggtgctcatgggcaggatggagagcgtcttcaaccaggccatcaggaacaccatctacgcggcattgcaggacttcgcccaggtgacgctgcgtgagcccctgcggcaggcggtacggaagaagaagaatgtcctcatcagcgtcctacaggcaattcgaaagaccatctgtgactgggagggagggcgagagccccctaatgacccatgcttgagaggggagaaggaccccaaaggtggatttgatatcaaggtgccccggcgtgctgtggggccatccagcacacagctgtacatggtgcggaccatgcttgaatcactcattgcagacaaaagcggctccaagaagaccctgaggagcagcctggatggacccattgtcctcgccatagaggactttcacaaacagtccttcttcttcacacatctgctcaacatcagtgaagccctgcagcagtgttgtgacctctcccagctctggttccgagaattcttcctggagttaaccatgggccgacgaatccagttccccatcgagatgtccatgccctggattctaacggaccatatcctggaaaccaaagaaccttccatgatggagtatgtcctctaccctctggatctgtacaacgacagcgcctactatgctctgaccaagtttaaaaagcagttcctgtacgatgagatagaagctgaggtgaacctgtgttttgatcagtttgtctacaagctggcagaccagatctttgcttactacaaagccatggctggcagtgtcctgttggataaacgttttcgagctgagtgtaagaattatggcgtcatcattccgtatccaccgtccaatcgctatgaaacactgctgaagcagagacacgtccagctgttgggtagatcaattgacttgaacagactcattacccagcgcatctctgccgccatgtataaatccttggaccaagctatcagccgctttgagagtgaggacctgacctccattgtggagctggagtggctgctggagattaaccggctcacgcatcggctgctctgtaagcatatgacgctggacagcttcgatgccatgttccgagaggccaatcacaatgtgtccgccccctatggccgtatcaccctgcatgtcttctgggaactgaactttgactttctccccaactactgctacaatgggtccactaaccgttttgtgcggactgccattcctttcacccaagaaccacaacgagacaaacctgccaacgtccagccttattacctctatggatccaagcctctcaacattgcctacagccacatctacagctcctacaggaatttcgtggggccacctcatttcaagactatctgcagactcctgggttatcagggcatcgctgtggtcatggaggaactgctaaagattgtgaagagcttgctccaaggaaccattctccagtatgtgaaaacactgatagaggtgatgcccaagatatgccccgctccacctggtccctctgatcgagcggctggggacccctcagcaaatcgccattgctcgcgagggtgacctcctgaccaaggagcggctgtgctgtggcctgtccatgttcgaggtcatcctgacccgcattcggagctacctgcaggaccccatctggcggggcccaccgcccaccaatggcgtcatgcacgtcgatgagtgtgtggagttccaccggctgtggagcgccatgcagttcgtgtactgcatccctgtgggaaccaacgagttcacagctgagcagtgtttcggcgatggcttgaactgggctggttgctccatcattgtcctgctgggccagcagcgtcgctttgacctgttcgacttctgttaccacctgctaaaagtgcagaggcaggacgggaaggatgaaatcattaagaatgtgcccctgaagaagatggccgaccggatcaggaagtatcagatcttgaacaatgaggtttttgccatcctgaacaaatacatgaagtccgtggagacagacagttccactgtggagcatgtgcgctgcttccagccacccatccaccagtccttggccaccacttgctaagcagaagatcctgcagacccttatctggaggaggaagagaagcaggagagagaaagccacagccagcctgccataggatccaactggacaacgtgtgggatggacctggaaacaagcacctccccaaacacatcaccactccctagggcggggcctgtgcatgctctcccatgacatctccatgctggtttctccatagcataaatgaaaaaaaaaaaaaaaaagtaaacagggcagtgtgtgctttttcttttctcccccctcaactatattaagaactcctagtttcaccctttctccatcccatcatcccacctatctgtggttgcttcccaagacctcctcccaagatagacatctcctacccagtgcccttgtgtgaccccaggactcaag

SEQ ID NO: 297108 - DNA, 2074 bp, Homo sapiens
cggctaggtaagcgaggcgggggtgaatcggccgaggcagatctttgcttactacaaagccatggctggcagtgtcctgttggataaacgttttcgagctgagtgtaagaattatggcgtcatcattccgtatccaccgtccaatcgctatgaaacactgctgaagcagagacacgtccagctgttgggtagatcaattgacttgaacagactcattacccagcgcatctctgccgccatgtataaatccttggaccaagctatcagccgctttgagagtgaggacctgacctccattgtggagctggagtggctgctggagattaaccggctcacgcatcggctgctctgtaagcatatgacgctggacagcttcgatgccatgttccgagaggccaatcacaatgtgtccgccccctatggccgtatcaccctgcatgtcttctgggaactgaactttgactttctccccaactactgctacaatgggtccactaaccgttttgtgcggactgccattcctttcacccaagaaccacaacgagacaaacctgccaacgtccagccttattacctctatggatccaagcctctcaacattgcctacagccacatctacagctcctacaggaatttcgtggggccacctcatttcaagactatctgcagactcctgggttatcagggcatcgctgtggtcatggaggaactgctaaagattgtgaagagcttgctccaaggaaccattctccagtatgtgaaaacactgatagaggtgatgcccaagatatgccgcttgccccgacatgagtatggctccccagggatcctggagttcttccaccaccagctgaaggacatcattgagtacgcagagctcaaaacagacgtgttccagagcctgagggaagtgggcaatgccatcctcttctgcctcctcatagagcaagctctgtctcaggaggaggtctgcgatttgctccatgccgcacccttccaaaacatcttgcctagagtctacatcaaagagggggagcgcctggaggtccggatgaaacgtctggaagccaagtatgccccgctccacctggtccctctgatcgagcggctggggacccctcagcaaatcgccattgctcgcgagggtgacctcctgaccaaggagcggctgtgctgtggcctgtccatgttcgaggtcatcctgacccgcattcggagctacctgcaggaccccatctggcggggcccaccgcccaccaatggcgtcatgcacgtcgatgagtgtgtggagttccaccggctgtggagcgccatgcagttcgtgtactgcatccctgtgggaaccaacgagttcacagctgagcagtgtttcggcgatggcttgaactgggctggttgctccatcattgtcctgctgggccagcagcgtcgctttgacctgttcgacttctgttaccacctgctaaaagtgcagaggcaggacgggaaggatgaaatcattaagaatgtgcccctgaagaagatggccgaccggatcaggaagtatcagatcttgaacaatgaggtttttgccatcctgaacaaatacatgaagtccgtggagacagacagttccactgtggagcatgtgcgctgcttccagccacccatccaccagtccttggccaccacttgctaagcagaagatcctgcagacccttatctggaggaggaagagaagcaggagagagaaagccacagccagcctgccataggatccaactggacaacgtgtgggatggacctggaaacaagcacctccccaaacacatcaccactccctagggcggggcctgtgcatgctctcccatgacatctccatgctggtttctccatagcataaatgaaaaaaaaaaaaaaaaagtaaacagggcagtgtgtgctttttcttttctcccccctcaactatattaagaactcctagtttcaccctttctccatcccatcatcccacctatctgtggttgcttcccaagacctcctcccaagatagacatctcctacccagtgcccttgtgtgaccccaggactcaag

SEQ ID NO: 297109 - DNA, 3964 bp, Homo sapiens
agcagcggggccggggcggggccgagcgcggcgcagcggagcggggcagagcatcctgcgccccggcgcggggccctgcggtagcctcaggcccctcccctggacccgccgcagagccagtgcagaatacagaaactgcagccatgaccacgcacgtcaccctggaagatgccctgtccaacgtggacctgcttgaagagcttcccctccccgaccagcagccatgcatcgagcctccaccttcctccatcatgtaccaggctaactttgacacaaactttgaggacaggaatgcatttgtcacgggcattgcaaggtacattgagcaggctacagtccactccagcatgaatgagatgctggaggaaggacatgagtatgcggtcatgctgtacacctggcgcagctgttcccgggccattccccaggtgaaatgcaacgagcagcccaaccgagtagagatctatgagaagacagtagaggtgctggagccggaggtcaccaagctcatgaagttcatgtattttcagcgcaaggccatcgagcggttctgcagcgaggtgaagcggctgtgccatgccgagcgcaggaaggactttgtctctgaggcctacctcctgacccttggcaagttcatcaacatgtttgctgtcctggatgagctaaagaacatgaagtgcagcgtcaagaatgaccactctgcctacaagagggcagcacagttcctgcggaagatggcagatccccagtctatccaggagtcgcagaacctttccatgttcctggccaaccacaacaggatcacccagtgtctccaccagcaacttgaagtgatcccaggctatgaggagctgctggctgacattgtcaacatctgtgtggattactacgagaacaagatgtacctgactcccagtgagaaacatatgctcctcaaggtgatgggctttggcctctacctaatggatggaaatgtcagtaacatttacaaactggatgccaagaagagaattaatcttagcaaaattgataaattctttaagcagctgcaggtggtgccccttttcggcgacatgcagatagagctggccagatacattaagaccagtgctcactatgaagagaacaagtccaagtggacgtgcacccagagcagcatcagcccccagtacaatatctgcgagcagatggttcagatccgggatgaccacatccgcttcatctccgagctcgctcgctacagcaacagtgaggtggtgacgggctcagggctggacagccagaagtcagacgaggagtatcgcgagctcttcgacctagccctgcggggtctgcagcttctatccaagtggagcgcccacgtcatggaggtgtactcttggaagctggttcatcccacagacaagttctgcaacaaggactgtcctggcaccgcggaggaatatgagagagccacacgctacaattacaccagtgaggaaaaatttgccttcgttgaggtgatcgccatgatcaaaggcctgcaggtgctcatgggcaggatggagagcgtcttcaaccaggccatcaggaacaccatctacgcggcattgcaggacttcgcccaggtgacgctgcgtgagcccctgcggcaggcggtacggaagaagaagaatgtcctcatcagcgtcctacaggcaattcgaaagaccatctgtgactgggagggagggcgagagccccctaatgacccatgcttgagaggggagaaggaccccaaaggtggatttgatatcaaggtgccccggcgtgctgtggggccatccagcacacagctgtacatggtgcggaccatgcttgaatcactcattgcagacaaaagcggctccaagaagaccctgaggagcagcctggatggacccattgtcctcgccatagaggactttcacaaacagtccttcttcttcacacatctgctcaacatcagtgaagccctgcagcagtgttgtgacctctcccagctctggttccgagaattcttcctggagttaaccatgggccgacgaatccagttccccatcgagatgtccatgccctggattctaacggaccatatcctggaaaccaaagaaccttccatgatggagtatgtcctctaccctctggatctgtacaacgacagcgcctactatgctctgaccaagtttaaaaagcagttcctgtacgatgagatagaagctgaggtgaacctgtgttttgatcagtttgtctacaagctggcagaccagatctttgcttactacaaagccatggctggcagtgtcctgttggataaacgttttcgagctgagtgtaagaattatggcgtcatcattccgtatccaccgtccaatcgctatgaaacactgctgaagcagagacacgtccagctgttgggtagatcaattgacttgaacagactcattacccagcgcatctctgccgccatgtataaatccttggaccaagctatcagccgctttgagagtgaggacctgacctccattgtggagctggagtggctgctggagattaaccggctcacgcatcggctgctctgtaagcatatgacgctggacagcttcgatgccatgttccgagaggccaatcacaatgtgtccgccccctatggccgtatcaccctgcatgtcttctgggaactgaactttgactttctccccaactactgctacaatgggtccactaaccgttttgtgcggactgccattcctttcacccaagaaccacaacgagacaaacctgccaacgtccagccttattacctctatggatccaagcctctcaacattgcctacagccacatctacagctcctacaggaatttcgtggggccacctcatttcaagactatctgcagactcctgggttatcagggcatcgctgtggtcatggaggaactgctaaagattgtgaagagcttgctccaaggaaccattctccagtatgtgaaaacactgatagaggtgatgcccaagatatgccgcttgccccgacatgagtatggctccccagggatcctggagttcttccaccaccagctgaaggacatcattgagtacgcagagctcaaaacagacgtgttccagagcctgagggaagtgggcaatgccatcctcttctgcctcctcatagagcaagctctgtctcaggaggaggtctgcgatttgctccatgccgcacccttccaaaacatcttgcctagagtctacatcaaagagggggagcgcctggaggtccggatgaaacgtctggaagccaagtatgccccgctccacctggtccctctgatcgagcggctggggacccctcagcaaatcgccattgctcgcgagggtgacctcctgaccaaggagcggctgtgctgtggcctgtccatgttcgaggtcatcctgacccgcattcggagctacctgcaggaccccatctggcggggcccaccgcccaccaatggcgtcatgcacgtcgatgagtgtgtggagttccaccggctgtggagcgccatgcagttcgtgtactgcatccctgtgggaaccaacgagttcacagctgagcagtgtttcggcgatggcttgaactgggctggttgctccatcattgtcctgctgggccagcagcgtcgctttgacctgttcgacttctgttaccacctgctaaaagtgcagaggcaggacgggaaggatgaaatcattaagaatgtgccctgacgaagatggcgaccggcacccagggaagtattaggaatctctggaacaaacgagagcgtatctgagccaatgcatggaacaaacatacattagaaggaccaggtggagagcagacccgccacccctgtgtggagccatatggtgcagcaggggcacaagcacacccatagagccagaacactgtggcccccacagtaggtaagaagcaaaaagaccagcag

SEQ ID NO: 297110 - DNA, 3863 bp, Homo sapiens
agcagcggggccggggcggggccgagcgcggcgcagcggagcggggcagagcatcctgcgccccggcgcggggccctgcggtagcctcaggcccctcccctggacccgccgcagagccagtgcagaatacagaaactgcagccatgaccacgcacgtcaccctggaagatgccctgtccaacgtggacctgcttgaagagcttcccctccccgaccagcagccatgcatcgagcctccaccttcctccatcatgtaccaggctaactttgacacaaactttgaggacaggaatgcatttgtcacgggcattgcaaggtacattgagcaggctacagtccactccagcatgaatgagatgctggaggaaggacatgagtatgcggtcatgctgtacacctggcgcagctgttcccgggccattccccaggtgaaatgcaacgagcagcccaaccgagtagagatctatgagaagacagtagaggtgctggagccggaggtcaccaagctcatgaagttcatgtattttcagcgcaaggccatcgagcggttctgcagcgaggtgaagcggctgtgccatgccgagcgcaggaaggactttgtctctgaggcctacctcctgacccttggcaagttcatcaacatgtttgctgtcctggatgagctaaagaacatgaagtgcagcgtcaagaatgaccactctgcctacaagagggcagcacagttcctgcggaagatggcagatccccagtctatccaggagtcgcagaacctttccatgttcctggccaaccacaacaggatcacccagtgtctccaccagcaacttgaagtgatcccaggctatgaggagctgctggctgacattgtcaacatctgtgtggattactacgagaacaagatgtacctgactcccagtgagaaacatatgctcctcaaggtgatgggctttggcctctacctaatggatggaaatgtcagtaacatttacaaactggatgccaagaagagaattaatcttagcaaaattgataaattctttaagcagctgcaggtggtgccccttttcggcgacatgcagatagagctggccagatacattaagaccagtgctcactatgaagagaacaagtccaagtggacgtgcacccagagcagcatcagcccccagtacaatatctgcgagcagatggttcagatccgggatgaccacatccgcttcatctccgagctcgctcgctacagcaacagtgaggtggtgacgggctcagggctggacagccagaagtcagacgaggagtatcgcgagctcttcgacctagccctgcggggtctgcagcttctatccaagtggagcgcccacgtcatggaggtgtactcttggaagctggttcatcccacagacaagttctgcaacaaggactgtcctggcaccgcggaggaatatgagagagccacacgctacaattacaccagtgaggaaaaatttgccttcgttgaggtgatcgccatgatcaaaggcctgcaggtgctcatgggcaggatggagagcgtcttcaaccaggccatcaggaacaccatctacgcggcattgcaggacttcgcccaggtgacgctgcgtgagcccctgcggcaggcggtacggaagaagaagaatgtcctcatcagcgtcctacaggcaattcgaaagaccatctgtgactgggagggagggcgagagccccctaatgacccatgcttgagaggggagaaggaccccaaaggtggatttgatatcaaggtgccccggcgtgctgtggggccatccagcacacagctgtacatggtgcggaccatgcttgaatcactcattgcagacaaaagcggctccaagaagaccctgaggagcagcctggatggacccattgtcctcgccatagaggactttcacaaacagtccttcttcttcacacatctgctcaacatcagtgaagccctgcagcagtgttgtgacctctcccagctctggttccgagaattcttcctggagttaaccatgggccgacgaatccagttccccatcgagatgtccatgccctggattctaacggaccatatcctggaaaccaaagaaccttccatgatggagtatgtcctctaccctctggatctgtacaacgacagcgcctactatgctctgaccaagtttaaaaagcagttcctgtacgatgagatagaagctgaggtgaacctgtgttttgatcagtttgtctacaagctggcagaccagatctttgcttactacaaagccatggctggcagtgtcctgttggataaacgttttcgagctgagtgtaagaattatggcgtcatcattccgtatccaccgtccaatcgctatgaaacactgctgaagcagagacacgtccagctgttgggtagatcaattgacttgaacagactcattacccagcgcatctctgccgccatgtataaatccttggaccaagctatcagccgctttgagagtgaggacctgacctccattgtggagctggagtggctgctggagattaaccggctcacgcatcggctgctctgtaagcatatgacgctggacagcttcgatgccatgttccgagaggccaatcacaatgtgtccgccccctatggccgtatcaccctgcatgtcttctgggaactgaactttgactttctccccaactactgctacaatgggtccactaaccgttttgtgcggactgccattcctttcacccaagaaccacaacgagacaaacctgccaacgtccagccttattacctctatggatccaagcctctcaacattgcctacagccacatctacagctcctacaggaatttcgtggggccacctcatttcaagactatctgcagactcctgggttatcagggcatcgctgtggtcatggaggaactgctaaagattgtgaagagcttgctccaaggaaccattctccagtatgtgaaaacactgatagaggtgatgcccaagatatgccgcttgccccgacatgagtatggctccccagggatcctggagttcttccaccaccagctgaaggacatcattgagtacgcagagctcaaaacagacgtgttccagagcctgagggaagtgggcaatgccatcctcttctgcctcctcatagagcaagctctgtctcaggaggaggtctgcgatttgctccatgccgcacccttccaaaacatcttgcctagagtctacatcaaagagggggagcgcctggaggtccggatgaaacgtctggaagccaagtatgccccgctccacctggtccctctgatcgagcggctggggacccctcagcaaatcgccattgctcgcgagggtgacctcctgaccaaggagcggctgtgctgtggcctgtccatgttcgaggtcatcctgacccgcattcggagctacctgcaggaccccatctggcggggcccaccgcccaccaatggcgtcatgcacgtcgatgagtgtgtggagttccaccggctgtggagcgccatgcagttcgtgtactgcatccctgtgggaaccaacgagttcacagctgagtgagtaccccccagagaaggcagggttacccccaacctgcctgtgctcctgcaagtcatggggctgccagagttcagccagaaacgtgggcagggggtgggggtggttggccaacaactactttgttgagtgtgttgagctgactgcattggcaagaaagagcccagtaagggtttgatagtaagaccctcactgcctgcctcacccccactacactgtactactggaaaatgaggagcctttaggagtccttagagcagacagcagagctag

SEQ ID NO: 297111 - DNA, 1546 bp, Homo sapiens
accacgcgtcggactagttctagatcgcgagcggcgccctttttacctctatggatccaagcctctcaacattgcctacagccacatctacagctcctacaggaatttcgtggggccacctcatttcaagactatctgcagactcctgggttatcagggcatcgctgtggtcatggaggaactgctaaagattgtgaagagcttgctccaaggaaccattctccagtatgtgaaaacactgatagaggtgatgcccaagatatgccgcttgccccgacatgagtatggctccccagggatcctggagttcttccaccaccagctgaaggacatcattgagtacgcagagctcaaaacagacgtgttccagagcctgagggaagtgggcaatgccatcctcttctgcctcctcatagagcaagctctgtctcaggaggaggtctgcgatttgctccatgccgcacccttccaaaacatcttgcctagagtctacatcaaagagggggagcgcctggaggtccggatgaaacgtctggaagccaagtatgccccgctccacctggtccctctgatcgagcggctggggacccctcagcaaatcgccattgctcgcgagggtgacctcctgaccaaggagcggctgtgctgtggcctgtccatgttcgaggtcatcctgacccgcattcggagctacctgcaggaccccatctggcggggcccaccgcccaccaatggcgtcatgcacgtcgatgagtgtgtggagttccaccggctgtggagcgccatgcagttcgtgtactgcatccctgtgggaaccaacgagttcacagctgagcagtgtttcggcgatggcttgaactgggctggttgctccatcattgtcctgctgggccagcagcgtcgctttgacctgttcgacttctgttaccacctgctaaaagtgcagaggcaggacgggaaggatgaaatcattaagaatgtgcccctgaagaagatggccgaccggatcaggaagtatcagatcttgaacaatgaggtttttgccatcctgaacaaatacatgaagtccgtggagacagacagttccactgtggagcatgtgcgctgcttccagccacccatccaccagtccttggccaccacttgctaagcagaagatcctgcagacccttatctggaggaggaagagaagcaggagagagaaagccacagccagcctgccataggatccaactggacaacgtgtgggatggacctggaaacaagcacctccccaaacacatcaccactccctagggcggggcctgtgcatgctctcccatgacatctccatgctggtttctccatagcataaatgaaaaaaaaaaaaaaaaagtaaacagggcagtgtgtgctttttcttttctcccccctcaactatattaagaactcctagtttcaccctttctccatcccatcatcccacctatctgtggttgcttcccaagacctcctcccaagatagacatctcctacccagtgcccttgtgtgaccccaggactcaag

SEQ ID NO: 297112 - DNA, 1468 bp, Homo sapiens
cgctacaagggtcagtggattacaggcaacccccaggaggggaccttaaagatggaatgggcaggacctggtgactgccgtggagagaaagaaaacagactcatggctcaggccaagattagtaagaaatacaggcctccctgcctgctgtgcccccatacagtgctcaagcatgttccggcatcagccccggacagaggattgggaggcctgggttctcagcccaacatggcttcagacacattcctcaacttccctgagcctcagtttcttctgaaaagtggggctgctgacccatgtgcctgaggctgttgtgagtcttcgtttcgggcactcagtaaagtggggccaagtcttgtggaacttgaatatcagccctttaactgccccacctaggcaggaaggagggaagcaaccagggagcaaggactgccttccagaagtgggcggggccttgtacgcgtacaaggccccgctccacctggtccctctgatcgagcggctggggacccctcagcaaatcgccattgctcgcgagggtgacctcctgaccaaggagcggctgtgctgtggcctgtccatgttcgaggtcatcctgacccgcattcggagctacctgcaggaccccatctggcggggcccaccgcccaccaatggcgtcatgcacgtcgatgagtgtgtggagttccaccggctgtggagcgccatgcagttcgtgtactgcatccctgtgggaaccaacgagttcacagctgagcagtgtttcggcgatggcttgaactgggctggttgctccatcattgtcctgctgggccagcagcgtcgctttgacctgttcgacttctgttaccacctgctaaaagtgcagaggcaggacgggaaggatgaaatcattaagaatgtgcccctgaagaagatggccgaccggatcaggaagtatcagatcttgaacaatgaggtttttgccatcctgaacaaatacatgaagtccgtggagacagacagttccactgtggagcatgtgcgctgcttccagccacccatccaccagtccttggccaccacttgctaagcagaagatcctgcagacccttatctggaggaggaagagaagcaggagagagaaagccacagccagcctgccataggatccaactggacaacgtgtgggatggacctggaaacaagcacctccccaaacacatcaccactccctagggcggggcctgtgcatgctctcccatgacatctccatgctggtttctccatagcataaatgaaaaaaaaaaaaaaaaagtaaacagggcagtgtgtgctttttcttttctcccccctcaactatattaagaactcctagtttcaccctttctccatcccatcatcccacctatctgtggttgcttcccaagacctcctcccaagatagacatctcctacccagtgcccttgtgtgaccccaggactcaag

SEQ ID NO: 297113 - DNA, 1019 bp, Homo sapiens
  misc_feature (32)..(32): n is a, c, g, or t
  misc_feature (70)..(70): n is a, c, g, or t
ggtctccacccctcaagccaggagaccctgtntttgctgtttatatatatatatattatatataaatatntatttatctgtctgagccctgccctcactccactcccctcatccactaggtgcccagtcttgagtgggccccctctcttaccccgtccctttccctgcatcccttggcccctctctgtttaccctccctgtcccctgaggtcatgcacgtcgatgagtgtgtggagttccaccggctgtggagcgccatgcagttcgtgtactgcatccctgtgggaaccaacgagttcacagctgagcagtgtttcggcgatggcttgaactgggctggttgctccatcattgtcctgctgggccagcagcgtcgctttgacctgttcgacttctgttaccacctgctaaaagtgcagaggcaggacgggaaggatgaaatcattaagaatgtgcccctgaagaagatggccgaccggatcaggaagtatcagatcttgaacaatgaggtttttgccatcctgaacaaatacatgaagtccgtggagacagacagttccactgtggagcatgtgcgctgcttccagccacccatccaccagtccttggccaccacttgctaagcagaagatcctgcagacccttatctggaggaggaagagaagcaggagagagaaagccacagccagcctgccataggatccaactggacaacgtgtgggatggacctggaaacaagcacctccccaaacacatcaccactccctagggcggggcctgtgcatgctctcccatgacatctccatgctggtttctccatagcataaatgaaaaaaaaaaaaaaaaagtaaacagggcagtgtgtgctttttcttttctcccccctcaactatattaagaactcctagtttcaccctttctccatcccatcatcccacctatctgtggttgcttcccaagacctcctcccaagatagacatctcctacccagtgcccttgtgtgaccccaggactcaag

SEQ ID NO: 297114 - DNA, 758 bp, Homo sapiens
  misc_feature (11)..(11): n is a, c, g, or t
gaaaaaaaaangtaaacagggcagtttgtgctttttcttttctcccccctcaactatattaagactcctagtttcaccctttctccatcattgtcctgctgggccagcagcgtcgctttgacctgttcgacttctgttaccacctgctaaaagtgcagaggcaggacgggaaggatgaaatcattaagaatgtgcccctgaagaagatggccgaccggatcaggaagtatcagatcttgaacaatgaggtttttgccatcctgaacaaatacatgaagtccgtggagacagacagttccactgtggagcatgtgcgctgcttccagccacccatccaccagtccttggccaccacttgctaagcagaagatcctgcagacccttatctggaggaggaagagaagcaggagagagaaagccacagccagcctgccataggatccaactggacaacgtgtgggatggacctggaaacaagcacctccccaaacacatcaccactccctagggcggggcctgtgcatgctctcccatgacatctccatgctggtttctccatagcataaatgaaaaaaaaaaaaaaaaagtaaacagggcagtgtgtgctttttcttttctcccccctcaactatattaagaactcctagtttcaccctttctccatcccatcatcccacctatctgtggttgcttcccaagacctcctcccaagatagacatctcctacccagtgcccttgtgtgaccccaggactcaag

SEQ ID NO: 297115 - DNA, 1366 bp, Homo sapiens
agcagcggggccggggcggggccgagcgcggcgcagcggagcggggcagagcatcctgcgccccggcgcggggccctgcggtagcctcaggcccctcccctggacccgccgcagagccagtgcagaatacagaaactgcagccatgaccacgcacgtcaccctggaagatgccctgtccaacgtggacctgcttgaagagcttcccctccccgaccagcagccatgcatcgagcctccaccttcctccatcatgtaccaggctaactttgacacaaactttgaggacaggaatgcatttgtcacgggcattgcaaggtacattgagcaggctacagtccactccagcatgaatgagatgctggaggaaggacatgagtatgcggtcatgctgtacacctggcgcagctgttcccgggccattccccaggtgaaatgcaacgagcagcccaaccgagtagagatctatgagaagacagtagaggtgctggagccggaggtcaccaagctcatgaagttcatgtattttcagcgcaaggccatcgagcggttctgcagcgaggtgaagcggctgtgccatgccgagcgcaggaaggactttgtctctgaggcctacctcctgacccttggcaagttcatcaacatgtttgctgtcctggatgagctaaagaacatgaagtgcagcgtcaagaatgaccactctgcctacaagagggcagcacagttcctgcggaagatggcagatccccagtctatccaggagtcgcagaacctttccatgttcctggccaaccacaacaggatcacccagtgtctccaccagcaacttgaagtgatcccaggctatgaggagctgctggctgacattgtcaacatctgtgtggattactacgagaacaagatgtacctgactcccagtgagaaacatatgctcctcaaggtaaaactcccctgaggccgcacccatggagcctgggcttaccctctcaccttcttcttattaaaaatccgttttaaaaaacaatgtttcttttttcttaaacattgatacagatcttacggcacataatggtttgtaacctgttcctttcctgtaatataatataccgtagtcacctttccagatgtcattaaggctatttctacaatgttatgtgtaatgactgccaagtattctgttgtattggaacattgtcatgtaacatatcccctgtggttggatatttgtttgctaaacttcattgaacacccttgtagcagtttttgtgcacatctttttgtcaaggcaaacttcctagaagagaaattgctggctcaaagggaaaaacagaataaatctttttttttatttcaatagtttttggggaa

SEQ ID NO: 297116 - DNA, 688 bp, Homo sapiens
ggtcaaagcgacgctgcgtggcccagcaggacaatgagtggagcaaccagccctgttcgacttctgttaccacctgctaaaagtgcagaggcaggacgggaaggatgaaatcattaagaatgtgcccctgaagaagatggccgaccggatcaggaagtatcagatcttgaacaatgaggtttttgccatcctgaacaaatacatgaagtccgtggagacagacagttccactgtggagcatgtgcgctgcttccagccacccatccaccagtccttggccaccacttgctaagcagaagatcctgcagacccttatctggaggaggaagagaagcaggagagagaaagccacagccagcctgccataggatccaactggacaacgtgtgggatggacctggaaacaagcacctccccaaacacatcaccactccctagggcggggcctgtgcatgctctcccatgacatctccatgctggtttctccatagcataaatgaaaaaaaaaaaaaaaaagtaaacagggcagtgtgtgctttttcttttctcccccctcaactatattaagaactcctagtttcaccctttctccatcccatcatcccacctatctgtggttgcttcccaagacctcctcccaagatagacatctcctacccagtgcccttgtgtgaccccaggactcaag

SEQ ID NO: 297117 - DNA, 1052 bp, Homo sapiens
agcagcggggccggggcggggccgagcgcggcgcagcggagcggggcagagcatcctgcgccccggcgcggggccctgcggtagcctcaggcccctcccctggacccgccgcagagccagtgcagaatacagaaactgcagccatgaccacgcacgtcaccctggaagatgccctgtccaacgtggacctgcttgaagagcttcccctccccgaccagcagccatgcatcgagcctccaccttcctccatcatgtaccaggctaactttgacacaaactttgaggacaggaatgcatttgtcacgggcattgcaaggtacattgagcaggctacagtccactccagcatgaatgagatgctggaggaaggacatgagtatgcggtcatgctgtacacctggcgcagctgttcccgggccattccccaggtgaaatgcaacgagcagcccaaccgagtagagatctatgagaagacagtagaggtgctggagccggaggtcaccaagctcatgaagttcatgtattttcagcgcaaggccatcgagcggttctgcagcgaggtgaagcggctgtgccatgccgagcgcaggaaggactttgtctctgaggcctacctcctgacccttggcaagttcatcaacatgtttgctgtcctggatgagctaaagaacatgaagtgcagcgtcaagaatgaccactctgcctacaagagggcagcacagttcctgcggaagatggcagatccccagtctatccaggagtcgcagaacctttccatgttcctggccaaccacaacaggatcacccaggtgagggcagactccttgttaggcctggcctgatgtctcggggttataggcaggcgtgtagaggttgggtggaccacgagcccaagcagacaagctcagtctgcagcttccatctccactgccctacttgagagtgaaatgtagctgaggacttaagtctgtcctcccaaccccaggtggccgattcaccctctccagttgtcatgctcgtgaagccctctcagccagtgctctgaccctgca

SEQ ID NO: 297118 - DNA, 772 bp, Homo sapiens
agcagcggggccggggcggggccgagcgcggcgcagcggagcggggcagagcatcctgcgccccggcgcggggccctgcggtagcctcaggcccctcccctggacccgccgcagagccagtgcagaatacagaaactgcagccatgaccacgcacgtcaccctggaagatgccctgtccaacgtggacctgcttgaagagcttcccctccccgaccagcagccatgcatcgagcctccaccttcctccatcatgtaccaggctaactttgacacaaactttgaggacaggaatgcatttgtcacgggcattgcaaggtacattgagcaggctacagtccactccagcatgaatgagatgctggaggaaggacatgagtatgcggtcatgctgtacacctggcgcagctgttcccgggccattccccaggtgaaatgcaacgagcagcccaaccgagtagagatctatgagaagacagtagaggtgctggagccggaggtcaccaagctcatgaagttcatgtattttcagcgcaaggccatcgagcggttctgcagcgaggtgaagcggctgtgccatgccgagcgcaggaaggactttgtctctgaggcctacctcctgacccttggcaagttcatcaacatgtttgctgtcctggatgagctaaagaacatgaagtgcagcgtcaagaatgaccactctgcctacaagagggcagcacagttgctgcggaagatggcagatccgcgatgcgtcggggctaatctagaggg

SEQ ID NO: 297119 - DNA, 453 bp, Homo sapiens
  misc_feature (13)..(13): n is a, c, g, or t
  misc_feature (17)..(17): n is a, c, g, or t
  misc_feature (35)..(35): n is a, c, g, or t
tcgacggcagtantcanggcgttatgtaggaggcngggtggcggtagagttaaggaagggcctcttcctctgtgagaattcagcattttgcaaccatccaaaaatgttgagggcatgctttgcttccagggcagacagagcagcacagtgagcatgggacacaggatccctgacttgctgtgtgcccttaaaccagccactacctctctgacgttcaaaattgagcaatggaaggcagcctgcccaactgttacctgcctgtcatcatgaaagcctgcggatgagtacacaaaatggacaatgttgacatgctgaacacatcagcccccacagccaaccccccaactctgctccattcctgccactcaagggaagagatgaacatgcaagcaataatatcacacagagatcttgaaccctcgcctcacatacaataaaatgtaccttgtttgc

SEQ ID NO: 297120 - DNA, 234 bp, Homo sapiens
accatgagtatgacacctgatgctccccaggtggtgacgggctcagggctggacagccagaagtcagacgaggagtatcgcgagctcttcgacctagccctgcggggtctgcagcttctatccaagtggagcgcccacgtcatggaggtggtaggtgtctctgggtagagggcctcacactgacctctctttccttggaatctgcctccatctccccctagcactctcttttta

SEQ ID NO: 297121 - DNA, 502 bp, Homo sapiens
atagccttctctcccgacgagctgtggctggccagcgccggctattcccgcatggtcaaagtctgggactgcaacacaggaaagtgccttgagaccctgaagcagggagtcctggatgtggcccacacctgtgccttcaccccagatgggaaaatcttagtgtctggagctgccgatcagactagacgtcaaatatcccgcacgtccaaatcacccagggaccctcaaacctaacaccaaccacctcagatggtgccgacctcacccgctcccctcagtggcgcacaggcatgccgcttctccccacagacgcaaagtgactgtgctggcatccagcagatccccatggccaggactctccaggccccaccagagcagacaactgtggtgggcaggacgcttgctggaacccatcagacacctggtccccaaaaccagacccacccacctccacccaatcagtgggagtgccaggaaacaaagcagtctcagccaaaaatgc

SEQ ID NO: 297122 - DNA, 1344 bp, Homo sapiens
agttctatgagaagccaaatggtgctcgcaattgtgcttgctgctggactggcaagcttcatgttatgtttatttggtgtgcgtgtgtctttattattttgtgtaaactatattctgcttatagagagtctctgagactaaaattgacaacttgaaaagtattccaaggaatattatgaaaatagggcaacatggactgtttaagatctccatgtaattgaaattcatgcaaggaaacaactcatagaaaagataaatatggatgcccttcacatgttatcaacctcgtaacttttggtgcttgctgaatcagtccatgaaaagctacagcccgctctttgggaatgctacatacccatttctggtatttaaaaaatatctaggaggagctaaatgacaaaacacagcagtgttttgagggagaaaggaccatcatttataatgctctgtacatactaccagagctgcttggaaaattaaaggccacttgtggctttttcctaccaactgatacgtttaaatttgccctaggattgagctaacagcaaaaaaaaaaaaaaaaaaagagagaaagaaaggagtaaacagtggtaataaaaaaatccatctgtcttcttgctatgttaatattaataaatcataatatgacaagaccctcactgaataagagtattttcagtcatcagaagccagctgttggtaggcattaatgagtttaaaattgttctcaattgaaaaaacatcacactattttgccaaaaccaaagtaattataatactgtgtcctcctgtaattttttgagaagtggttataaagggcatatttacataaattctactttattcctcaacttctttgatgaatgtaacccaattttacttctttaaaaagtctcaattcaagctggattagccagctcagcataatcaactagacagtggtttgttaaatttagcagcatacttcgttcccattctaattaaagtcatgagttcttgaatcccagagaaataatgcttaggaacttctctcaatctgcttggcttggcctagagaagtggccattttatcaacaggaaaaaaaaaaattttctctactacaaccccgttgccttctgaaaaacagcaagttatttctttatataattatcattttattattttatggaaaattaatttattaattaatagcctattatgtgttctcacttgcttctctaagtaatattttgagataaaatgttgaataaaaccatggattatagagaaaagtcaaaatatatgtgtaatatttaattattttataagttttataataaagtattccatttctttatctttga

SEQ ID NO: 297123 - DNA, 428 bp, Homo sapiens
tgatttgtgtctgaattattcagacatctaactttgtagttgagctcatttcacaaatgtgaaatggcatgggaatttggagcaaacgcagcaaaagtgaactgacttaagacctaagaagtgtttgtatgcgtttgtggctgttgaaactgcttcctaggttttaattcttaccactacaggcactttacaaataggcttaatttccattctgattgttttcaacaggatgtatagtgagatggatgtcatgtccacagcaactcagcatcagacagtggtgggagatgctgttgcagagactcaacatgttctgtctaaagaagattttctgaaattgatgcttcctgacagccccttagtggaggaggggcgaagaaaggttagtgacttagggagctttgaagttaccagaaacactaaaaaaa

SEQ ID NO: 297124 - DNA, 4241 bp, Homo sapiens
  misc_feature (11)..(11): n is a, c, g, or t
ggtctagaggntccccatacgatgctcgacaacagacaacagctactgaggaaaaggcacataggaaatgacatcgtcaccatcgtcttccaggagcctggggcacttccttttactccaaaaagcatccggtctcactttcagcatgtctttgtcatagtcaaagtgcataatccatgtaccgaaaatgtgtgttatagtgttggagtttccagatcaaaagatgtgccaccatttggcccaccgattcccaaaggtgtaacttttccaaagtcagccgtgttccgggacttccttttagccaaagtaatcaatgcagaaaatgcagcccataaatcagaaaagtttcgagcaatggccactcgaacgaggcaggagtacttgaaagatctggcggagaactttgtcacaaccgccaccgtggatacctctgtgaagttcagcttcattacgctgggtgcgaagaaaaaggagaaggtaaagccaaggaaggatgcccacttgtttagcattggggccatcatgtggcacgtgatagcccgggacttcggccagtctgctgacattgaatgtcttctcgggatctccaatgagttcatcatgttgattgaaaaggattccaagaatgttgtattcaactgttcctgcagggatgtgattgggtggacatctggattagtgagtatcaaagtgttttacgaaagaggagaatgtgtcctcctgtcctcggtagacaactgtgctgaagacatcagggaaattgttcagcgattagtaatagtgacgagaggctgcgagactgtggaaatgaccctgaggaggaacgggctgggccagcttggcttccatgtgaattttgaaggaattgtcgcagcatgtggaaccttttggctttgcctggaaggctggccttcgccaagggagccgcctcgtggagatctgcaaagtagccgtggccactctgacccacgagcagatgatcgacctgctccgtacttctgtgactgtgaaggtggtcatcatccagccccatgatgacggctcgccccgaagagggtgttcagagctctgccggatccctatggtggaatataaactcgacagcgagggcaccccctgcgagtataaaacccccttcaggaggaacaccacgtggcaccgggtgcccactcctgccctgcagcccctctctagagcttcccccatccccggcacgcccgaccggctgccgtgccaacagctgctccagcaggcccaggctgccattcctcgaagcacctccttcgaccggaagctgcccgatggcacgagaagctcacccagcaaccagtcatcctccagcgaccctggacccggcgggagcggaccctggagaccacaagtgggctacgacgggtgccagtcccctctactgctcgaacaccagggctcaggccctttggaatgtgacggagccagggagagggaagacaccatggaagcaagcaggcacccggaaaccaaatggcatggcccaccttccaaagtcctgggttcctataaagaaagagctctgcagaaagatggaagttgcaaagattcccccaataagctttctcacattggggataaaagttgctccagtcactccagcagcaacacgctctccagcaacacctccagcaacagtgacgacaagcactttgggtctggcgacctgatggaccccgaattactggggctgacctacatcaaaggggcctccaccgacagtggcatcgacacggccccctgcatgcctgccaccatcctcggccctgtgcacctggcaggcagcaggtccctgatccacagccgggccgagcagtgggctgatgctgccgacgtctctgggcctgacgacgagccagccaagttatattctgtgcatggctacgcgtccaccatctccgccggcagtgctgcggaaggcagcatgggcgatctcagtgagatatcctctcattccagtggttctcaccattcaggaagcccttcagctcactgttcaaaaagtagtgggtctctggattcatccaaagtctacatcgtgtctcacagcagcggacaacaggttcccgggtccatgtccaagccctaccacagacaaggggcagtgaacaaatatgtcatcggctggaagaaatcggagggcagcccaccgcccgaggagcctgaagtgactgaatgtcccgggatgtatagtgagatggatgtcatgtccacagcaactcagcatcagacagtggtgggagatgctgttgcagagactcaacatgttctgtctaaagaagattttctgaaattgatgcttcctgacagccccttagtggaggaggggcgaagaaagttttcgttctatgggaacctgtctccaaggaggtcgctttaccgcacgctgtctgacgagagcatctgcagcaacaggagggggtcctcctttggcagttcccggagttccgtgcttgaccaggccctgcccaacgacattctgttcagcaccaccccaccctaccacagcacgctgcctccgcgggcccaccccgcacccagcatggggagcctgagaaatgagttctggttctccgatgggtccttatcagataagtccaagtgcgcagatcctggcctgatgcccctcccggacacagccacagggttagattggacccacctcgtggatgctgcacgggcatttgaagaccagagggtggcatccttctgcaccctgacagatatgcagcatgggcaggacctggaaggggcccaagagctgcccttatgtgtagatccaggcagtggcaaagagttcatggacacaactggggagcgttctccatcaccactgaccgggaaagtcaatcagctggaattaattcttcgacaactccagaccgaccttcggaaggaaaaacaagacaaggccgttctccaagcagaagtgcagcacctgagacaggacaacatgaggctgcaggaggagtcccagaccgcgacagctcagctgcggaaattcacagaatggtttttcaccaccatcgacaaaaaatcttagccaatccgcacctcatcaagggaccactgggaaatgccccttgtccctttgaagtcacaaacatgtggtttttctgtgtgctttcaaccaatcgtagatgtttttgctgttccattctgtgtagcaccattcaccacagcaggatagggagcctcgactctttctcggtaaccacggcagagagcagcgccgatgtgaagatgaatgaatgtaactcctggtgtgaagatgaatgtaaaccctggcgacagttgagacctttttcttttagactctgctaaaacagtgctctggcttgggcttacctcaagagggaagatagttgagttttatttcctgtatatcaggtgacctggtagagatgtaaagcaatttaccatagtttgggctttagtattgtaaaataaacatgagaacaaataatcagacatatactttaatgttaaaggtgctctatttttttggatgtacagtagttttatttccacagccacattaccatagcaataagaaaggaggcatagtacatagttggaaaagctttgtggggggattaaaaaaaaaaaaaagcactgttgtgtttaacactagttcagatgcagttaccttagagacttatttatttgcaggaacaaatggtgcctgaatattaacagtgttctgattaaaaacaaaaaaaagatacatatgccttgtaaatggctcaccgagtggtcagtagtcacttcaactcttagttcacttttgtatagttgctctgctggaaagaaatgagagtgaatctgcttactcactagaacttccctgtgtgctgtgagccagcggaaccacttgtacaatgccagatttgtttatctttgtacagaagctttgatgaagtgtcttgtatttaacacccttatttaagcttatttaaccttaaattgttaattttataaaatttggtttggcctgcactacgatgagggatggaggtagctgcaggctcagaagagactgagcttgcacagatcagaccgagaagcagggtgagagattctaacgactggatgctgctagtaacacattgtttgtattgctttaccatttttaactgttagatttgagatgaacatacattttgcttttttaataaatgtttaaaagaagtccacataaaaaatggtgt

SEQ ID NO: 297125 - DNA, 4188 bp, Homo sapiens
  misc_feature (11)..(11): n is a, c, g, or t
ggtctagaggntccccatacgatgctcgacaacagacaacagctactgaggaaaaggcacataggaaatgacatcgtcaccatcgtcttccaggagcctggggcacttccttttactccaaaaagcatccggtctcactttcagcatgtctttgtcatagtcaaagtgcataatccatgtaccgaaaatgtgtgttatagtgttggagtttccagatcaaaagatgtgccaccatttggcccaccgattcccaaaggtgtaacttttccaaagtcagccgtgttccgggacttccttttagccaaagtaatcaatgcagaaaatgcagcccataaatcagaaaagtttcgagcaatggccactcgaacgaggcaggagtacttgaaagatctggcggagaactttgtcacaaccgccaccgtggatacctctgtgaagttcagcttcattacgctgggtgcgaagaaaaaggagaaggtaaagccaaggaaggatgcccacttgtttagcattggggccatcatgtggcacgtgatagcccgggacttcggccagtctgctgacattgaatgtcttctcgggatctccaatgagttcatcatgttgattgaaaaggattccaagaatgttgtattcaactgttcctgcagggatgtgattgggtggacatctggattagtgagtatcaaagtgttttacgaaagaggagaatgtgtcctcctgtcctcggtagacaactgtgctgaagacatcagggaaattgttcagcgattagtaatagtgacgagaggctgcgagactgtggaaatgaccctgaggaggaacgggctgggccagcttggcttccatgtgaattttgaaggaattgtcgcagcatgtggaaccttttggctttgcctggaaggctggccttcgccaagggagccgcctcgtggagatctgcaaagtagccgtggccactctgacccacgagcagatgatcgacctgctccgtacttctgtgactgtgaaggtggtcatcatccagccccatgatgacggctcgccccgaagagggtgttcagagctctgccggatccctatggtggaatataaactcgacagcgagggcaccccctgcgagtataaaacccccttcaggaggaacaccacgtggcaccgggtgcccactcctgccctgcagcccctctctagagcttcccccatccccggcacgcccgaccggctgccgtgccaacagctgctccagcaggcccaggctgccattcctcgaagcacctccttcgaccggaagctgcccgatggcacgagaagctcacccagcaaccagtcatcctccagcgaccctggacccggcgggagcggaccctggagaccacaagtgggctacgacgggtgccagtcccctctactgctcgaacaccagggctcaggccctttggaatgtgacggagccagggagagggaagacaccatggaagcaagcaggcacccggaaaccaaatggcatggcccaccttccaaagtcctgggttcctataaagaaagagctctgcagaaagatggaagttgcaaagattcccccaataagctttctcacattggggataaaagttgctccagtcactccagcagcaacacgctctccagcaacacctccagcaacagtgacgacaagcactttgggtctggcgacctgatggaccccgaattactggggctgacctacatcaaaggggcctccaccgacagtggcatcgacacggccccctgcatgcctgccaccatcctcggccctgtgcacctggcaggcagcaggtccctgatccacagccgggccgagcagtgggctgatgctgccgacgtctctgggcctgacgacgagccagccaagttatattctgtgcatggctacgcgtccaccatctccgccggcagtgctgcggaaggcagcatgggcgatctcagtgagatatcctctcattccagtggttctcaccattcaggaagcccttcagctcactgttcaaaaagtagtgggtctctggattcatccaaagtctacatcgtgtctcacagcagcggacaacaggttcccgggtccatgtccaagccctaccacagacaaggggcagtgaacaaatatgtcatcggctggaagaaatcggagggcagcccaccgcccgaggagcctgaagtgactgaatgtcccgggatgtatagtgagatggatgtcatgtccacagcaactcagcatcagacagtggtgggagatgctgttgcagagactcaacatgttctgtctaaagaagattttctgaaattgatgcttcctgacagccccttagtggaggaggggcgaagaaagttttcgttctatgggaacctgtctccaaggaggtcgctttaccgcacgctgtctgacgagagcatctgcagcaacaggagggggtcctcctttggcagttcccggagttccgtgcttgaccaggccctgcccaacgacattctgttcagcaccaccccaccctaccacagcacgctgcctccgcgggcccaccccgcacccagcatggggagcctgagaaatgagttctggttctccgatgggtccttatcagataagtccaagtgcgcagatcctggcctgatgcccctcccggacacagccacagggttagattggacccacctcgtggatgctgcacgggcatttgaagaccagagggtggcatccttctgcaccctgacagatatgcagcatgggcaggacctggaaggggcccaagagctgcccttatgtgtagatccaggcagtggcaaagagttcatggacacaactggggagcgttctccatcaccactgaccgggaaagtcaatcagctggaattaattcttcgacaactccagaccgaccttcggaaggaaaaacaagacaaggccgttctccaagcagaagtgcagcacctgagacaggacaacatgaggctgcaggaggagtcccagaccgcgacagctcagctgcggaaattcacagaatggtttttcaccaccatcgacaaaaaatcttagccaatccgcacctcatcaagggaccactgggaaatgccccttgtccctttgaagtcacaaacatgtggtttttctgtgtgctttcaaccaatcgtagatgtttttgctgttccattctgtgtagcaccattcaccacagcaggatagggagcctcgactctttctcggtaaccacggcagagagcagcgccgatgtgaagatgaatgaatgtaactcctggtgtgaagatgaatgtaaaccctggcgacagttgagacctttttcttttagactctgctaaaacagtgctctggcttgggcttacctcaagagggaagatagttgagttttatttcctgtatatcaggtgacctggtagagatgtaaagcaatttaccatagtttgggctttagtattgtaaaataaacatgagaacaaataatcagacatatactttaatgttaaaggtgctctatttttttggatgtacagtagttttatttccacagccacattaccatagcaataagaaaggaggcatagtacatagttggaaaagctttgtggggggattaaaaaaaaaaaaaagcactgttgtgtttaacactagttcagatgcagttaccttagagacttatttatttgcaggaacaaatggtgcctgaatattaacagtgttctgattaaaaacttcaactcttagttcacttttgtatagttgctctgctggaaagaaatgagagtgaatctgcttactcactagaacttccctgtgtgctgtgagccagcggaaccacttgtacaatgccagatttgtttatctttgtacagaagctttgatgaagtgtcttgtatttaacacccttatttaagcttatttaaccttaaattgttaattttataaaatttggtttggcctgcactacgatgagggatggaggtagctgcaggctcagaagagactgagcttgcacagatcagaccgagaagcagggtgagagattctaacgactggatgctgctagtaacacattgtttgtattgctttaccatttttaactgttagatttgagatgaacatacattttgcttttttaataaatgtttaaaagaagtccacataaaaaatggtgt

SEQ ID NO: 297126 - DNA, 4219 bp, Homo sapiens
  misc_feature (11)..(11): n is a, c, g, or t
ggtctagaggntccccatacgatgctcgacaacagacaacagctactgaggaaaaggcacataggaaatgacatcgtcaccatcgtcttccaggagcctggggcacttccttttactccaaaaagcatccggtctcactttcagcatgtctttgtcatagtcaaagtgcataatccatgtaccgaaaatgtgtgttatagtgttggagtttccagatcaaaagatgtgccaccatttggcccaccgattcccaaaggtgtaacttttccaaagtcagccgtgttccgggacttccttttagccaaagtaatcaatgcagaaaatgcagcccataaatcagaaaagtttcgagcaatggccactcgaacgaggcaggagtacttgaaagatctggcggagaactttgtcacaaccgccaccgtggatacctctgtgaagttcagcttcattacgctgggtgcgaagaaaaaggagaaggtaaagccaaggaaggatgcccacttgtttagcattggggccatcatgtggcacgtgatagcccgggacttcggccagtctgctgacattgaatgtcttctcgggatctccaatgagttcatcatgttgattgaaaaggattccaagaatgttgtattcaactgttcctgcagggatgtgattgggtggacatctggattagtgagtatcaaagtgttttacgaaagaggagaatgtgtcctcctgtcctcggtagacaactgtgctgaagacatcagggaaattgttcagcgattagtaatagtgacgagaggctgcgagactgtggaaatgaccctgaggaggaacgggctgggccagcttggcttccatgtgaattttgaaggaattgtcgcagcatgtggaaccttttggctttgcctggaaggctggccttcgccaagggagccgcctcgtggagatctgcaaagtagccgtggccactctgacccacgagcagatgatcgacctgctccgtacttctgtgactgtgaaggtggtcatcatccagccccatgatgacggctcgccccgaagagggtgttcagagctctgccggatccctatggtggaatataaactcgacagcgagggcaccccctgcgagtataaaacccccttcaggaggaacaccacgtggcaccgggtgcccactcctgccctgcagcccctctctagagcttcccccatccccggcacgcccgaccggctgccgtgccaacagctgctccagcaggcccaggctgccattcctcgaagcacctccttcgaccggaagctgcccgatggcacgagaagctcacccagcaaccagtcatcctccagcgaccctggacccggcgggagcggaccctggagaccacaagtgggctacgacgggtgccagtcccctctactgctcgaacaccagggctcaggccctttggaatgtgacggagccagggagagggaagacaccatggaagcaagcaggcacccggaaaccaaatggcatggcccaccttccaaagtcctgggttcctataaagaaagagctctgcagaaagatggaagttgcaaagattcccccaataagctttctcacattggggataaaagttgctccagtcactccagcagcaacacgctctccagcaacacctccagcaacagtgacgacaagcactttgggtctggcgacctgatggaccccgaattactggggctgacctacatcaaaggggcctccaccgacagtggcatcgacacggccccctgcatgcctgccaccatcctcggccctgtgcacctggcaggcagcaggtccctgatccacagccgggccgagcagtgggctgatgctgccgacgtctctgggcctgacgacgagccagccaagttatattctgtgcatggctacgcgtccaccatctccgccggcagtgctgcggaaggcagcatgggcgatctcagtgagatatcctctcattccagtggttctcaccattcaggaagcccttcagctcactgttcaaaaagtagtgggtctctggattcatccaaagtctacatcgtgtctcacagcagcggacaacaggttcccgggtccatgtccaagccctaccacagacaaggggcagtgaacaaatatgtcatcggctggaagaaatcggagggcagcccaccgcccgaggagcctgaagtgactgaatgtcccgggatgtatagtgagatggatgtcatgtccacagcaactcagcatcagacagtggtgggagatgctgttgcagagactcaacatgttctgtctaaagaagattttctgaaattgatgcttcctgacagccccttagtggaggaggggcgaagaaagttttcgttctatgggaacctgtctccaaggaggtcgctttaccgcacgctgtctgacgagagcatctgcagcaacaggagggggtcctcctttggcagttcccggagttccgtgcttgaccaggccctgcccaacgacattctgttcagcaccaccccaccctaccacagcacgctgcctccgcgggcccaccccgcacccagcatggggagcctgagaaatgagttctggttctccgatgggtccttatcagataagtccaagtgcgcagatcctggcctgatgcccctcccggacacagccacagggttagattggacccacctcgtggatgctgcacgggcatttgaagaccagagggtggcatccttctgcaccctgacagatatgcagcatgggcaggacctggaaggggcccaagagctgcccttatgtgtagatccaggcagtggcaaagagttcatggacacaactggggagcgttctccatcaccactgaccgggaaagtcaatcagctggaattaattcttcgacaactccagaccgaccttcggaaggaaaaacaagacaaggccgttctccaagcagaagtgcagcacctgagacaggacaacatgaggctgcaggaggagtcccagaccgcgacagctcagctgcggaaattcacagaatggtttttcaccaccatcgacaaaaaatcttagccaatccgcacctcatcaagggaccactgggaaatgccccttgtccctttgaagtcacaaacatgtggtttttctgtgtgctttcaaccaatcgtagatgtttttgctgttccattctgtgtagcaccattcaccacagcaggatagggagcctcgactctttctcggtaaccacggcagagagcagcgccgatgtgaagatgaatgaatgtaactcctggtgtgaagatgaatgtaaaccctggcgacagttgagacctttttcttttagactctgctaaaacagtgctctggcttgggcttacctcaagagggaagatagttgagttttatttcctgtatatcaggtgacctggtagagatgtaaagcaatttaccatagtttgggctttagtattgtaaaataaacatgagaacaaataatcagacatatactttaatgttaaaggtgctctatttttttggatgtacagtagttttatttccacagccacattaccatagcaataagaaaggaggcatagtacatagttggaaaagctttgtggggggattaaaaaaaaaaaaaagcactgttgtgtttaacactagttcagatgcagttaccttagagacttatttatttgcaggaacaaatggtgcctgaatattaacagtgttctgattaaaaacaaaaaaaagatacatatgccttgtaaatggctcaccgagtggtcagtagtcacttcaactcttagttcacttttgtatagttgctctgctggaaagaaatgagagtgaatctgcttactcactagaacttccctgtgtgctgtgagccagcggaaccacttgtacaatgccagatttgtttatctttgtacagaagctttgatgaagtgtcttgtatttaacacccttatttaagcttatttaaccttaaattgttaattttataaaatttggtttggcctgcactacgatgagggatggaggtagctgcaggctcagaagagactgagcttgcacagatcagaccgagaagcagggtgagagattctaacgactggatgctgctagtaacacattgtttgtcctgtccccccttctcctcctgatccctctcacctgacctcacttccgggttttcttcttaatgtataaaaa

SEQ ID NO: 297127 - DNA, 1707 bp, Homo sapiens
actggttcccaggacttcatttgggtcttccttgtctccattggataaaccaacttaaataatatatcttttgttttcctaccaactcgtatatctatagagtttctgcatctctttttaaatcagtaaagtcccagaatgggctttccactagatcagcaatatggacactttcccattctgacataatataatatatctgcttgctgggctctaagcacatgaaataattttttcgagtgaaaacttgaccaacaaaaatgctcgattgactctcttgaatctttctaattctatccttatttgctagggagcgttctccatcaccactgaccgggaaagtcaatcagctggaattaattcttcgacaactccagaccgaccttcggaaggaaaaacaagacaaggccgttctccaagcagaagtgcagcacctgagacaggacaacatgaggctgcaggaggagtcccagaccgcgacagctcagctgcggaaattcacagaatggtttttcaccaccatcgacaaaaaatcttagccaatccgcacctcatcaagggaccactgggaaatgccccttgtccctttgaagtcacaaacatgtggtttttctgtgtgctttcaaccaatcgtagatgtttttgctgttccattctgtgtagcaccattcaccacagcaggatagggagcctcgactctttctcggtaaccacggcagagagcagcgccgatgtgaagatgaatgaatgtaactcctggtgtgaagatgaatgtaaaccctggcgacagttgagacctttttcttttagactctgctaaaacagtgctctggcttgggcttacctcaagagggaagatagttgagttttatttcctgtatatcaggtgacctggtagagatgtaaagcaatttaccatagtttgggctttagtattgtaaaataaacatgagaacaaataatcagacatatactttaatgttaaaggtgctctatttttttggatgtacagtagttttatttccacagccacattaccatagcaataagaaaggaggcatagtacatagttggaaaagctttgtggggggattaaaaaaaaaaaaaagcactgttgtgtttaacactagttcagatgcagttaccttagagacttatttatttgcaggaacaaatggtgcctgaatattaacagtgttctgattaaaaacaaaaaaaagatacatatgccttgtaaatggctcaccgagtggtcagtagtcacttcaactcttagttcacttttgtatagttgctctgctggaaagaaatgagagtgaatctgcttactcactagaacttccctgtgtgctgtgagccagcggaaccacttgtacaatgccagatttgtttatctttgtacagaagctttgatgaagtgtcttgtatttaacacccttatttaagcttatttaaccttaaattgttaattttataaaatttggtttggcctgcactacgatgagggatggaggtagctgcaggctcagaagagactgagcttgcacagatcagaccgagaagcagggtgagagattctaacgactggatgctgctagtaacacattgtttgtattgctttaccatttttaactgttagatttgagatgaacatacattttgcttttttaataaatgtttaaaagaagtccacataaaaaatggtgt

SEQ ID NO: 297128 - DNA, 1813 bp, Homo sapiens
actggttcccaggacttcatttgggtcttccttgtctccattggataaaccaacttaaataatatatcttttgttttcctaccaactcgtatatctatagagtttctgcatctctttttaaatcagtaaagtcccagaatgggctttccactagatcagcaatatggacactttcccattctgacataatataatatatctgcttgctgggctctaagcacatgaaataattttttcgagtgaaaacttgaccaacaaaaatgctcgattgactctcttgaatctttctaattctatccttatttgctagggagcgttctccatcaccactgaccgggaaagtcaatcagctggaattaattcttcgacaactccagaccgaccttcggaaggtaatcaattggaagagcataatcagaactgtttctcttataaaatcagccccttataactactacagataaattgaaaagatcagtttatttctactctgaccaggaaaaacaagacaaggccgttctccaagcagaagtgcagcacctgagacaggacaacatgaggctgcaggaggagtcccagaccgcgacagctcagctgcggaaattcacagaatggtttttcaccaccatcgacaaaaaatcttagccaatccgcacctcatcaagggaccactgggaaatgccccttgtccctttgaagtcacaaacatgtggtttttctgtgtgctttcaaccaatcgtagatgtttttgctgttccattctgtgtagcaccattcaccacagcaggatagggagcctcgactctttctcggtaaccacggcagagagcagcgccgatgtgaagatgaatgaatgtaactcctggtgtgaagatgaatgtaaaccctggcgacagttgagacctttttcttttagactctgctaaaacagtgctctggcttgggcttacctcaagagggaagatagttgagttttatttcctgtatatcaggtgacctggtagagatgtaaagcaatttaccatagtttgggctttagtattgtaaaataaacatgagaacaaataatcagacatatactttaatgttaaaggtgctctatttttttggatgtacagtagttttatttccacagccacattaccatagcaataagaaaggaggcatagtacatagttggaaaagctttgtggggggattaaaaaaaaaaaaaagcactgttgtgtttaacactagttcagatgcagttaccttagagacttatttatttgcaggaacaaatggtgcctgaatattaacagtgttctgattaaaaacaaaaaaaagatacatatgccttgtaaatggctcaccgagtggtcagtagtcacttcaactcttagttcacttttgtatagttgctctgctggaaagaaatgagagtgaatctgcttactcactagaacttccctgtgtgctgtgagccagcggaaccacttgtacaatgccagatttgtttatctttgtacagaagctttgatgaagtgtcttgtatttaacacccttatttaagcttatttaaccttaaattgttaattttataaaatttggtttggcctgcactacgatgagggatggaggtagctgcaggctcagaagagactgagcttgcacagatcagaccgagaagcagggtgagagattctaacgactggatgctgctagtaacacattgtttgtattgctttaccatttttaactgttagatttgagatgaacatacattttgcttttttaataaatgtttaaaagaagtccacataaaaaatggtgt

SEQ ID NO: 297129 - DNA, 2410 bp, Homo sapiens
  misc_feature (11)..(11): n is a, c, g, or t
ggtctagaggntccccatacgatgctcgacaacagacaacagctactgaggaaaaggcacataggaaatgacatcgtcaccatcgtcttccaggagcctggggcacttccttttactccaaaaagcatccggtctcactttcagcatgtctttgtcatagtcaaagtgcataatccatgtaccgaaaatgtgtgttatagtgttggagtttccagatcaaaagatgtgccaccatttggcccaccgattcccaaaggtgtaacttttccaaagtcagccgtgttccgggacttccttttagccaaagtaatcaatgcagaaaatgcagcccataaatcagaaaagtttcgagcaatggccactcgaacgaggcaggagtacttgaaagatctggcggagaactttgtcacaaccgccaccgtggatacctctgtgaagttcagcttcattacgctgggtgcgaagaaaaaggagaaggtaaagccaaggaaggatgcccacttgtttagcattggggccatcatgtggcacgtgatagcccgggacttcggccagtctgctgacattgaatgtcttctcgggatctccaatgagttcatcatgttgattgaaaaggattccaagaatgttgtattcaactgttcctgcagggatgtgattgggtggacatctggattagtgagtatcaaagtgttttacgaaagaggagaatgtgtcctcctgtcctcggtagacaactgtgctgaagacatcagggaaattgttcagcgattagtaatagtgacgagaggctgcgagactgtggaaatgaccctgaggaggaacgggctgggccagcttggcttccatgtgaattttgaaggaattgtcgcagcatgtggaaccttttggctttgcctggaaggctggccttcgccaagggagccgcctcgtggagatctgcaaagtagccgtggccactctgacccacgagcagatgatcgacctgctccgtacttctgtgactgtgaaggtggtcatcatccagccccatgatgacggctcgccccgaagagggtgttcagagctctgccggatccctatggtggaatataaactcgacagcgagggcaccccctgcgagtataaaacccccttcaggaggaacaccacgtggcaccgggtgcccactcctgccctgcagcccctctctagagcttcccccatccccggcacgcccgaccggctgccgtgccaacagctgctccagcaggcccaggctgccattcctcgaagcacctccttcgaccggaagctgcccgatggcacgagaagctcacccagcaaccagtcatcctccagcgaccctggacccggcgggagcggaccctggagaccacaagtgggctacgacgggtgccagtcccctctactgctcgaacaccagggctcaggccctttggaatgtgacggagccagggagagggaagacaccatggaagcaagcaggcacccggaaaccaaatggcatggcccaccttccaaagtcctgggttcctataaagaaagagctctgcagaaagatggaagttgcaaagattcccccaataagctttctcacattggggataaaagttgctccagtcactccagcagcaacacgctctccagcaacacctccagcaacagtgacgacaagcactttgggtctggcgacctgatggaccccgaattactggggctgacctacatcaaaggggcctccaccgacagtggcatcgacacggccccctgcatgcctgccaccatcctcggccctgtgcacctggcaggcagcaggtccctgatccacagccgggccgagcagtgggctgatgctgccgacgtctctgggcctgacgacgagccagccaagttatattctgtgcatggctacgcgtccaccatctccgccggcagtgctgcggaaggcagcatgggcgatctcagtgagatatcctctcattccagtggttctcaccattcaggaagcccttcagctcactgttcaaaaagtagtgggtctctggattcatccaaagtctacatcgtgtctcacagcagcggacaacaggttcccgggtccatgtccaagccctaccacagacaaggggcagtgaacaaatatgtcatcggctggaagaaatcggagggcagcccaccgcccgaggagcctgaagtgactgaatgtcccgggtaaggtggctggctgttcttctctggtcagcatttttcactgtagggattgactaagcaaatgtattttcctcccaaaggaaatgtattttctaaaaaagaataatctaaaaacatctttcttaaactctttaaatgttgatgtttatatttccctataaaattattctcttgatttttacataaaaaaaggaaa

SEQ ID NO: 297130 - DNA, 289 bp, Homo sapiens
tctttgttttgctccaaaacaaggcagtaactggtttgaaggggggaaaagattttatttagctattgcatttccacaaagaaacattgccttgcattgattactaacccttctttctgtgtgtgtttctcccctccccagaccagagggtggcatccttctgcaccctgacagatatgcagcatgggcaggacctggaaggggcccaagagctgcccttatgtgtagatccaggcagtggcaaagagttcatggacacaactgggtatgtgagcccctgtggacccct

SEQ ID NO: 297131 - DNA, 350 bp, Homo sapiens
taggaggaatgaatgtatcgatcagtctccatgactcagtttatttctactctgaccaggaaaaacaagacaaggccgttctccaagcagaagtgcagcacctgagacaggacaacatgaggctgcaggaggagtcccagaccgcgacagctcagctgcggaaattcacagaatggtttttcaccaccatcgacaaaaaatcttagccaatccgcacctcatcaagggaccactgggaaatgccccttgtccctttgaagtcacaaacatgtggtttttctgtgtgctttcaaccaatcgtagatgtttttgctgttccattctgtgtagcaccattcaccacagcagga

SEQ ID NO: 297132 - DNA, 4347 bp, Homo sapiens
  misc_feature (11)..(11): n is a, c, g, or t
ggtctagaggntccccatacgatgctcgacaacagacaacagctactgaggaaaaggcacataggaaatgacatcgtcaccatcgtcttccaggagcctggggcacttccttttactccaaaaagcatccggtctcactttcagcatgtctttgtcatagtcaaagtgcataatccatgtaccgaaaatgtgtgttatagtgttggagtttccagatcaaaagatgtgccaccatttggcccaccgattcccaaaggtgtaacttttccaaagtcagccgtgttccgggacttccttttagccaaagtaatcaatgcagaaaatgcagcccataaatcagaaaagtttcgagcaatggccactcgaacgaggcaggagtacttgaaagatctggcggagaactttgtcacaaccgccaccgtggatacctctgtgaagttcagcttcattacgctgggtgcgaagaaaaaggagaaggtaaagccaaggaaggatgcccacttgtttagcattggggccatcatgtggcacgtgatagcccgggacttcggccagtctgctgacattgaatgtcttctcgggatctccaatgagttcatcatgttgattgaaaaggattccaagaatgttgtattcaactgttcctgcagggatgtgattgggtggacatctggattagtgagtatcaaagtgttttacgaaagaggagaatgtgtcctcctgtcctcggtagacaactgtgctgaagacatcagggaaattgttcagcgattagtaatagtgacgagaggctgcgagactgtggaaatgaccctgaggaggaacgggctgggccagcttggcttccatgtgaattttgaaggaattgtcgcagcatgtggaaccttttggctttgcctggaaggctggccttcgccaagggagccgcctcgtggagatctgcaaagtagccgtggccactctgacccacgagcagatgatcgacctgctccgtacttctgtgactgtgaaggtggtcatcatccagccccatgatgacggctcgccccgaagagggtgttcagagctctgccggatccctatggtggaatataaactcgacagcgagggcaccccctgcgagtataaaacccccttcaggaggaacaccacgtggcaccgggtgcccactcctgccctgcagcccctctctagagcttcccccatccccggcacgcccgaccggctgccgtgccaacagctgctccagcaggcccaggctgccattcctcgaagcacctccttcgaccggaagctgcccgatggcacgagaagctcacccagcaaccagtcatcctccagcgaccctggacccggcgggagcggaccctggagaccacaagtgggctacgacgggtgccagtcccctctactgctcgaacaccagggctcaggccctttggaatgtgacggagccagggagagggaagacaccatggaagcaagcaggcacccggaaaccaaatggcatggcccaccttccaaagtcctgggttcctataaagaaagagctctgcagaaagatggaagttgcaaagattcccccaataagctttctcacattggggataaaagttgctccagtcactccagcagcaacacgctctccagcaacacctccagcaacagtgacgacaagcactttgggtctggcgacctgatggaccccgaattactggggctgacctacatcaaaggggcctccaccgacagtggcatcgacacggccccctgcatgcctgccaccatcctcggccctgtgcacctggcaggcagcaggtccctgatccacagccgggccgagcagtgggctgatgctgccgacgtctctgggcctgacgacgagccagccaagttatattctgtgcatggctacgcgtccaccatctccgccggcagtgctgcggaaggcagcatgggcgatctcagtgagatatcctctcattccagtggttctcaccattcaggaagcccttcagctcactgttcaaaaagtagtgggtctctggattcatccaaagtctacatcgtgtctcacagcagcggacaacaggttcccgggtccatgtccaagccctaccacagacaaggggcagtgaacaaatatgtcatcggctggaagaaatcggagggcagcccaccgcccgaggagcctgaagtgactgaatgtcccgggatgtatagtgagatggatgtcatgtccacagcaactcagcatcagacagtggtgggagatgctgttgcagagactcaacatgttctgtctaaagaagattttctgaaattgatgcttcctgacagccccttagtggaggaggggcgaagaaagttttcgttctatgggaacctgtctccaaggaggtcgctttaccgcacgctgtctgacgagagcatctgcagcaacaggagggggtcctcctttggcagttcccggagttccgtgcttgaccaggccctgcccaacgacattctgttcagcaccaccccaccctaccacagcacgctgcctccgcgggcccaccccgcacccagcatggggagcctgagaaatgagttctggttctccgatgggtccttatcagataagtccaagtgcgcagatcctggcctgatgcccctcccggacacagccacagggttagattggacccacctcgtggatgctgcacgggcatttgaagaccagagggtggcatccttctgcaccctgacagatatgcagcatgggcaggacctggaaggggcccaagagctgcccttatgtgtagatccaggcagtggcaaagagttcatggacacaactggggagcgttctccatcaccactgaccgggaaagtcaatcagctggaattaattcttcgacaactccagaccgaccttcggaaggtaatcaattggaagagcataatcagaactgtttctcttataaaatcagccccttataactactacagataaattgaaaagatcagtttatttctactctgaccaggaaaaacaagacaaggccgttctccaagcagaagtgcagcacctgagacaggacaacatgaggctgcaggaggagtcccagaccgcgacagctcagctgcggaaattcacagaatggtttttcaccaccatcgacaaaaaatcttagccaatccgcacctcatcaagggaccactgggaaatgccccttgtccctttgaagtcacaaacatgtggtttttctgtgtgctttcaaccaatcgtagatgtttttgctgttccattctgtgtagcaccattcaccacagcaggatagggagcctcgactctttctcggtaaccacggcagagagcagcgccgatgtgaagatgaatgaatgtaactcctggtgtgaagatgaatgtaaaccctggcgacagttgagacctttttcttttagactctgctaaaacagtgctctggcttgggcttacctcaagagggaagatagttgagttttatttcctgtatatcaggtgacctggtagagatgtaaagcaatttaccatagtttgggctttagtattgtaaaataaacatgagaacaaataatcagacatatactttaatgttaaaggtgctctatttttttggatgtacagtagttttatttccacagccacattaccatagcaataagaaaggaggcatagtacatagttggaaaagctttgtggggggattaaaaaaaaaaaaaagcactgttgtgtttaacactagttcagatgcagttaccttagagacttatttatttgcaggaacaaatggtgcctgaatattaacagtgttctgattaaaaacaaaaaaaagatacatatgccttgtaaatggctcaccgagtggtcagtagtcacttcaactcttagttcacttttgtatagttgctctgctggaaagaaatgagagtgaatctgcttactcactagaacttccctgtgtgctgtgagccagcggaaccacttgtacaatgccagatttgtttatctttgtacagaagctttgatgaagtgtcttgtatttaacacccttatttaagcttatttaaccttaaattgttaattttataaaatttggtttggcctgcactacgatgagggatggaggtagctgcaggctcagaagagactgagcttgcacagatcagaccgagaagcagggtgagagattctaacgactggatgctgctagtaacacattgtttgtattgctttaccatttttaactgttagatttgagatgaacatacattttgcttttttaataaatgtttaaaagaagtccacataaaaaatggtgt

SEQ ID NO: 297133 - DNA, 3502 bp, Homo sapiens
  misc_feature (11)..(11): n is a, c, g, or t
ggtctagaggntccccatacgatgctcgacaacagacaacagctactgaggaaaaggcacataggaaatgacatcgtcaccatcgtcttccaggagcctggggcacttccttttactccaaaaagcatccggtctcactttcagcatgtctttgtcatagtcaaagtgcataatccatgtaccgaaaatgtgtgttatagtgttggagtttccagatcaaaagatgtgccaccatttggcccaccgattcccaaaggtgtaacttttccaaagtcagccgtgttccgggacttccttttagccaaagtaatcaatgcagaaaatgcagcccataaatcagaaaagtttcgagcaatggccactcgaacgaggcaggagtacttgaaagatctggcggagaactttgtcacaaccgccaccgtggatacctctgtgaagttcagcttcattacgctgggtgcgaagaaaaaggagaaggtaaagccaaggaaggatgcccacttgtttagcattggggccatcatgtggcacgtgatagcccgggacttcggccagtctgctgacattgaatgtcttctcgggatctccaatgagttcatcatgttgattgaaaaggattccaagaatgttgtattcaactgttcctgcagggatgtgattgggtggacatctggattagtgagtatcaaagtgttttacgaaagaggagaatgtgtcctcctgtcctcggtagacaactgtgctgaagacatcagggaaattgttcagcgattagtaatagtgacgagaggctgcgagactgtggaaatgaccctgaggaggaacgggctgggccagcttggcttccatgtgaattttgaaggaattgtcgcagcatgtggaaccttttggctttgcctggaaggctggccttcgccaagggagccgcctcgtggagatctgcaaagtagccgtggccactctgacccacgagcagatgatcgacctgctccgtacttctgtgactgtgaaggtggtcatcatccagccccatgatgacggctcgccccgaagagggtgttcagagctctgccggatccctatggtggaatataaactcgacagcgagggcaccccctgcgagtataaaacccccttcaggaggaacaccacgtggcaccgggtgcccactcctgccctgcagcccctctctagagcttcccccatccccggcacgcccgaccggctgccgtgccaacagctgctccagcaggcccaggctgccattcctcgaagcacctccttcgaccggaagctgcccgatggcacgagaagctcacccagcaaccagtcatcctccagcgaccctggacccggcgggagcggaccctggagaccacaagtgggctacgacgggtgccagtcccctctactgctcgaacaccagggctcaggccctttggaatgtgacggagccagggagagggaagacaccatggaagcaagcaggcacccggaaaccaaatggcatggcccaccttccaaagtcctgggttcctataaagaaagagctctgcagaaagatggaagttgcaaagattcccccaataagctttctcacattggggataaaagttgctccagtcactccagcagcaacacgctctccagcaacacctccagcaacagtgacgacaagcactttgggtctggcgacctgatggaccccgaattactggggctgacctacatcaaaggggcctccaccgacagtggcatcgacacggccccctgcatgcctgccaccatcctcggccctgtgcacctggcaggcagcaggtccctgatccacagccgggccgagcagtgggctgatgctgccgacgtctctgggcctgacgacgagccagccaagttatattctgtgcatggctacgcgtccaccatctccgccggcagtgctgcggaaggcagcatgggcgatctcagtgagatatcctctcattccagtggttctcaccattcaggaagcccttcagctcactgttcaaaaagtagtgggtctctggattcatccaaagtctacatcgtgtctcacagcagcggacaacaggttcccgggtccatgtccaagccctaccacagacaaggggcagtgaacaaatatgtcatcggctggaagaaatcggagggcagcccaccgcccgaggagcctgaagtgactgaatgtcccgggatgtatagtgagatggatgtcatgtccacagcaactcagcatcagacagtggtgggagatgctgttgcagagactcaacatgttctgtctaaagaagattttctgaaattgatgcttcctgacagccccttagtggaggaggggcgaagaaagttttcgttctatgggaacctgtctccaaggaggtcgctttaccgcacgctgtctgacgagagcatctgcagcaacaggagggggtcctcctttggcagttcccggagttccgtgcttgaccaggccctgcccaacgacattctgttcagcaccaccccaccctaccacagcacgctgcctccgcgggcccaccccgcacccagcatggggagcctgagaaatgagttctggttctccgatgggtccttatcagataagtccaagtgcgcagatcctggcctgatgcccctcccggacacagccacagggttagattggacccacctcgtggatgctgcacgggcatttgaagaccagagggtggcatccttctgcaccctgacagatatgcagcatgggcaggacctggaaggggcccaagagctgcccttatgtgtagatccaggcagtggcaaagagttcatggacacaactggggagcgttctccatcaccactgaccgggaaagtcaatcagctggaattaattcttcgacaactccagaccgaccttcggaaggaaaaacaagacaaggccgttctccaagcagaagtgcagcacctgagacaggacaacatgaggctgcaggaggagtcccagaccgcgacagctcagctgcggaaattcacagaatggtttttcaccaccatcgacaaaaaatcttagccaatccgcacctcatcaagggaccactgggaaatgccccttgtccctttgaagtcacaaacatgtggtttttctgtgtgctttcaaccaatcgtagatgtttttgctgttccattctgtgtagcaccattcaccacagcaggatagggagcctcgactctttctcggtaaccacggcagagagcagcgccgatgtgaagatgaatgaatgtaactcctggtgtgaagatgaatgtaaaccctggcgacagttgagacctttttcttttagactctgctaaaacagtgctctggcttgggcttacctcaagagggaagatagttgagttttatttcctgtatatcaggtgacctggtagagatgtaaagcaatttaccatagtttgggctttagtattgtaaaataaacatgagaacaaataatcagac

SEQ ID NO: 297134 - DNA, 327 bp, Homo sapiens
  misc_feature (11)..(11): n is a, c, g, or t
ggtctagaggntccccatacgatgctcgacaacagacaacagctactgaggaaaaggcacataggaaatgacatcgtcaccatcgtcttccaggagcctggggcacttccttttactccaaaaagcatccggtctcactttcagcatgtctttgtcatagtcaaagtgcataatccatgtaccgaaaatgtgtgttatagtgttggagtttccagatcaaaagatgtgccccaggctcctggaagacgatggtgacgatgtcatttcctatgtgccttttcctcagtagctgttgtctgttgtcccgcgcgcagaggctcctctaga

SEQ ID NO: 297135 - DNA, 3722 bp, Homo sapiens
gcgagtgcatgtgttaaaactcttctgccttgcagcccacatcttctagagctccctgtcttcatatgtactaaagggagacacaaccctatgtgttttttcccaaagcatgtctctagcaagagggtacatagaaatggaacatgaggctttttgtcactgattttatgataaccagttaatgtggaatctgctggttgtcttactacagctttctatctccggtgaaagccataaaaatttaggttaacttttaagctcatgtctatatatatgtgtgtaagctagcatatacatatggtgattgacaagtatagttaattttatatggatttaaaagcaagcaatttttatatctacagacgtactcttcacttatggtggcttttatcccgccacatatataaatatatatatatatagcaaacagccttgcaaatcatcggccagaaaagctgcagggcgttgcaatggccttttcctacctgtttgccacctgtggtgagggtgagcaggatgattgaactgctgcatatttcaaacctgttatcactggcagtgtgtcccaagagaagctgaccagattatgcattctactgttctctagcacaagtactcaccaaaaagccaaatttcccctttggagttggtgacttagtgtagtctgtggctgacctagaaagacacagagttatcaagagtttcccttcctagaagatgaatgttaccttttgtgttaggaggtagagaaaataaaaatagcttttttttccctagaattgctaattactcttaacaacaaattaaattcaaagcctgtccttgagaactggaaatgtaaaatcatggttcaagttttataccttagtgattcctcagtaggtgttactaggagttcactgaatgaacttaggagtgaaccttcgatgtgcttgattttcttttgtgccttagtttctctgaatagcagaggcatcaaattttggtggggaatgagaggagtattaggggaaagtttgaaaatagctctcctggagatggagggcacacagagtggtcctcaggctcaccttgactgagttgattcacagttatcctgcatcagaccattagatttctttagtgctatgattataatagggatttttgaatcaccaaaaacagtttttagatgtttatgttctttgttttactatcaatgttgtgctggttaagggagagaaaagttcaagaagatcttacatatttgaaaggaaattggtactcttgaaggctatgcaacatgagtctttgaacaagaattccttgctactttgattcattcatcaaatactgagtgcctgtgtgccaggcacaggtgaactctggggattcaggggtaactaaaacagattggaaccctgcccttgtgaagctttcagtctagaagggagacgtgaaacaaattttagcttcaaaagcaacatctatttttgcctgttagcatgcatttattttaaaagtcatattagagttacctggttccacttcagagcagactgggaaaatcaggcttacaatggaatcagatgctgtgggcctaaaacagctctttaaaaatctatttttttaggccaggtgcgttggctcacacctgtaatcccagcactttgggaggccaaggtgggtggatatgaggtcaggaggtcgagaccagcctggccaatatgatgaaaccttacctctactaaaaataaaaaattagccgggcatggtggcacatgcctgtagtcccagctactcgggaaactgaggcagaagaatcgcttgaacccgggaggcggaggttgcagtgagccgggatcacgtcactgtactccagcctgggcaagagtgagacaccgtctcaaaaaaaaaaaaaatttttttttaaatggaatcagagaaaccaacaaaatatgtaacatgtataaatgcctgaggagatcagttattgagaaatccatttacaatgctggaggagaggggatggccaggaaagaagtgcaacaaataaatggaagatgaccctaaaaatgcaccagtgacagtcagtcaatccatcagaccacctcacatgcagggtagaaacatggagtgtgcggcagcatcctcctcacatccctttgtgagcacggctgctccggaatactgaccatctgggctagcacgacttagcagagggttctgcaggatgtgctattttaaagcagctgggtgcaacttgtgaaaacgggaatctagagcagaacatgtaatcagcgatggctgggattggtggacaggattgacaggagtatttgaggctctaccaggcctgtctacaggacagcttcatcaaagggacattttttaacctgttattttaaatgccacatatatgttgtaatgctgaagcatacaggtagaatttctggatcgtaactactagtgacttctgaggtttacagttagaaaatgttctcaaaggtttatcagttatgtattgatgattggtaatctagaccctctggaggctgtagaatgtgaaaagatacagctgagctgacaagttttagggcactatcttctggaatgaaatcggccaagaaaatggttcaagggcatgggggttagagaatgtttcttttacctaaaaatgttaagccaactatggaagattggggtcgtgggggcatgaaatacaaaattatgataatttatacagaactaggtttctttatgttctgcaagaaggtttttattagctaatttggggaggggggcatgctgcagtattttttttcctgggaacatgcatttctgatgggaagttattttgtttacaagagttggttttacacacaaccctgaatgaatgtgtctatggcctaaaaatggtagacctgtatttccttcccgaggcaggctgattcgtttcctgattccttctgtctgagattacctgatgctgaccagacttatttttcctttcctgaatcttcacagctgagtttatggcacccatccaagaccttcccatttgaatgactagatttctattctatccccgatcatccttttgaaatagttctagtgataaactcagagaaattcaatatattgattgaattttattttttcgctttgtatctacaacagaaattgatttgttcatttttatttcaaatctcttcatggcaagttgggctaatggactttgcactcaagaaaggtttgtttaccagttttgtagccatgtttggcaaatcttagcaactagaaaccccgtcctttcttttccttctttatatgttcttgcagttactcttgtattgcaagattttctgactttaagctttgagactactgcatcttaaaagaagaactaggctgactggcaaaaagtcttgccagtggccctgtcactcccatgatgctttggttttgagagttgggaaaactctgagaacttaagggaaccaaactcaggaatcccaaaattggtggcattgtgccattcgtttaggggctgaacataggacctgtctgaaactgagtgagctagatgcatttgggtttgaatttttgtcacatactgaaatgtaagtcagccctaaataatcaaaacactttattttatttttctttttttaaataggaactttctgaagaaaaagtggtgtgtaaaacatttgatatttaagacaataaagtttttatca

SEQ ID NO: 297136 - DNA, 2984 bp, Homo sapiens
gcgagtgcatgtgttaaaactcttctgccttgcagcccacatcttctagagctccctgtcttcatatgtactaaagggagacacaaccctatgtgttttttcccaaagcatgtctctagcaagagggtacatagaaatggaacatgaggctttttgtcactgattttatgataaccagttaatgtggaatctgctggttgtcttactacagctttctatctccggtgaaagccataaaaatttaggttaacttttaagctcatgtctatatatatgtgtgtaagctagcatatacatatggtgattgacaagtatagttaattttatatggatttaaaagcaagcaatttttatatctacagacgtactcttcacttatggtggcttttatcccgccacatatataaatatatatatatatagcaaacagccttgcaaatcatcggccagaaaagctgcagggcgttgcaatggccttttcctacctgtttgccacctgtggtgagggtgagcaggatgattgaactgctgcatatttcaaacctgttatcactggcagtgtgtcccaagagaagctgaccagattatgcattctactgttctctagcacaagtactcaccaaaaagccaaatttcccctttggagttggtgacttagtgtagtctgtggctgacctagaaagacacagagttatcaagagtttcccttcctagaagatgaatgttaccttttgtgttaggaggtagagaaaataaaaatagcttttttttccctagaattgctaattactcttaacaacaaattaaattcaaagcctgtccttgagaactggaaatgtaaaatcatggttcaagttttataccttagtgattcctcagtaggtgttactaggagttcactgaatgaacttaggagtgaaccttcgatgtgcttgattttcttttgtgccttagtttctctgaatagcagaggcatcaaattttggtggggaatgagaggagtattaggggaaagtttgaaaatagctctcctggagatggagggcacacagagtggtcctcaggctcaccttgactgagttgattcacagttatcctgcatcagaccattagatttctttagtgctatgattataatagggatttttgaatcaccaaaaacagtttttagatgtttatgttctttgttttactatcaatgttgtgctggttaagggagagaaaagttcaagaagatcttacatatttgaaaggaaattggtactcttgaaggctatgcaacatgagtctttgaacaagaattccttgctactttgattcattcatcaaatactgagtgcctgtgtgccaggcacaggtgaactctggggattcaggggtaactaaaacagattggaaccctgcccttgtgaagctttcagtctagaagggagacgtgaaacaaattttagcttcaaaagcaacatctatttttgcctgttagcatgcatttattttaaaagtcatattagagttacctggttccacttcagagcagactgggaaaatcaggcttacaatggaatcagatgctgtgggcctaaaacagctctttaaaaatctatttttttaggccaggtgcgttggctcacacctgtaatcccagcactttgggaggccaaggtgggtggatatgaggtcaggaggtcgagaccagcctggccaatatgatgaaaccttacctctactaaaaataaaaaattagccgggcatggtggcacatgcctgtagtcccagctactcgggaaactgaggcagaagaatcgcttgaacccgggaggcggaggttgcagtgagccgggatcacgtcactgtactccagcctgggcaagagtgagacaccgtctcaaaaaaaaaaaaaatttttttttaaatggaatcagagaaaccaacaaaatatgtaacatgtataaatgcctgaggagatcagttattgagaaatccatttacaatgctggaggagaggggatggccaggaaagaagtgcaacaaataaatggaagatgaccctaaaaatgcaccagtgacagtcagtcaatccatcagaccacctcacatgcagggtagaaacatggagtgtgcggcagcatcctcctcacatccctttgtgagcacggctgctccggaatactgaccatctgggctagcacgacttagcagagggttctgcaggatgtgctattttaaagcagctgggtgcaacttgtgaaaacgggaatctagagcagaacatgtaatcagcgatggctgggattggtggacaggattgacaggagtatttgaggctctaccaggcctgtctacaggacagcttcatcaaagggacattttttaacctgttattttaaatgccacatatatgttgtaatgctgaagcatacaggtagaatttctggatcgtaactactagtgacttctgaggtttacagttagaaaatgttctcaaaggtttatcagttatgtattgatgattggtaatctagaccctctggaggctgtagaatgtgaaaagatacagctgagctgacaagttttagggcactatcttctggaatgaaatcggccaagaaaatggttcaagggcatgggggttagagaatgtttcttttacctaaaaatgttaagccaactatggaagattggggtcgtgggggcatgaaatacaaaattatgataatttatacagaactaggtttctttatgttctgcaagaaggtttttattagctaatttggggaggggggcatgctgcagtattttttttcctgggaacatgcatttctgatgggaagttattttgtttacaagagttggttttacacacaaccctgaatgaatgtgtctatggcctaaaaatggtagacctgtatttcctcaattttccgaggcatggcgacgaggcgcgctgggctctgaaacggaccaggacctttctcacccacgta

SEQ ID NO: 297137 - DNA, 903 bp, Homo sapiens
tgcatgctctgttgtggtccagtggccttcccagccctgtgccccaaagcacctggagcatatagccttgcagaacttctacttgcctgcctccctgcctctggccatggcctgccggtgcctcagcttccttctgatggggaccttcctgtcagtttcccagacagtcctggcccagctggatgcactgctggtcttcccaggccaagtggctcaactctcctgcacgctcagcccccagcacgtcaccatcagggactacggtgtgtcctggtaccagcagcgggcaggcagtgcccctcgatatctcctctactaccgctcggaggaggatcaccaccggcctgctgacatccccgatcgattctcggcagccaaggatgaggcccacaatgcctgtgtcctcaccattagtcccgtgcagcctgaagacgacgcggattactactgctctgttggctacggctttagtccctaggggtggggtgtgagatgggtgcctcccctctgcctcccatttctgcccctgaccttgggtcccttttaaactttctctgagccttgcttcccctctgtaaaatgggttaataatattcaacatgtcaacaacaaaacagaccaacagcgtacgcgagagacactattgctggcgcgcctcgggcccggaaaaagcgtttttagagacaccttgtgtgtggcgcgcgggcccccagaaggtataggacaacaagggccaaaagcggcgacccagagacaaacccgcgtccacgaaaaacaggccggagaatccccacacaatcaaaaaaccccgcgggagaaaccgcggctcgaacaacacccgaagggggccagaggacaccaggggctacccaagagggccacaggagccgcatacaagtcccg

SEQ ID NO: 297138 - DNA, 855 bp, Homo sapiens
tgcatgctctgttgtggtccagtggccttcccagccctgtgccccaaagcacctggagcatatagccttgcagaacttctacttgcctgcctccctgcctctggccatggcctgccggtgcctcagcttccttctgatggggaccttcctgtcaggccaagtggctcaactctcctgcacgctcagcccccagcacgtcaccatcagggactacggtgtgtcctggtaccagcagcgggcaggcagtgcccctcgatatctcctctactaccgctcggaggaggatcaccaccggcctgctgacatccccgatcgattctcggcagccaaggatgaggcccacaatgcctgtgtcctcaccattagtcccgtgcagcctgaagacgacgcggattactactgctctgttggctacggctttagtccctaggggtggggtgtgagatgggtgcctcccctctgcctcccatttctgcccctgaccttgggtcccttttaaactttctctgagccttgcttcccctctgtaaaatgggttaataatattcaacatgtcaacaacaaaacagaccaacagcgtacgcgagagacactattgctggcgcgcctcgggcccggaaaaagcgtttttagagacaccttgtgtgtggcgcgcgggcccccagaaggtataggacaacaagggccaaaagcggcgacccagagacaaacccgcgtccacgaaaaacaggccggagaatccccacacaatcaaaaaaccccgcgggagaaaccgcggctcgaacaacacccgaagggggccagaggacaccaggggctacccaagagggccacaggagccgcatacaagtcccg

SEQ ID NO: 297139 - DNA, 874 bp, Homo sapiens
acgtgctcaaaagtagtttttaaaaagagacaaaagaggccaggcgcagtggctcacgcctgtaatcccaaagtgctggaattactggcgtgagccaccatgcccagcctcaaatatgtttttagaaaatatcattgtcctcctcctcttaagatttttttaagttattttgctcaagtacttaagtagtctggctcaagtactttgtttacaattaaaatggatattatagcatttaatagaagaaatggttatggcttatccaaaaagaatgtcagcatgacctggtgtagacttaaaaaactacatgtttgtgaatattttataatgtggaatgatcattgaaatatcaaggattctagtaattgtatttcctgaataaatgtatgtttatgaattttctaacttacattttgttgtgtcctctgccaacaatctggttttataattgttgtctaaagtttgctagtagtgtttcttcaaaggttattccaggtatggttaagtagtgagaaaaatcacttattaattttcaagaactttgagactaatttgtattgactcggttttttaaaataactggcaaatgctatgcttctacttttaaaatttgtggtaatacccagaatggatgtaaaataacatttttcaatagattacttcatttatcaatttaattctgattttaaggcttatttaaaataaatttgtatgagttatgtcctcgttctttggatttgaaaaaagttgatataactacacaatagataacgtttatgaaaggtatgtataaaaaaacataattcctggtggctgctgaaatgaaactttgaatttctatattttgctttgtctttcataaaatttaaagaaa

SEQ ID NO: 297140 - DNA, 2626 bp, Homo sapiens
atcatgttgttaaattgtaaattttcaaaattaattgatgttttaaaaatgttgagaccaaagtagtatagaagtatggacttaatttaattgtaaaattattagaggtatttgttgtagagctttatatattaaagagaggtattggtgcatataaaaacagtaatattattgttatgcttgtattcttgcatttcagggtaagtaaaccctgaagaaatcttattttagtatagctacagctgcagtagcttttaagtatgtatcaacatttcattataaattatagcttcctggttctgtgtctcagctgtttcagaactttcagccaagttaaatcttttttggtgttgaaacttttagtaagttgagtaagctatttttttccctacggtaatccacaatctgttctttgtgtgggttgacacctatttataattcttaaaataagggtagctcaaaggagccaagtacagtagtttagcttgctactgttgagcatgaatagcagtaggttgttttcattaatgcagttttcataatgtatcccagaattttaaatcttgaccatagaaaaatacagtcattcattggcaaagatgtacagtggtggtttagtgcagtgaggaaatgatgggaatttttatcttagaaatggatgattcgtgaataaaactaggtacatagtaagtgtatgatagatgtttgatttgtaaattacaaatataaattatcacccccatttccatttattttcttgatatatcaaaatgtgttgacttagtgattctcaatcttagctacatattagcctggcagagctttaaaaaattgatacctgggtcctattccataacaactaaatcaaaatcacccttttttttttttttgtaaagctttccaggtggttctaaaggacacctagggtcaataacccattataaaatgatctgattacactggacactcttaggaagtatcaaaatagaacagttcaatttgcagctacttaatgattaattacatttcttaggttttttttttgttttttttttggtttgtttgttttttgttttaaaagagacaggatcttgctttgtctcccaggctggaacacagtggtgtgatcatagctcactgcagcctgaaactccttggcttccacctcagcctcccaaagcattaggattataggcgtgagccactgcacctggccaagtaatttcttttaggaataaaaggtacttggcattccttatttgggaagtaattacagtcttatctttttttttcttttttcttttttttaataaaatctaccagtaatttaaatgtgagctttttatgtctgtcatcattctgccccctttgcctttaaaacttacaaaaatacgtgtttgttatttgagaaagcatgtttaaaaattgcagatgagaaatattgtcgttaataattatgtactgtcttaatgtgggcacttcatttgttagtataatactagataatagcagcctagttctttaggatttgacgattcaaattttttttttgttttttgtttttgtttttttttgagacagagtcttgctctgttgcccaggctggcgtgcagtggtgtgatctcggctcacttcagcctccgccacctcaaggcagttcaagcaattctcctgcctcagcctcccgagtagctaggactacaggcgtgtgccacctctcccggctaatttttttgtatttttagtagagacggggtttcaccgtgttagccaggatgatctcgatctcctgacctcgtgattcacccccctcggcctcccaaagtgctggaattactggcgtgagccaccatgcccagcctcaaatatgtttttagaaaatatcattgtcctcctcctcttaagatttttttaagttattttgctcaagtacttaagtagtctggctcaagtactttgtttacaattaaaatggatattatagcatttaatagaagaaatggttatggcttatccaaaaagaatgtcagcatgacctggtgtagacttaaaaaactacatgtttgtgaatattttataatgtggaatgatcattgaaatatcaaggattctagtaattgtatttcctgaataaatgtatgtttatgaattttctaacttacattttgttgtgtcctctgccaacaatctggttttataattgttgtctaaagtttgctagtagtgtttcttcaaaggttattccaggtatggttaagtagtgagaaaaatcacttattaattttcaagaactttgagactaatttgtattgactcggttttttaaaataactggcaaatgctatgcttctacttttaaaatttgtggtaatacccagaatggatgtaaaataacatttttcaatagattacttcatttatcaatttaattctgattttaaggcttatttaaaataaatttgtatgagttatgtcctcgttctttggatttgaaaaaagttgatataactacacaatagataacgtttatgaaaggtatgtataaaaaaacataattcctggtggctgctgaaatgaaactttgaatttctatattttgctttgtctttcataaaatttaaagaaa

SEQ ID NO: 297141 - DNA, 1237 bp, Homo sapiens
caggtcgactttaggggttccccaacgatggtcctcagctagtcttatctttttttttcttttttcttttttttaataaaatctaccagtaatttaaatgtgagctttttatgtctgtcatcattctgccccctttgcctttaaaacttacaaaaatacgtgtttgttatttgagaaagcatgtttaaaaattgcagatgagaaatattgtcgttaataattatgtactgtcttaatgtgggcacttcatttgttagtataatactagataatagcagcctagttctttaggatttgacgattcaaattttttttttgttttttgtttttgtttttttttgagacagagtcttgctctgttgcccaggctggcgtgcagtggtgtgatctcggctcacttcagcctccgccacctcaaggcagttcaagcaattctcctgcctcagcctcccgagtagctaggactacaggcgtgtgccacctctcccggctaatttttttgtatttttagtagagacggggtttcaccgtgttagccaggatgatctcgatctcctgacctcgtgattcacccccctcggcctcccaaagtgctggaattactggcgtgagccaccatgcccagcctcaaatatgtttttagaaaatatcattgtcctcctcctcttaagatttttttaagttattttgctcaagtacttaagtagtctggctcaagtactttgtttacaattaaaatggatattatagcatttaatagaagaaatggttatggcttatccaaaaagaatgtcagcatgacctggtgtagacttaaaaaactacatgtttgtgaatattttataatgtggaatgatcattgaaatatcaaggattctagtaattgtatttcctgaataaatgtatgtttatgaattttctaacttacattttgttgtgtcctctgccaacaatctggttttataattgttgtctaaagtttgctagtagtgtttcttcaaaggttattccaggtatggttaagtagtgagaaaaatcacttattaattttcaagaactttgagactaatttgtattgactcggttttttaaaataactggcaaatgctatgcttctacttttaaaatttgtggtaatacccagaatggatgtaaaataacatttttcaatagattacttcatttatcaatttaattctgattttaaggcttatttaaaataaatttgtatgagtta

SEQ ID NO: 297142 - DNA, 2417 bp, Homo sapiens
atcatgttgttaaattgtaaattttcaaaattaattgatgttttaaaaatgttgagaccaaagtagtatagaagtatggacttaatttaattgtaaaattattagaggtatttgttgtagagctttatatattaaagagaggtattggtgcatataaaaacagtaatattattgttatgcttgtattcttgcatttcagggtaagtaaaccctgaagaaatcttattttagtatagctacagctgcagtagcttttaagtatgtatcaacatttcattataaattatagcttcctggttctgtgtctcagctgtttcagaactttcagccaagttaaatcttttttggtgttgaaacttttagtaagttgagtaagctatttttttccctacggtaatccacaatctgttctttgtgtgggttgacacctatttataattcttaaaataagggtagctcaaaggagccaagtacagtagtttagcttgctactgttgagcatgaatagcagtaggttgttttcattaatgcagttttcataatgtatcccagaattttaaatcttgaccatagaaaaatacagtcattcattggcaaagatgtacagtggtggtttagtgcagtgaggaaatgatgggaatttttatcttagaaatggatgattcgtgaataaaactaggtacatagtaagtgtatgatagatgtttgatttgtaaattacaaatataaattatcacccccatttccatttattttcttgatatatcaaaatgtgttgacttagtgattctcaatcttagctacatattagcctggcagagctttaaaaaattgatacctgggtcctattccataacaactaaatcaaaatcacccttttttttttttttgtaaagctttccaggtggttctaaaggacacctagggtcaataacccattataaaatgatctgattacactggacactcttaggaagtatcaaaatagaacagttcaatttgcagctacttaatgattaattacatttcttaggttttttttttgttttttttttggtttgtttgttttttgttttaaaagagacaggatcttgctttgtctcccaggctggaacacagtggtgtgatcatagctcactgcagcctgaaactccttggcttccacctcagcctcccaaagcattaggattataggcgtgagccactgcacctggccaagtaatttcttttaggaataaaaggtacttggcattccttatttgggaagtaattacagtcttatctttttttttcttttttcttttttttaataaaatctaccagtaatttaaatgtgagctttttatgtctgtcatcattctgccccctttgcctttaaaacttacaaaaatacgtgtttgttatttgagaaagcatgtttaaaaattgcagatgagaaatattgtcgttaataattatgtactgtcttaatgtgggcacttcatttgttagtataatactagataatagcagcctagttctttaggatttgacgattcaaattttttttttgttttttgtttttgtttttttttgagacagagtcttgctctgttgcccaggctggcgtgcagtggtgtgatctcggctcacttcagcctccgccacctcaaggcagttcaagcaattctcctgcctcagcctcccgagtagctaggactacaggcgtgtgccacctctcccggctaatttttttgtatttttagtagagacggggtttcaccgtgttagccaggatgatctcgatctcctgacctcgtgattcacccccctcggcctcccaaagtgctggaattactggcgtgagccaccatgcccagcctcaaatatgtttttagaaaatatcattgtcctcctcctcttaagatttttttaagttattttgctcaagtacttaagtagtctggctcaagtactttgtttacaattaaaatggatattatagcatttaatagaagaaatggttatggcttatccaaaaagaatgtcagcatgacctggtgtagacttaaagattctagtaattgtatttcctgaataaatgtatgtttatgaattttctaacttacattttgttgtgtcctctgccaacaatctggttttataattgttgtctaaagtttgctagtagtgtttcttcaaaggttattccaggtatggttaagtagtgagaaaaatcacttattaattttcaagaactttgagactaatttgtattgactcggttttttaaaataactggcaaatgctatgcttctacttttaaaatttgtggtaatacccagaatggatgtaaaataacatttttcaatagattacttcatttatcaatttaattctgattttaaggcttatttaaaataaatttgtatgagtta

SEQ ID NO: 297143 - DNA, 719 bp, Homo sapiens
acgtgctcaaaagtagtttttaaaaagagacaaaagaggccaggcgcagtggctcacgcctgtaatcccaaagtgctggaattactggcgtgagccaccatgcccagcctcaaatatgtttttagaaaatatcattgtcctcctcctcttaagatttttttaagttattttgctcaagtacttaagtagtctggctcaagtactttgtttacaattaaaatggatattatagcatttaatagaagaaatggttatggcttatccaaaaagaatgtcagcatgacctggtgtagacttaaaaaactacatgtttgtgaatattttataatgtggaatgatcattgaaatatcaaggattctagtaattgtatttcctgaataaatgtatgtttatgaattttctaacttacattttgttgtgtcctctgccaacaatctggttttataattgttgtctaaagtttgctagtagtgtttcttcaaaggttattccaggtatggttaagtagtgagaaaaatcacttattaattttcaagaactttgagactaatttgtattgactcggttttttaaaataactggcaaatgctatgcttctacttttaaaatttgtggtaatacccagaatggatgtaaaataacatttttcaatagattacttcatttatcaatttaattctgattttaaggcttatttaaaataaatttgtatgagtta

SEQ ID NO: 297144 - DNA, 2471 bp, Homo sapiens
atcatgttgttaaattgtaaattttcaaaattaattgatgttttaaaaatgttgagaccaaagtagtatagaagtatggacttaatttaattgtaaaattattagaggtatttgttgtagagctttatatattaaagagaggtattggtgcatataaaaacagtaatattattgttatgcttgtattcttgcatttcagggtaagtaaaccctgaagaaatcttattttagtatagctacagctgcagtagcttttaagtatgtatcaacatttcattataaattatagcttcctggttctgtgtctcagctgtttcagaactttcagccaagttaaatcttttttggtgttgaaacttttagtaagttgagtaagctatttttttccctacggtaatccacaatctgttctttgtgtgggttgacacctatttataattcttaaaataagggtagctcaaaggagccaagtacagtagtttagcttgctactgttgagcatgaatagcagtaggttgttttcattaatgcagttttcataatgtatcccagaattttaaatcttgaccatagaaaaatacagtcattcattggcaaagatgtacagtggtggtttagtgcagtgaggaaatgatgggaatttttatcttagaaatggatgattcgtgaataaaactaggtacatagtaagtgtatgatagatgtttgatttgtaaattacaaatataaattatcacccccatttccatttattttcttgatatatcaaaatgtgttgacttagtgattctcaatcttagctacatattagcctggcagagctttaaaaaattgatacctgggtcctattccataacaactaaatcaaaatcacccttttttttttttttgtaaagctttccaggtggttctaaaggacacctagggtcaataacccattataaaatgatctgattacactggacactcttaggaagtatcaaaatagaacagttcaatttgcagctacttaatgattaattacatttcttaggttttttttttgttttttttttggtttgtttgttttttgttttaaaagagacaggatcttgctttgtctcccaggctggaacacagtggtgtgatcatagctcactgcagcctgaaactccttggcttccacctcagcctcccaaagcattaggattataggcgtgagccactgcacctggccaagtaatttcttttaggaataaaaggtacttggcattccttatttgggaagtaattacagtcttatctttttttttcttttttcttttttttaataaaatctaccagtaatttaaatgtgagctttttatgtctgtcatcattctgccccctttgcctttaaaacttacaaaaatacgtgtttgttatttgagaaagcatgtttaaaaattgcagatgagaaatattgtcgttaataattatgtactgtcttaatgtgggcacttcatttgttagtataatactagataatagcagcctagttctttaggatttgacgattcaaattttttttttgttttttgtttttgtttttttttgagacagagtcttgctctgttgcccaggctggcgtgcagtggtgtgatctcggctcacttcagcctccgccacctcaaggcagttcaagcaattctcctgcctcagcctcccgagtagctaggactacaggcgtgtgccacctctcccggctaatttttttgtatttttagtagagacggggtttcaccgtgttagccaggatgatctcgatctcctgacctcgtgattcacccccctcggcctcccaaagtgctggaattactggcgtgagccaccatgcccagcctcaaatatgtttttagaaaatatcattgtcctcctcctcttaagatttttttaagttattttgctcaagtacttaagtagtctggctcaagtactttgtttacaattaaaatggatattatagcatttaatagaagaaatggttatggcttatccaaaaagaatgtcagcatgacctggtgtagacttaaaaaactacatgtttgtgaatattttataatgtggaatgatcattgaaatatcaaggattctagtaattgtatttcctgaataaatgtatgtttatgaattttctaacttacattttgttgtgtcctctgccaacaatctggttttataattgttgtctaaagtttgctagtagtgtttcttcaaaggttattccaggtatggttaagtagtgagaaaaatcacttattaattttcaagaactttgagactaatttgtattgactcggttttttaaaataactggcaaatgctatgcttctacttttaaaatttgtggtaatacccagaatggatgtaaaataacatttttcaatagattacttcatttatcaatttaattctgattttaaggcttatttaaaataaatttgtatgagtta

SEQ ID NO: 297145 - DNA, 4856 bp, Homo sapiens
gtagatgcagtccgccgccgccgctgcctcagccagcaatgcaagattagatctctaaatgcagcaaaacactgcctgaaaacagaccggcccgcgcagcaagcagacatttcacggtgcgctggggaagcttcaaaatatatctgtgactctgtcttcgttgctcttcatccccatcaatttcatcacgggaggcgagcagcaagtaagaatttcactttcggatctgcctagagacacacctccctgctccctcccccactcgatgtgaagagtattccggagtctccgggcgggagtagatttgcagcaccctagcgggagcgaggaaaacctactgattctttagctcattatcatctctcccagacgagatttccttcttatcgcctgcctcatcgctcaagtttgagcctcccgaagtccgggcgggagagacgaaacccctggctcacccccagccgcaggaagccaccgccttgctccaagcccctgcagctctgctgcaccgcagcttctcacccagtgcggatgctgtagatcaacaggttcagggaacttgagcagaataaggagagaccaccgggtgccgcagctcgggtgcagagggaaaaaaggacccatagacttgtggctcgcgtcgcgcgcgcacgctgcgccagggccccaggctggcgcgcactccctctctggctcctccagtccgattgctcctgcccccaccttacaggtctgggatgtacctttccatctgttgctgctttcttctatgggcccctgccctcactctcaagaacctcaactactccgtgccggaggagcaaggggccggcacggtgatcgggaacatcggcagggatgctcgactgcagcctgggcttccgcctgcagagcgcggcggcggagggcgcagcaagtcgggtagctaccgggtgctggagaactccgcaccgcacctgctggacgtggacgcagacagcgggctcctctacaccaagcagcgcatcgaccgcgagtccctgtgccgccacaatgccaagtgccagctgtccctcgaggtgttcgccaacgacaaggagatctgcatgatcaaggtagagatccaggacatcaacgacaacgcgccctccttctcctcggaccagatcgaaatggacatctcggagaacgctgctccgggcacccgcttccccctcaccagcgcacatgaccccgacgccggcgagaatgggctccgcacctacctgctcacgcgcgacgatcacggcctctttggactggacgttaagtcccgcggcgacggcaccaagttcccagaactggtcatccagaaggctctggaccgcgagcaacagaatcaccatacgctcgtgctgactgccctggacggtggcgagcctccacgttccgccaccgtacagatcaacgtgaaggtgattgactccaacgacaacagcccggtcttcgaggcgccatcctacttggtggaactgcccgagaacgctccgctgggtacagtggtcatcgatctgaacgccaccgacgccgatgaaggtcccaatggtgaagtgctctactctttcagcagctacgtgcctgaccgcgtgcgggagctcttctccatcgaccccaagaccggcctaatccgtgtgaagggcaatctggactatgaggaaaacgggatgctggagattgacgtgcaggcccgagacctggggcctaaccctatcccagcccactgcaaagtcacggtcaagctcatcgaccgcaacgacaatgcgccgtccatcggtttcgtctccgtgcgccagggggcgctgagcgaggccgcccctcccggcaccgtcatcgccctggtgcgggtcactgaccgggactctggcaagaacggacagctgcagtgtcgggtcctaggcggaggagggacgggcggcggcgggggcctgggcgggcccgggggttccgtccccttcaagcttgaggagaactacgacaacttctacacggtggtgactgaccgcccgctggaccgcgagacacaagacgagtacaacgtgaccatcgtggcgcgggacgggggctctcctcccctcaactccaccaagtcgttcgcgatcaagattctagacgagaacgacaacccgcctcggttcaccaaagggctctacgtgcttcaggtgcacgagaacaacatcccgggagagtacctgggctctgtgctcgcccaggatcccgacctgggccagaacggcaccgtatcctactctatcctgccctcgcacatcggcgacgtgtctatctacacctatgtgtctgtgaatcccacgaacggggccatctacgccctgcgctcctttaacttcgagcagaccaaggcttttgagttcaaggtgcttgctaaggactcgggggcgcccgcgcacttggagagcaacgccacggtgagggtgacagtgctagacgtgaatgacaacgcgccagtgatcgtgctccccacgctgcagaacgacaccgcggagctgcaggtgccgcgcaacgctggcctgggctatctggtgagcactgtgcgcgccctagacagcgacttcggcgagagcgggcgtctcacctacgagatcgtggacggcaacgacgaccacctgtttgagatcgacccgtccagcggcgagatccgcacgctgcaccctttctgggaggacgtgacgcccgtggtggagctggtggtgaaggtgaccgaccacggcaagcctaccctgtccgcagtggccaagctcatcatccgctcggtgagcggatcccttcccgagggggtaccacgggtgaatggcgagcagcaccactgggacatgtcgctgccgctcatcgtgactctgagcactatctccatcatcctcctagcggccatgatcaccatcgccgtcaagtgcaagcgcgagaacaaggagatccgcacttacaactgccgcatcgccgagtacagccacccgcagctgggtgggggcaagggcaagaagaagaagatcaacaaaaatgatatcatgctggtgcagagcgaagtggaggagaggaacgccatgaacgtcatgaacgtggtgagcagcccctccctggccacctcccccatgtacttcgactaccagacccgcctgcccctcagctcgccccggtcggaggtgatgtatctcaaaccggcctccaacaacctgactgtccctcaggggcacgcgggctgccacaccagcttcaccggacaagggactaatgcaagcgagacccctgccactcggatgtccataattcagacagacaattttcccgcagagcccaattacatgggcagcaggcagcagtttgttcaaagtatttcagtagctccacgtttaaggacccagaaagagccagcctgagagacagtgggcacggggacagtgatcaggctgacagtgaccaagacactaacaaaggctcctgctgtgacatgtctgttagggaggcactcaagatgaaaactacttcaactaaaagccaaccacttgaacaagaaccagaagagtgtgttaattgcacagatgaatgccgagtgcttggtcattctgacaggtgctggatgccacagttccctgcagccaatcaggctgaaaatgcagattaccgcacaaatctctttgtacctacagttgaagctaatgttgagactgagacttacgaaactgtgaatcccactgggaaaaagactttttgtacatttggaaaagacaagcgagagcacactattctcattgccaacgttaaaccttatttaaaagccaaacgtgccctgagccctctcctccaagaggtcccctcagcatcaagcagcccaaccaaggcgtgcatcgagccttgcacctcaacaaaaggctccctggatggctgtgaagcaaaaccaggagccctggctgaagcaagcagtcagtacttgcccactgacagtcaatatctgtcacctagtaagcaaccaagagaccctcccttcatggcttccgatcagatggcaagggtctttgcagatgtgcattccagagccagccgggattccagtgagatgggtgctgttcttgagcagcttgaccaccccaacagggatctgggcagagagtctgtggatgcagaggaagttgtgagagaaattgataagcttttgcaagactgccggggaaacgaccctgtggctgtgagaaagtgaaaaaagaaaaaaaaaaaaggcattggcattttcttgtctcttctgttgatttaaaaatgatccctcctggtgataacccattttacagggatgaagaaagaccaatgctgctttaaggcttttagtgaacatctgaagtgcccacaagtatgttctttccactgctgatttctttttcagagataacaatggtttcgttttgaccaaacttgtattaggacagaattaatgatgcttaaagagaaaagaaaaaaagagagaagaaaaaggagagatgaaaaaggaggatgaggagaagaattaccttttgacaatctgttaggaaggtatgcagtgtgagaactgaagtatttctgatcactctcagactgtcctccgtgatttatgctgacttaactgtttacctataaaccccatacaaagcagggtcataatttgtgatctgtggtggatttctagcagtcatcacaggcttctactgaaagtcctgaaaagaccttgcagtagtccaagctacaccaaacattaacacatatttgtggtaaacatttctgtataaagttacctgacacacatataaacacaaggaacattccatatcattagtcgaaaacaaaaacaaaaaaaaaac

SEQ ID NO: 297146 - DNA, 1001 bp, Homo sapiens
gacgaccctgtggctgtgagaaagcttatcaatttctctcacaacttcctctgcatccacagactctctgcccagatccctggctgaagcaagcagtcagtacttgcccactgacagtcaatatctgtcacctagtaagcaaccaagagaccctcccttcatggcttccgatcagatggcaagggtctttgcagatgtgcattccagagccagccgggattccagtgagatgggtgctgttcttgagcagcttgaccaccccaacagggatctgggcagagagtctgtggatgcagaggaagttgtgagagaaattgataagcttttgcaagactgccggggaaacgaccctgtggctgtgagaaagtgaaaaaagaaaaaaaaaaaaggcattggcattttcttgtctcttctgttgatttaaaaatgatccctcctggtgataacccattttacagggatgaagaaagaccaatgctgctttaaggcttttagtgaacatctgaagtgcccacaagtatgttctttccactgctgatttctttttcagagataacaatggtttcgttttgaccaaacttgtattaggacagaattaatgatgcttaaagagaaaagaaaaaaagagagaagaaaaaggagagatgaaaaaggaggatgaggagaagaattaccttttgacaatctgttaggaaggtatgcagtgtgagaactgaagtatttctgatcactctcagactgtcctccgtgatttatgctgacttaactgtttacctataaaccccatacaaagcagggtcataatttgtgatctgtggtggatttctagcagtcatcacaggcttctactgaaagtcctgaaaagaccttgcagtagtccaagctacaccaaacattaacacatatttgtggtaaacatttctgtataaagttacctgacacacatataaacacaaggaacattccatatcattagtcgaaaacaaaaacaaaaaaaaaac

SEQ ID NO: 297147 - DNA, 4324 bp, Homo sapiens
  misc_feature (4278)..(4278): n is a, c, g, or t
gtagatgcagtccgccgccgccgctgcctcagccagcaatgcaagattagatctctaaatgcagcaaaacactgcctgaaaacagaccggcccgcgcagcaagcagacatttcacggtgcgctggggaagcttcaaaatatatctgtgactctgtcttcgttgctcttcatccccatcaatttcatcacgggaggcgagcagcaagtaagaatttcactttcggatctgcctagagacacacctccctgctccctcccccactcgatgtgaagagtattccggagtctccgggcgggagtagatttgcagcaccctagcgggagcgaggaaaacctactgattctttagctcattatcatctctcccagacgagatttccttcttatcgcctgcctcatcgctcaagtttgagcctcccgaagtccgggcgggagagacgaaacccctggctcacccccagccgcaggaagccaccgccttgctccaagcccctgcagctctgctgcaccgcagcttctcacccagtgcggatgctgtagatcaacaggttcagggaacttgagcagaataaggagagaccaccgggtgccgcagctcgggtgcagagggaaaaaaggacccatagacttgtggctcgcgtcgcgcgcgcacgctgcgccagggccccaggctggcgcgcactccctctctggctcctccagtccgattgctcctgcccccaccttacaggtctgggatgtacctttccatctgttgctgctttcttctatgggcccctgccctcactctcaagaacctcaactactccgtgccggaggagcaaggggccggcacggtgatcgggaacatcggcagggatgctcgactgcagcctgggcttccgcctgcagagcgcggcggcggagggcgcagcaagtcgggtagctaccgggtgctggagaactccgcaccgcacctgctggacgtggacgcagacagcgggctcctctacaccaagcagcgcatcgaccgcgagtccctgtgccgccacaatgccaagtgccagctgtccctcgaggtgttcgccaacgacaaggagatctgcatgatcaaggtagagatccaggacatcaacgacaacgcgccctccttctcctcggaccagatcgaaatggacatctcggagaacgctgctccgggcacccgcttccccctcaccagcgcacatgaccccgacgccggcgagaatgggctccgcacctacctgctcacgcgcgacgatcacggcctctttggactggacgttaagtcccgcggcgacggcaccaagttcccagaactggtcatccagaaggctctggaccgcgagcaacagaatcaccatacgctcgtgctgactgccctggacggtggcgagcctccacgttccgccaccgtacagatcaacgtgaaggtgattgactccaacgacaacagcccggtcttcgaggcgccatcctacttggtggaactgcccgagaacgctccgctgggtacagtggtcatcgatctgaacgccaccgacgccgatgaaggtcccaatggtgaagtgctctactctttcagcagctacgtgcctgaccgcgtgcgggagctcttctccatcgaccccaagaccggcctaatccgtgtgaagggcaatctggactatgaggaaaacgggatgctggagattgacgtgcaggcccgagacctggggcctaaccctatcccagcccactgcaaagtcacggtcaagctcatcgaccgcaacgacaatgcgccgtccatcggtttcgtctccgtgcgccagggggcgctgagcgaggccgcccctcccggcaccgtcatcgccctggtgcgggtcactgaccgggactctggcaagaacggacagctgcagtgtcgggtcctaggcggaggagggacgggcggcggcgggggcctgggcgggcccgggggttccgtccccttcaagcttgaggagaactacgacaacttctacacggtggtgactgaccgcccgctggaccgcgagacacaagacgagtacaacgtgaccatcgtggcgcgggacgggggctctcctcccctcaactccaccaagtcgttcgcgatcaagattctagacgagaacgacaacccgcctcggttcaccaaagggctctacgtgcttcaggtgcacgagaacaacatcccgggagagtacctgggctctgtgctcgcccaggatcccgacctgggccagaacggcaccgtatcctactctatcctgccctcgcacatcggcgacgtgtctatctacacctatgtgtctgtgaatcccacgaacggggccatctacgccctgcgctcctttaacttcgagcagaccaaggcttttgagttcaaggtgcttgctaaggactcgggggcgcccgcgcacttggagagcaacgccacggtgagggtgacagtgctagacgtgaatgacaacgcgccagtgatcgtgctccccacgctgcagaacgacaccgcggagctgcaggtgccgcgcaacgctggcctgggctatctggtgagcactgtgcgcgccctagacagcgacttcggcgagagcgggcgtctcacctacgagatcgtggacggcaacgacgaccacctgtttgagatcgacccgtccagcggcgagatccgcacgctgcaccctttctgggaggacgtgacgcccgtggtggagctggtggtgaaggtgaccgaccacggcaagcctaccctgtccgcagtggccaagctcatcatccgctcggtgagcggatcccttcccgagggggtaccacgggtgaatggcgagcagcaccactgggacatgtcgctgccgctcatcgtgactctgagcactatctccatcatcctcctagcggccatgatcaccatcgccgtcaagtgcaagcgcgagaacaaggagatccgcacttacaactgccgcatcgccgagtacagccacccgcagctgggtgggggcaagggcaagaagaagaagatcaacaaaaatgatatcatgctggtgcagagcgaagtggaggagaggaacgccatgaacgtcatgaacgtggtgagcagcccctccctggccacctcccccatgtacttcgactaccagacccgcctgcccctcagctcgccccggtcggaggtgatgtatctcaaaccggcctccaacaacctgactgtccctcaggggcacgcgggctgccacaccagcttcaccggacaagggactaatgcaagcgagacccctgccactcggatgtccataattcagacagacaattttcccgcagagcccaattacatgggcagcaggcagcagtttgttcaaagtatttcagtagctccacgtttaaggacccagaaagagccagcctgagagacagtgggcacggggacagtgatcaggctgacagtgaccaagacactaacaaaggctcctgctgtgacatgtctgttagggaggcactcaagatgaaaactacttcaactaaaagccaaccacttgaacaagaaccagaagagtgtgttaattgcacagatgaatgccgagtgcttggtcattctgacaggtgctggatgccacagttccctgcagccaatcaggctgaaaatgcagattaccgcacaaatctctttgtacctacagttgaagctaatgttgagactgagacttacgaaactgtgaatcccactgggaaaaagactttttgtacatttggaaaagacaagcgagagcacactattctcattgccaacgttaaaccttatttaaaagccaaacgtgccctgagccctctcctccaagaggtcccctcagcatcaagcagcccaaccaaggcgtgcatcgagccttgcacctcaacaaaaggctccctggatggctgtgaagcaaaaccaggagccctggctgaagcaagcagtcagtacttgcccactgacagtcaatatctgtcacctagtaagcaaccaagagaccctcccttcatggcttccgatcagatggcaagggtctttgcagatgtgcattccagagccagccgggattccagtgagatgggtgctgttcttgagcagcttgaccaccccaacagggatctgggcagagagtctgtggatgcagaggaagttgtgagagaaattgataagcttttgcaagactgccggggaaacgaccctgtggctgtgagaaagtgaaaaagcttatcaatttctctcacttcttccccccatcctcagacattaaagangcctgaatgcaaaaagaaataaagttagggaccgagctgatgtata

SEQ ID NO: 297148 - DNA, 4468 bp, Homo sapiens
gtagatgcagtccgccgccgccgctgcctcagccagcaatgcaagattagatctctaaatgcagcaaaacactgcctgaaaacagaccggcccgcgcagcaagcagacatttcacggtgcgctggggaagcttcaaaatatatctgtgactctgtcttcgttgctcttcatccccatcaatttcatcacgggaggcgagcagcaagtaagaatttcactttcggatctgcctagagacacacctccctgctccctcccccactcgatgtgaagagtattccggagtctccgggcgggagtagatttgcagcaccctagcgggagcgaggaaaacctactgattctttagctcattatcatctctcccagacgagatttccttcttatcgcctgcctcatcgctcaagtttgagcctcccgaagtccgggcgggagagacgaaacccctggctcacccccagccgcaggaagccaccgccttgctccaagcccctgcagctctgctgcaccgcagcttctcacccagtgcggatgctgtagatcaacaggttcagggaacttgagcagaataaggagagaccaccgggtgccgcagctcgggtgcagagggaaaaaaggacccatagacttgtggctcgcgtcgcgcgcgcacgctgcgccagggccccaggctggcgcgcactccctctctggctcctccagtccgattgctcctgcccccaccttacaggtctgggatgtacctttccatctgttgctgctttcttctatgggcccctgccctcactctcaagaacctcaactactccgtgccggaggagcaaggggccggcacggtgatcgggaacatcggcagggatgctcgactgcagcctgggcttccgcctgcagagcgcggcggcggagggcgcagcaagtcgggtagctaccgggtgctggagaactccgcaccgcacctgctggacgtggacgcagacagcgggctcctctacaccaagcagcgcatcgaccgcgagtccctgtgccgccacaatgccaagtgccagctgtccctcgaggtgttcgccaacgacaaggagatctgcatgatcaaggtagagatccaggacatcaacgacaacgcgccctccttctcctcggaccagatcgaaatggacatctcggagaacgctgctccgggcacccgcttccccctcaccagcgcacatgaccccgacgccggcgagaatgggctccgcacctacctgctcacgcgcgacgatcacggcctctttggactggacgttaagtcccgcggcgacggcaccaagttcccagaactggtcatccagaaggctctggaccgcgagcaacagaatcaccatacgctcgtgctgactgccctggacggtggcgagcctccacgttccgccaccgtacagatcaacgtgaaggtgattgactccaacgacaacagcccggtcttcgaggcgccatcctacttggtggaactgcccgagaacgctccgctgggtacagtggtcatcgatctgaacgccaccgacgccgatgaaggtcccaatggtgaagtgctctactctttcagcagctacgtgcctgaccgcgtgcgggagctcttctccatcgaccccaagaccggcctaatccgtgtgaagggcaatctggactatgaggaaaacgggatgctggagattgacgtgcaggcccgagacctggggcctaaccctatcccagcccactgcaaagtcacggtcaagctcatcgaccgcaacgacaatgcgccgtccatcggtttcgtctccgtgcgccagggggcgctgagcgaggccgcccctcccggcaccgtcatcgccctggtgcgggtcactgaccgggactctggcaagaacggacagctgcagtgtcgggtcctaggcggaggagggacgggcggcggcgggggcctgggcgggcccgggggttccgtccccttcaagcttgaggagaactacgacaacttctacacggtggtgactgaccgcccgctggaccgcgagacacaagacgagtacaacgtgaccatcgtggcgcgggacgggggctctcctcccctcaactccaccaagtcgttcgcgatcaagattctagacgagaacgacaacccgcctcggttcaccaaagggctctacgtgcttcaggtgcacgagaacaacatcccgggagagtacctgggctctgtgctcgcccaggatcccgacctgggccagaacggcaccgtatcctactctatcctgccctcgcacatcggcgacgtgtctatctacacctatgtgtctgtgaatcccacgaacggggccatctacgccctgcgctcctttaacttcgagcagaccaaggcttttgagttcaaggtgcttgctaaggactcgggggcgcccgcgcacttggagagcaacgccacggtgagggtgacagtgctagacgtgaatgacaacgcgccagtgatcgtgctccccacgctgcagaacgacaccgcggagctgcaggtgccgcgcaacgctggcctgggctatctggtgagcactgtgcgcgccctagacagcgacttcggcgagagcgggcgtctcacctacgagatcgtggacggcaacgacgaccacctgtttgagatcgacccgtccagcggcgagatccgcacgctgcaccctttctgggaggacgtgacgcccgtggtggagctggtggtgaaggtgaccgaccacggcaagcctaccctgtccgcagtggccaagctcatcatccgctcggtgagcggatcccttcccgagggggtaccacgggtgaatggcgagcagcaccactgggacatgtcgctgccgctcatcgtgactctgagcactatctccatcatcctcctagcggccatgatcaccatcgccgtcaagtgcaagcgcgagaacaaggagatccgcacttacaactgccgcatcgccgagtacagccacccgcagctgggtgggggcaagggcaagaagaagaagatcaacaaaaatgatatcatgctggtgcagagcgaagtggaggagaggaacgccatgaacgtcatgaacgtggtgagcagcccctccctggccacctcccccatgtacttcgactaccagacccgcctgcccctcagctcgccccggtcggaggtgatgtatctcaaaccggcctccaacaacctgactgtccctcaggggcacgcgggctgccacaccagcttcaccggacaagggactaatgcaagcgagacccctgccactcggatgtccataattcagacagacaattttcccgcagagcccaattacatgggcagcaggcagcagtttgttcaaagtatttcagtagctccacgtttaaggacccagaaagagccagcctgagagacagtgggcacggggacagtgatcaggctgacagtgaccaagacactaacaaaggctcctgctgtgacatgtctgttagggaggcactcaagatgaaaactacttcaactaaaagccaaccacttgaacaagaaccagaagagtgtgttaattgcacagatgaatgccgagtgcttggtcattctgacaggtgctggatgccacagttccctgcagccaatcaggctgaaaatgcagattaccgcacaaatctctttgtacctacagttgaagctaatgttgagactgagacttacgaaactgtgaatcccactgggaaaaagactttttgtacatttggaaaagacaagcgagagcacactattctcattgccaacgttaaaccttatttaaaagccaaacgtgccctgagccctctcctccaagaggtcccctcagcatcaagcagcccaaccaaggcgtgcatcgagccttgcacctcaacaaaaggctccctggatggctgtgaagcaaaaccaggagccctggctgaagcaagcagtcagtacttgcccactgacagtcaatatctgtcacctagtaagcaaccaagagaccctcccttcatggcttccgatcagatggcaagggtctttgcagatgtgcattccagagccagccgggattccagtgagatgggtgctgttcttgagcagcttgaccaccccaacagggatctgggcagagagtctgtggatgcagaggaagttgtgagagaaattgataagcttttgcaagactgccggggaaacgaccctgtggctgtgagaaagtgaaaaaagaaaaaaaaaaaaggcattggcattttcttgtctcttctgttgatttaaaaatgatccctcctggtgataacccattttacagggatgaagaaagaccaatgctgctttaaggcttttagtgaacatctgaagtgcccacaagtatgttctttccactgctgatttctttttcagagataacaatggtttcgttttgaccaaacttgtattaggacagaattaatgatgcttaaagag

SEQ ID NO: 297149 - DNA, 2942 bp, Homo sapiens
gcggccgcgtcgactgtgacactgccagcagcgcgcagagggagggatgggggcgggtatcggcgtaggggccctcggaaagaacggatattgctgtgacaccgcggggacgctctgaagggacgagtgtcggtgtggcaccggtgcacgctgaaggagccggcggaaccgggtggccatggggatgtgggcatcgctggacgctttgtgggagatgccggccgagaagcgtatcttcggggccgtgctgctcttttcctggacagtgtatctttgggagaccttcctagcacagcggcagagaaggatatataaaacaacaactcatgtaccaccggagttaggacagatcatggattctgaaacatttgagaaatctcgactctatcaactggataaaagcactttcagcttctggtcaggactctattcagagactgaaggcactcttattcttctctttggaggaataccttatctctggagactttctggacggttctgtggttatgctggctttggaccagaatatgagatcactcagtccctggtgtttctgctgttggctacacttttcagtgcattgactggtttgccatggagtctttataatacttttgtgatagaagaaaaacatggcttcaatcaacagactttggggttcttcatgaaagatgcaatcaagaaatttgttgtgactcagtgtattttgttgcctgtgtcttcacttctactttacattattaaaattgggggtgactatttttttatttatgcctggctgttcacattagttgtgtctctggttcttgtcacaatctatgctgattatattgcccctttatttgacaaattcacacctctgcctgagggaaagcttaaagaagaaattgaagtaatggcaaagagtattgactttcctttgacgaaggtgtatgttgtggaaggatctaaacgctcttcccacagcaatgcttatttttatggcttcttcaagaacaagcgaatagttttgtttgacactctactagaagagtactctgtactaaacaaagacatccaggaggattctggcatggaaccccgcaatgaggaagaagggaacagtgaagaaataaaagctaaagttaaaaataagaaacaaggatgtaaaaatgaggaggtactcgctgtactaggccatgaactggggcactggaagttgggacatacagtcaaaaatatcattattagccagatgaattctttcctgtgtttttttttatttgctgtattaattggtcgaaaggagctttttgctgcatttggtttttatgatagccaacccactcttattggactattgatcatcttccagtttattttttcaccttacaatgaggttctttctttttgcctaacagtcctaagccgcagatttgagtttcaagctgatgcatttgccaagaaacttgggaaggctaaagacttatattctgctttaatcaaacttaacaaagataacttgggattccctgtttctgactggttgttctcaatgtggcattattctcatcctccactgctagagagacttcaagctttgaaaactatgaagcaacactgagatgtccaggatctgtgactgaagacatttctgattatttctgtcctggcagcatgttccagctcttgatgtttttaaacttttttttagaagaaaaattaagtacagaaaagcccagatttaaatacatttaatatgtcattttaaaaatgattttaataattcatttcttaaaacactgaatgaattttgaagcttaatgtttttaaaggcatagttttatctttgacatctaatttaccatcaagttgtaaaattatttggaaaaatacagaactcgttttatttgtatacttatatggaatctgcatgtgaggtgtttgagggcatatgtttgaaagagggagcatcaccacaggaatcctttctgtgaggtggaaacagtggtcctgaatcattgtgctcacacctaacttgaaatctggtcttactttcatgctgttatgatttcacctggtgaatcagtgttttaaataagaaaggtaatagttggtaaggccaatgttatttaaatgaaagtagttagaaaaatgctctcctattctaccaaatttttaatttctttcttccctttcttgctacacagtgatcaagagtttctcatagtgctttgaagttagaaattatgtataggatattttaaatcattgagtttgtggggttttttgtttgtttgtttcttttgttttttggaaaatccgtgtctttatctttttttcccacgtggtagatatgatcccattggaggtaaattgtagcttcttctcattcatgcagtaaataatacatcctttcactcagcagagatggccatattaaacacgttttgctatgttaaaagtggcagaacaggaaagacgaattaaaaataacattttttaagcgacataaggatgaaatactgatgaatctctgtgacattacagggaaaaaaatatagttttctatctctttcaagggcagaagagttttcatttttatttttgtaattttatctgtaagtcataaatattacttaatcaggcctgattctacttttgaaaattacagttcttgaaatgcagataatgtttactttgaaaacaaatgtcatgaatgatttccagtttttaaagctatatgtttcactgcttcatatctctgtccactttctgaatgagaacttattttgtgcctagagctctcactcactgataatgcttattaccttctgggcatttattccaaagtgggatcaactgtacgcctttggtatctgaccataaagtcttttgctccgctgacatttgggtgatgtcttcacatggaaatataataaaaataaaaatctagttta

SEQ ID NO: 297150 - DNA, 2237 bp, Homo sapiens
atggcctgccactacgctcctcatcttcaaggctctcatctcctttgcaaacttcttgaaccaccactgcgctgatctaaacgctcttcccacagcaatgcttatttttatggcttcttcaagaacaagcgaatagttttgtttgacactctactagaagagtactctgtactaaacaaagacatccaggaggattctggcatggaaccccgcaatgaggaagaagggaacagtgaagaaataaaagctaaagttaaaaataagaaacaaggatgtaaaaatgaggaggtactcgctgtactaggccatgaactggggcactggaagttgggacatacagtcaaaaatatcattattagccagatgaattctttcctgtgtttttttttatttgctgtattaattggtcgaaaggagctttttgctgcatttggtttttatgatagccaacccactcttattggactattgatcatcttccagtttattttttcaccttacaatgaggttctttctttttgcctaacagtcctaagccgcagatttgagtttcaagctgatgcatttgccaagaaacttgggaaggctaaagacttatattctgctttaatcaaacttaacaaagataacttgggattccctgtttctgactggttgttctcaatgtggcattattctcatcctccactgctagagagacttcaagctttgaaaactatgaagcaacactgagatgtccaggatctgtgactgaagacatttctgattatttctgtcctggcagcatgttccagctcttgatgtttttaaacttttttttagaagaaaaattaagtacagaaaagcccagatttaaatacatttaatatgtcattttaaaaatgattttaataattcatttcttaaaacactgaatgaattttgaagcttaatgtttttaaaggcatagttttatctttgacatctaatttaccatcaagttgtaaaattatttggaaaaatacagaactcgttttatttgtatacttatatggaatctgcatgtgaggtgtttgagggcatatgtttgaaagagggagcatcaccacaggaatcctttctgtgaggtggaaacagtggtcctgaatcattgtgctcacacctaacttgaaatctggtcttactttcatgctgttatgatttcacctggtgaatcagtgttttaaataagaaaggtaatagttggtaaggccaatgttatttaaatgaaagtagttagaaaaatgctctcctattctaccaaatttttaatttctttcttccctttcttgctacacagtgatcaagagtttctcatagtgctttgaagttagaaattatgtataggatattttaaatcattgagtttgtggggttttttgtttgtttgtttcttttgttttttggaaaatccgtgtctttatctttttttcccacgtggtagatatgatcccattggaggtaaattgtagcttcttctcattcatgcagtaaataatacatcctttcactcagcagagatggccatattaaacacgttttgctatgttaaaagtggcagaacaggaaagacgaattaaaaataacattttttaagcgacataaggatgaaatactgatgaatctctgtgacattacagggaaaaaaatatagttttctatctctttcaagggcagaagagttttcatttttatttttgtaattttatctgtaagtcataaatattacttaatcaggcctgattctacttttgaaaattacagttcttgaaatgcagataatgtttactttgaaaacaaatgtcatgaatgatttccagtttttaaagctatatgtttcactgcttcatatctctgtccactttctgaatgagaacttattttgtgcctagagctctcactcactgataatgcttattaccttctgggcatttattccaaagtgggatcaactgtacgcctttggtatctgaccataaagtcttttgctccgctgacatttgggtgatgtcttcacatggaaatataataaaaataaaaatctagtttaatactgcattatttattttcctaaggctaaagaggagcagtcctatgcttttattcagcatcctttatctgtgacttcatgctctgataactgcctttccttccttctgtgcctttgaatacaaatttcagttctgcaaaagtgaaacattaaacattgccaacgcaaa

SEQ ID NO: 297151 - DNA, 1899 bp, Homo sapiens
ggctaattttttctgcatttttagtagagacggggtttcaccatgttagccaggatggtctcaatctcctgacctcgtgatccacccgccttggcctcccaaagtgctgggattacaggcgtgagccaccgcgcccggccacactgtgatttcttatactttatggatggttctttctttttgcctaacagtcctaagccgcagatttgagtttcaagctgatgcatttgccaagaaacttgggaaggctaaagacttatattctgctttaatcaaacttaacaaagataacttgggattccctgtttctgactggttgttctcaatgtggcattattctcatcctccactgctagagagacttcaagctttgaaaactatgaagcaacactgagatgtccaggatctgtgactgaagacatttctgattatttctgtcctggcagcatgttccagctcttgatgtttttaaacttttttttagaagaaaaattaagtacagaaaagcccagatttaaatacatttaatatgtcattttaaaaatgattttaataattcatttcttaaaacactgaatgaattttgaagcttaatgtttttaaaggcatagttttatctttgacatctaatttaccatcaagttgtaaaattatttggaaaaatacagaactcgttttatttgtatacttatatggaatctgcatgtgaggtgtttgagggcatatgtttgaaagagggagcatcaccacaggaatcctttctgtgaggtggaaacagtggtcctgaatcattgtgctcacacctaacttgaaatctggtcttactttcatgctgttatgatttcacctggtgaatcagtgttttaaataagaaaggtaatagttggtaaggccaatgttatttaaatgaaagtagttagaaaaatgctctcctattctaccaaatttttaatttctttcttccctttcttgctacacagtgatcaagagtttctcatagtgctttgaagttagaaattatgtataggatattttaaatcattgagtttgtggggttttttgtttgtttgtttcttttgttttttggaaaatccgtgtctttatctttttttcccacgtggtagatatgatcccattggaggtaaattgtagcttcttctcattcatgcagtaaataatacatcctttcactcagcagagatggccatattaaacacgttttgctatgttaaaagtggcagaacaggaaagacgaattaaaaataacattttttaagcgacataaggatgaaatactgatgaatctctgtgacattacagggaaaaaaatatagttttctatctctttcaagggcagaagagttttcatttttatttttgtaattttatctgtaagtcataaatattacttaatcaggcctgattctacttttgaaaattacagttcttgaaatgcagataatgtttactttgaaaacaaatgtcatgaatgatttccagtttttaaagctatatgtttcactgcttcatatctctgtccactttctgaatgagaacttattttgtgcctagagctctcactcactgataatgcttattaccttctgggcatttattccaaagtgggatcaactgtacgcctttggtatctgaccataaagtcttttgctccgctgacatttgggtgatgtcttcacatggaaatataataaaaataaaaatctagtttaatactgcattatttattttcctaaggctaaagaggagcagtcctatgcttttattcagcatcctttatctgtgacttcatgctctgataactgcctttccttccttctgtgcctttgaatacaaatttcagttctgcaaaagtgaaacattaaacattgccaacgcaaa

SEQ ID NO: 297152 - DNA, 1289 bp, Homo sapiens
gcggccgcgtcgactgtgacactgccagcagcgcgcagagggagggatgggggcgggtatcggcgtaggggccctcggaaagaacggatattgctgtgacaccgcggggacgctctgaagggacgagtgtcggtgtggcaccggtgcacgctgaaggagccggcggaaccgggtggccatggggatgtgggcatcgctggacgctttgtgggagatgccggccgagaagcgtatcttcggggccgtgctgctcttttcctggacagtgtatctttgggagaccttcctagcacagcggcagagaaggatatataaaacaacaactcatgtaccaccggagttaggacagatcatggattctgaaacatttgagaaatctcgactctatcaactggataaaagcactttcagcttctggtcaggactctattcagagactgaaggcactcttattcttctctttggaggaataccttatctctggagactttctggacggttctgtggttatgctggctttggaccagaatatgagatcactcagtccctggtgtttctgctgttggctacacttttcagtgcattgactggtttgccatggagtctttataatacttttgtgatagaagaaaaacatggcttcaatcaacagactttggggttcttcatgaaagatgcaatcaagaaatttgttgtgactcagtgtattttgttgcctgtgtcttcacttctactttacattattaaaattgggggtgactatttttttatttatgcctggctgttcacattagttgtgtctctggttcttgtcacaatctatgctgattatattgcccctttatttgacaaattcacacctctgcctgagggaaagcttaaagaagaaattgaagtaatggcaaagagtattgactttcctttgacgaaggtgtatgttgtggaaggatctaaacgctcttcccacagcaatgcttatttttatggcttcttcaagaacaagcgaatagtttatgctgcataaactattcaatattattatgtccagaagtgtatatatgctgagtttcattctagctaagaatagaaagaagaataaaaggagactaggtttttatttgacctttgaacaaagacagtagatccctgatactgagtgactctttaagagtggccactcatcaacacctatgggctgattcagagaaacaggaaggtagaaattaagaagagattctttacctgaatcttgccagatgcagtcccgctactgttctgtccttctgctg

SEQ ID NO: 297153 - DNA, 385 bp, Homo sapiens
tgtttgacactctactagaagagtactctgtactaaacaaagacatccaggaggattctggcatggaaccccgcaatgaggaagaagggaacagtgaagaaataaaagctaaagttaaagtgagttattttttcctaagagattctaccttagtttttatacacagttcctgtgacaactcaaaataacatcaatttctaggcagtgagtgttgaattcagggagactatcagatgaaaaccatggctcctttatagttctggtatttaggagagatcaccactattattacatgctaactaccttgcaagcttttatagaatgtggatattaaaattggaagctcttataagaaaattcatatgattataagctatctttaaaa

SEQ ID NO: 297154 - DNA, 3111 bp, Homo sapiens
gcggccgcgtcgactgtgacactgccagcagcgcgcagagggagggatgggggcgggtatcggcgtaggggccctcggaaagaacggatattgctgtgacaccgcggggacgctctgaagggacgagtgtcggtgtggcaccggtgcacgctgaaggagccggcggaaccgggtggccatggggatgtgggcatcgctggacgctttgtgggagatgccggccgagaagcgtatcttcggggccgtgctgctcttttcctggacagtgtatctttgggagaccttcctagcacagcggcagagaaggatatataaaacaacaactcatgtaccaccggagttaggacagatcatggattctgaaacatttgagaaatctcgactctatcaactggataaaagcactttcagcttctggtcaggactctattcagagactgaaggcactcttattcttctctttggaggaataccttatctctggagactttctggacggttctgtggttatgctggctttggaccagaatatgagatcactcagtccctggtgtttctgctgttggctacacttttcagtgcattgactggtttgccatggagtctttataatacttttgtgatagaagaaaaacatggcttcaatcaacagactttggggttcttcatgaaagatgcaatcaagaaatttgttgtgactcagtgtattttgttgcctgtgtcttcacttctactttacattattaaaattgggggtgactatttttttatttatgcctggctgttcacattagttgtgtctctggttcttgtcacaatctatgctgattatattgcccctttatttgacaaattcacacctctgcctgagggaaagcttaaagaagaaattgaagtaatggcaaagagtattgactttcctttgacgaaggtgtatgttgtggaaggatctaaacgctcttcccacagcaatgcttatttttatggcttcttcaagaacaagcgaatagttttgtttgacactctactagaagagtactctgtactaaacaaagacatccaggaggattctggcatggaaccccgcaatgaggaagaagggaacagtgaagaaataaaagctaaagttaaaaataagaaacaaggatgtaaaaatgaggaggtactcgctgtactaggccatgaactggggcactggaagttgggacatacagtcaaaaatatcattattagccagatgaattctttcctgtgtttttttttatttgctgtattaattggtcgaaaggagctttttgctgcatttggtttttatgatagccaacccactcttattggactattgatcatcttccagtttattttttcaccttacaatgaggttctttctttttgcctaacagtcctaagccgcagatttgagtttcaagctgatgcatttgccaagaaacttgggaaggctaaagacttatattctgctttaatcaaacttaacaaagataacttgggattccctgtttctgactggttgttctcaatgtggcattattctcatcctccactgctagagagacttcaagctttgaaaactatgaagcaacactgagatgtccaggatctgtgactgaagacatttctgattatttctgtcctggcagcatgttccagctcttgatgtttttaaacttttttttagaagaaaaattaagtacagaaaagcccagatttaaatacatttaatatgtcattttaaaaatgattttaataattcatttcttaaaacactgaatgaattttgaagcttaatgtttttaaaggcatagttttatctttgacatctaatttaccatcaagttgtaaaattatttggaaaaatacagaactcgttttatttgtatacttatatggaatctgcatgtgaggtgtttgagggcatatgtttgaaagagggagcatcaccacaggaatcctttctgtgaggtggaaacagtggtcctgaatcattgtgctcacacctaacttgaaatctggtcttactttcatgctgttatgatttcacctggtgaatcagtgttttaaataagaaaggtaatagttggtaaggccaatgttatttaaatgaaagtagttagaaaaatgctctcctattctaccaaatttttaatttctttcttccctttcttgctacacagtgatcaagagtttctcatagtgctttgaagttagaaattatgtataggatattttaaatcattgagtttgtggggttttttgtttgtttgtttcttttgttttttggaaaatccgtgtctttatctttttttcccacgtggtagatatgatcccattggaggtaaattgtagcttcttctcattcatgcagtaaataatacatcctttcactcagcagagatggccatattaaacacgttttgctatgttaaaagtggcagaacaggaaagacgaattaaaaataacattttttaagcgacataaggatgaaatactgatgaatctctgtgacattacagggaaaaaaatatagttttctatctctttcaagggcagaagagttttcatttttatttttgtaattttatctgtaagtcataaatattacttaatcaggcctgattctacttttgaaaattacagttcttgaaatgcagataatgtttactttgaaaacaaatgtcatgaatgatttccagtttttaaagctatatgtttcactgcttcatatctctgtccactttctgaatgagaacttattttgtgcctagagctctcactcactgataatgcttattaccttctgggcatttattccaaagtgggatcaactgtacgcctttggtatctgaccataaagtcttttgctccgctgacatttgggtgatgtcttcacatggaaatataataaaaataaaaatctagtttaatactgcattatttattttcctaaggctaaagaggagcagtcctatgcttttattcagcatcctttatctgtgacttcatgctctgataactgcctttccttccttctgtgcctttgaatacaaatttcagttctgcaaaagtgaaacattaaacattgccaacgcaaa

SEQ ID NO: 297155 - DNA, 1896 bp, Homo sapiens
gcggccgcgtcgactgtgacactgccagcagcgcgcagagggagggatgggggcgggtatcggcgtaggggccctcggaaagaacggatattgctgtgacaccgcggggacgctctgaagggacgagtgtcggtgtggcaccggtgcacgctgaaggagccggcggaaccgggtggccatggggatgtgggcatcgctggacgctttgtgggagatgccggccgagaagcgtatcttcggggccgtgctgctcttttcctggacagtgtatctttgggagaccttcctagcacagcggcagagaaggatatataaaacaacaactcatgtaccaccggagttaggacagatcatggattctgaaacatttgagaaatctcgactctatcaactggataaaagcactttcagcttctggtcaggactctattcagagactgaaggcactcttattcttctctttggaggaataccttatctctggagactttctggacggttctgtggttatgctggctttggaccagaatatgagatcactcagtccctggtgtttctgctgttggctacacttttcagtgcattgactggtttgccatggagtctttataatacttttgtgatagaagaaaaacatggcttcaatcaacagactttggggttcttcatgaaagatgcaatcaagaaatttgttgtgactcagtgtattttgttgcctgtgtcttcacttctactttacattattaaaattgggggtgactatttttttatttatgcctggctgttcacattagttgtgtctctggttcttgtcacaatctatgctgattatattgcccctttatttgacaaattcacacctctgcctgagggaaagcttaaagaagaaattgaagtaatggcaaagagtattgactttcctttgacgaaggtgtatgttgtggaaggatctaaacgctcttcccacagcaatgcttatttttatggcttcttcaagaacaagcgaatagttttgtttgacactctactagaagagtactctgtactaaacaaagacatccaggaggattctggcatggaaccccgcaatgaggaagaagggaacagtgaagaaataaaagctaaagttaaaaataagaaacaaggatgtaaaaatgaggaggtactcgctgtactaggccatgaactggggcactggaagttgggacatacagtcaaaaatatcattattagccagatgaattctttcctgtgtttttttttatttgctgtattaattggtcgaaaggagctttttgctgcatttggtttttatgatagccaacccactcttattggactattgatcatcttccagtttattttttcaccttacaatgaggttctttctttttgcctaacagtcctaagccgcagatttgagtttcaagctgatgcatttgccaagaaacttgggaaggctaaagacttatattctgctttaatcaaacttaacaaagataacttgggattccctgtttctgactggttgttctcaatgtggcattattctcatcctccactgctagagagacttcaagctttgaaaactatgaagcaacactgagatgtccaggatctgtgactgaagacatttctgattatttctgtcctggcagcatgttccagctcttgatgtttttaaacttttttttagaagaaaaattaagtacagaaaagcccagatttaaatacatttaatatgtcattttaaaaatgattttaataattcatttcttaaaacactgaatgaattttgaagcttaatgtttttaaaggcatagttttatctttgacatctaatttaccatcaagttgtaaaattatttggaaaaatacagaactcgttttatttgt

SEQ ID NO: 297156 - DNA, 3292 bp, Homo sapiens
gcggccgcgtcgactgtgacactgccagcagcgcgcagagggagggatgggggcgggtatcggcgtaggggccctcggaaagaacggatattgctgtgacaccgcggggacgctctgaagggacgagtgtcggtgtggcaccggtgcacgctgaaggagccggcggaaccgggtggccatggggatgtgggcatcgctggacgctttgtgggagatgccggccgagaagcgtatcttcggggccgtgctgctcttttcctggacagtgtatctttgggagaccttcctagcacagcggcagagaaggatatataaaacaacaactcatgtaccaccggagttaggacagatcatggattctgaaacatttgagaaatctcgactctatcaactggataaaagcactttcagcttctggtcaggactctattcagagactgaaggcactcttattcttctctttggaggaataccttatctctggagactttctggacggttctgtggttatgctggctttggaccagaatatgagatcactcagtccctggtgtttctgctgttggctacacttttcagtgcattgactggtttgccatggagtctttataatacttttgtgatagaagaaaaacatggcttcaatcaacagactttggggttcttcatgaaagatgcaatcaagaaatttgttgtgactcagtgtattttgttgcctgtgtcttcacttctactttacattattaaaattgggggtgactatttttttatttatgcctggctgttcacattagttgtgtctctggttcttgtcacaatctatgctgattatattgcccctttatttgacaaattcacacctctgcctgagggaaagcttaaagaagaaattgaagtaatggcaaagagtattgactttcctttgacgaaggtgtatgttgtggaaggatctaaacgctcttcccacagcaatgcttatttttatggcttcttcaagaacaagcgaatagttttgtttgacactctactagaagagtactctgtactaaacaaagacatccaggaggattctggcatggaaccccgcaatgaggaagaagggaacagtgaagaaataaaagctaaagttaaaaataagaaacaaggatgtaaaaatgaggaggtactcgctgtactaggccatgaactggggcactggaagttgggacatacagtcaaaaatatcattattagccagatgaattctttcctgtgtttttttttatttgctgtattaattggtcgaaaggagctttttgctgcatttggtttttatgatagccaacccactcttattggactattgatcatcttccagtttattttttcaccttacaatgaggttctttctttttgcctaacagtcctaagccgcagatttgagtttcaagctgatgcatttgccaagaaacttgggaaggctaaagacttatattctgctttaatcaaacttaacaaagataacttgggattccctgtttctgactggttgttctcaatgtggcattattctcatcctccactgctagagagacttcaagctttgaaaactatgaagcaacactgagatgtccaggatctgtgactgaagacatttctgattatttctgtcctggcagcatgttccagctcttgatgtttttaaacttttttttagaagaaaaattaagtacagaaaagcccagatttaaatacatttaatatgtcattttaaaaatgattttaataattcatttcttaaaacactgaatgaattttgaagcttaatgtttttaaaggcatagttttatctttgacatctaatttaccatcaagttgtaaaattatttggaaaaatacagaactcgttttatttgtatacttatatggaatctgcatgtgaggtgtttgagggcatatgtttgaaagagggagcatcaccacaggaatcctttctgtgaggtggaaacagtggtcctgaatcattgtgctcacacctaacttgaaatctggtcttactttcatgctgttatgatttcacctggtgaatcagtgttttaaataagaaaggtaatagttggtaaggccaatgttatttaaatgaaagtagttagaaaaatgctctcctattctaccaaatttttaatttctttcttccctttcttgctacacagtgatcaagagtttctcatagtgctttgaagttagaaattatgtataggatattttaaatcattgagtttgtggggttttttgtttgtttgtttcttttgttttttggaaaatccgtgtctttatctttttttcccacgtggtagatatgatcccattggaggtaaattgtagcttcttctcattcatgcagtaaataatacatcctttcactcagcagagatggccatattaaacacgttttgctatgttaaaagtggcagaacaggaaagacgaattaaaaataacattttttaagcgacataaggatgaaatactgatgaatctctgtgacattacagggaaaaaaatatagttttctatctctttcaagggcagaagagttttcatttttatttttgtaattttatctgtaagtcataaatattacttaatcaggcctgattctacttttgaaaattacagttcttgaaatgcagataatgtttactttgaaaacaaatgtcatgaatgatttccagtttttaaagctatatgtttcactgcttcatatctctgtccactttctgaatgagaacttattttgtgcctagagctctcactcactgataatgcttattaccttctgggcatttattccaaagtgggatcaactgtacgcctttggtatctgaccataaagtcttttgctccgctgacatttgggtgatgtcttcacatggaaatataataaaaataaaaatctagtttaatactgcattatttattttcctaaggctaaagaggagcagtcctatgcttttattcagcatcctttatctgtgacttcatgctctgataactgcctttccttccttctgtgcctttgaatacaaatttcagttctgcaaaagtgaaacattaaacattgccaacgcaaaaaaaaaaaaaacaaaaaaaaatttggggcgccgaggcagaaaatctcaaaccatcgtggggggcggcgccaaaggtagataacgggcaaggtcaagaacggccagacaggtggtgtcccaaaaaacccgggaccagtttgaaacccagggcggggcagggacacaagcagcaaacagcagg

SEQ ID NO: 297157 - DNA, 532 bp, Homo sapiens
atgaaggaagacattggaaaagcatcaaaaacccaaaagggaaaaagaaatgacccgtattctccacagttgtgtgtgtgtgtgtgtgtggtgcatgggtactcgtatatatatatactcacagccttttctcttcctccactcaaggatgatactggacacattcctttgtcatgggctttgtccgcttagccatctagtgaggacgctcctcactcactgagtactctgctatgacactgctttgtaacagctgtacaggtttttgtagtcagggcactcctgggtcataactgattctaaactagaatcagacacgggaagttttcatgacagttgtcattgttatttctctgggctcaggtcaagagccactgttcctttgtatcctcaccgagcaattgtgtaagaatgcaacaatactcattttgtacatccattggtattttgactacctattatttgctgggctttgctggaggttgggaatactgacatgattctacaacatccatcttacaaaaaaaagaaa

SEQ ID NO: 297158 - DNA, 1705 bp, Homo sapiens
atgggaagacgactcagaggtcagagatacttggggaggggaggctgagtttgaaatcatgcttaagatgccagtggctcgacctgtggttggtttaagttctaatttttaaaaagctagttagagaacagaaaatcattgggccaagtcacacctgtactttttttttccccctcctctgtctccaacctctttctaggttcttgttcttcacacacccccattcggcgtagtacccagagagctcaagatgtgtggcagttttcggatggaagctcgagagcccttaagttctgagaaaatttgaagcccccaggggtggggtggacgcgtgccgcccagtcgacgtcagcgtggtctgtcatcctgctagtttgtgatgttttctgacagtagcctccaagaagccgttgtgcgaagacagagtcctgcagagtccttccagcctaggcctgcagcgccattttatttatattttttaataaaaagtaaaaacaaaaaaacagacccacattggaacagtgaatcagtcccatagagagggcccgtggaccatcgctgtcatgagtgatgccctggcccttctgaaaccagccaacctaattacctgtattgtggaaatgcgcatgagtccccaaccccttgtttctatacattctatgttgtcttttaaaaagtgtgcttaacattgacacaataaatgttggagctttaaaaggtgtttgcttgttctttaatttttaatgcttataagacaatgaggctgcttatgattttgtacttctgtacctgtttcctacagacacccatcgggtgggtaggaggaacagatttgagaaatgggcaggagatgtaggaggggaactaggttaccgcttatcagatggcataaattttcaaggagaatcaaaatgcaaaacttgggaataaatcatagcaatatcataattaatgtagtagtaatattgctgtttattaatgctgaagtgtggttttcctaactgtctgacttataatttgcataccattaaataatgcataatatggcacgccgaatcctgtttttcaaatatatgcttttggtggctaccatgcaggatttgaatttgtcttttaatttagcttaggaaagaacatcactgggcgagcggtaaatcctaaagaaggtgataaatgtcagtagtttcttattaaatattctaattttaggttcccaaaccttcaggaaatatatcttaatgcagacaaacaaacataaaacttctttagtacttacatcaggaaatttggggcagattttagaggggggaaattataggaggaaagaagttcacatcagaacagacaatcacagcaatgctctattccttagaaattagtgccacaaataagttacatctacaaacaggtggtaaaaattctttctggcccagttaatttgcacagaacttttctcagtttggtattttttactgcttggagatccagaagagaattagaaacaacatagcaaattaaaataggtttgtcaataatagagctcagacacctgtgtgctgtagattcacatacaggccgtgaacctaagtggggaaaatcctacctatccaccttctggctagattacctagcttagtgaaaagatagccaaataattggcatgtgaattatttcctgcttattcataataaataatgactgtcta

SEQ ID NO: 297159 - DNA, 3103 bp, Homo sapiens
tgacgttcaagttcgcagggacgtcacgtccgcacttgaacttgcagctcaggggggcttttgccatttttttcatctctctctctctctctccctctatctctcttctctctctctccctctttttttttttttttttttttttttttttgcttaaaaaaaagccatgacggctctcccacaattcatcttccctgcgccatctttgtattatttctaatttattttggatgtcaaaaggcactgatgaagatattttctctggagtctccttctttctaacccggctctcccgatgtgaaccgagccgtcgtccgcccgccgccgccgccgccgccgccgccgcccgccccgcagcccaccatgtctcgccgcaagcaaggcaaaccccagcacttaagcaaacgggaattctcgcccgagcctcttgaagccattcttacagatgatgaaccagaccacggcccgttgggagctccagaaggggatcatgacctcctcacctgtgggcagtgccagatgaacttcccattgggggacattcttatttttatcgagcacaaacggaaacaatgcaatggcagcctctgcttagaaaaagctgtggataagccaccttccccttcaccaatcgagatgaaaaaagcatccaatcccgtggaggttggcatccaggtcacgccagaggatgacgattgtttatcaacgtcatctagaggaatttgccccaaacaggaacacatagcagataaacttctgcactggaggggcctctcctcccctcgttctgcacatggagctctaatccccacgcctgggatgagtgcagaatatgccccgcagggtatttgtaaagatgagcccagcagctacacatgtacaacttgcaaacagccattcaccagtgcatggtttctcttgcaacacgcacagaacactcatggattaagaatctacttagaaagcgaacacggaagtcccctgaccccgcgggttggtatcccttcaggactaggtgcagaatgtccttcccagccacctctccatgggattcatattgcagacaataacccctttaacctgctaagaataccaggatcagtatcgagagaggcttccggcctggcagaagggcgctttccacccactccccccctgtttagtccaccaccgagacatcacttggacccccaccgcatagagcgcctgggggcggaagagatggccctggccacccatcacccgagtgcctttgacagggtgctgcggttgaatccaatggctatggagcctcccgccatggatttctctaggagacttagagagctggcagggaacacgtctagcccaccgctgtccccaggccggcccagccctatgcaaaggttactgcaaccattccagccaggtagcaagccgcccttcctggcgacgccccccctccctcctctgcaatccgcccctcctccctcccagcccccggtcaagtccaagtcatgcgagttctgcggcaagacgttcaaatttcagagcaacctggtggtgcaccggcgcagccacacgggcgagaagccctacaagtgcaacctgtgcgaccacgcgtgcacccaggccagcaagctgaagcgccacatgaagacgcacatgcacaaatcgtcccccatgacggtcaagtccgacgacggtctctccaccgccagctccccggaacccggcaccagcgacttggtgggcagcgccagcagcgcgctcaagtccgtggtggccaagttcaagagcgagaacgaccccaacctgatcccggagaacggggacgaggaggaagaggaggacgacgaggaagaggaagaagaggaggaagaggaggaggaggagctgacggagagcgagagggtggactacggcttcgggctgagcctggaggcggcgcgccaccacgagaacagctcgcggggcgcggtcgtgggcgtgggcgacgagagccgcgccctgcccgacgtcatgcagggcatggtgctcagctccatgcagcacttcagcgaggccttccaccaggtcctgggcgagaagcataagcgcggccacctggccgaggccgagggccacagggacacttgcgacgaagactcggtggccggcgagtcggaccgcatagacgatggcactgttaatggccgcggctgctccccgggcgagtcggcctcggggggcctgtccaaaaagctgctgctgggcagccccagctcgctgagccccttctctaagcgcatcaagctcgagaaggagttcgacctgcccccggccgcgatgcccaacacggagaacgtgtactcgcagtggctcgccggctacgcggcctccaggcagctcaaagatcccttccttagcttcggagactccagacaatcgccttttgcctcctcgtcggagcactcctcggagaacgggagcttgcgcttctccacaccgcccggggagctggacggagggatctcggggcgcagcggcacgggaagtggagggagcacgccccatattagtggtccgggcccgggcaggcccagctcaaaagagggcagacgcagcgacacttgttcttcacacacccccattcggcgtagtacccagagagctcaagatgtgtggcagttttcggatggaagctcgagagcccttaagttctgagaaaatttgaagcccccaggggtggggtggacgcgtgccgcccagtcgacgtcagcgtggtctgtcatcctgctagtttgtgatgttttctgacagtagcctccaagaagccgttgtgcgaagacagagtcctgcagagtccttccagcctaggcctgcagcgccattttatttatattttttaataaaaagtaaaaacaaaaaaacagacccacattggaacagtgaatcagtcccatagagagggcccgtggaccatcgctgtcatgagtgatgccctggcccttctgaaaccagccaacctaattacctgtattgtggaaatgcgcatgagtccccaaccccttgtttctatacattctatgttgtcttttaaaaagtgtgcttaacattgacacaataaatgttggagctttaa

SEQ ID NO: 297160 - DNA, 2493 bp, Homo sapiens
tgacgttcaagttcgcagggacgtcacgtccgcacttgaacttgcagctcaggggggcttttgccatttttttcatctctctctctctctctccctctatctctcttctctctctctccctctttttttttttttttttttttttttttttgcttaaaaaaaagccatgacggctctcccacaattcatcttccctgcgccatctttgtattatttctaatttattttggatgtcaaaaggcactgatgaagatattttctctggagtctccttctttctaacccggctctcccgatgtgaaccgagccgtcgtccgcccgccgccgccgccgccgccgccgccgcccgccccgcagcccaccatgtctcgccgcaagcaaggcaaaccccagcacttaagcaaacgggaattctcgcccgagcctcttgaagccattcttacagatgatgaaccagaccacggcccgttgggagctccagaaggggatcatgacctcctcacctgtgggcagtgccagatgaacttcccattgggggacattcttatttttatcgagcacaaacggaaacaatgcaatggcagcctctgcttagaaaaagctgtggataagccaccttccccttcaccaatcgagatgaaaaaagcatccaatcccgtggaggttggcatccaggtcacgccagaggatgacgattgtttatcaacgtcatctagaggaatttgccccaaacaggaacacatagcagataaacttctgcactggaggggcctctcctcccctcgttctgcacatggagctctaatccccacgcctgggatgagtgcagaatatgccccgcagggtatttgtaaagatgagcccagcagctacacatgtacaacttgcaaacagccattcaccagtgcatggtttctcttgcaacacgcacagaacactcatggattaagaatctacttagaaagcgaacacggaagtcccctgaccccgcgggttcttcacacacccccattcggcgtagtacccagagagctcaagatgtgtggcagttttcggatggaagctcgagagcccttaagttctgagaaaatttgaagcccccaggggtggggtggacgcgtgccgcccagtcgacgtcagcgtggtctgtcatcctgctagtttgtgatgttttctgacagtagcctccaagaagccgttgtgcgaagacagagtcctgcagagtccttccagcctaggcctgcagcgccattttatttatattttttaataaaaagtaaaaacaaaaaaacagacccacattggaacagtgaatcagtcccatagagagggcccgtggaccatcgctgtcatgagtgatgccctggcccttctgaaaccagccaacctaattacctgtattgtggaaatgcgcatgagtccccaaccccttgtttctatacattctatgttgtcttttaaaaagtgtgcttaacattgacacaataaatgttggagctttaaaaggtgtttgcttgttctttaatttttaatgcttataagacaatgaggctgcttatgattttgtacttctgtacctgtttcctacagacacccatcgggtgggtaggaggaacagatttgagaaatgggcaggagatgtaggaggggaactaggttaccgcttatcagatggcataaattttcaaggagaatcaaaatgcaaaacttgggaataaatcatagcaatatcataattaatgtagtagtaatattgctgtttattaatgctgaagtgtggttttcctaactgtctgacttataatttgcataccattaaataatgcataatatggcacgccgaatcctgtttttcaaatatatgcttttggtggctaccatgcaggatttgaatttgtcttttaatttagcttaggaaagaacatcactgggcgagcggtaaatcctaaagaaggtgataaatgtcagtagtttcttattaaatattctaattttaggttcccaaaccttcaggaaatatatcttaatgcagacaaacaaacataaaacttctttagtacttacatcaggaaatttggggcagattttagaggggggaaattataggaggaaagaagttcacatcagaacagacaatcacagcaatgctctattccttagaaattagtgccacaaataagttacatctacaaacaggtggtaaaaattctttctggcccagttaatttgcacagaacttttctcagtttggtattttttactgcttggagatccagaagagaattagaaacaacatagcaaattaaaataggtttgtcaataatagagctcagacacctgtgtgctgtagattcacatacaggccgtgaacctaagtggggaaaatcctacctatccaccttctggctagattacctagcttagtgaaaagatagccaaataattggcatgtgaattatttcctgcttattcataataaataatgactgtcta

SEQ ID NO: 297161 - DNA, 583 bp, Homo sapiens
tgtatttatcttttattgattctctcccgtgttgtttgatttttggtgttccacgggactcgtggtcaccaccgttcttcacacacccccattcggcgtagtacccagagagctcaagatgtgtggcagttttcggatggaagctcgagagcccttaagttctgagaaaatttgaagcccccaggggtggggtggacgcgtgccgcccagtcgacgtcagcgtggtctgtcatcctgctagtttgtgatgttttctgacagtagcctccaagaagccgttgtgcgaagacagagtcctgcagagtccttccagcctaggcctgcagcgccattttatttatattttttaataaaaagtaaaaacaaaaaaacagacccacattggaacagtgaatcagtcccatagagagggcccgtggaccatcgctgtcatgagtgatgccctggcccttctgaaaccagccaacctaattacctgtattgtggaaatgcgcatgagtccccaaccccttgtttctatacattctatgttgtcttttaaaaagtgtgcttaacattgacacaataaatgttggagctttaa

SEQ ID NO: 297162 - DNA, 204 bp, Homo sapiens
cgctcctggtggggtcagcgccttctgcagtgacaccattccctacctgcacatgagtgatgccctggcccttctgaaaccagccaacctaattacctgtattgtggaaatgcgcatgagtccccaaccccttgtttctatacattctatgttgtcttttaaaaagtgtgcttaacattgacacaataaatgttggagctttaa

SEQ ID NO: 297163 - DNA, 5978 bp, Homo sapiens
tgacgttcaagttcgcagggacgtcacgtccgcacttgaacttgcagctcaggggggcttttgccatttttttcatctctctctctctctctccctctatctctcttctctctctctccctctttttttttttttttttttttttttttttgcttaaaaaaaagccatgacggctctcccacaattcatcttccctgcgccatctttgtattatttctaatttattttggatgtcaaaaggcactgatgaagatattttctctggagtctccttctttctaacccggctctcccgatgtgaaccgagccgtcgtccgcccgccgccgccgccgccgccgccgccgcccgccccgcagcccaccatgtctcgccgcaagcaaggcaaaccccagcacttaagcaaacgggaattctcgcccgagcctcttgaagccattcttacagatgatgaaccagaccacggcccgttgggagctccagaaggggatcatgacctcctcacctgtgggcagtgccagatgaacttcccattgggggacattcttatttttatcgagcacaaacggaaacaatgcaatggcagcctctgcttagaaaaagctgtggataagccaccttccccttcaccaatcgagatgaaaaaagcatccaatcccgtggaggttggcatccaggtcacgccagaggatgacgattgtttatcaacgtcatctagaggaatttgccccaaacaggaacacatagcaggtaaagatgagcccagcagctacacatgtacaacttgcaaacagccattcaccagtgcatggtttctcttgcaacacgcacagaacactcatggattaagaatctacttagaaagcgaacacggaagtcccctgaccccgcgggttggtatcccttcaggactaggtgcagaatgtccttcccagccacctctccatgggattcatattgcagacaataacccctttaacctgctaagaataccaggatcagtatcgagagaggcttccggcctggcagaagggcgctttccacccactccccccctgtttagtccaccaccgagacatcacttggacccccaccgcatagagcgcctgggggcggaagagatggccctggccacccatcacccgagtgcctttgacagggtgctgcggttgaatccaatggctatggagcctcccgccatggatttctctaggagacttagagagctggcagggaacacgtctagcccaccgctgtccccaggccggcccagccctatgcaaaggttactgcaaccattccagccaggtagcaagccgcccttcctggcgacgccccccctccctcctctgcaatccgcccctcctccctcccagcccccggtcaagtccaagtcatgcgagttctgcggcaagacgttcaaatttcagagcaacctggtggtgcaccggcgcagccacacgggcgagaagccctacaagtgcaacctgtgcgaccacgcgtgcacccaggccagcaagctgaagcgccacatgaagacgcacatgcacaaatcgtcccccatgacggtcaagtccgacgacggtctctccaccgccagctccccggaacccggcaccagcgacttggtgggcagcgccagcagcgcgctcaagtccgtggtggccaagttcaagagcgagaacgaccccaacctgatcccggagaacggggacgaggaggaagaggaggacgacgaggaagaggaagaagaggaggaagaggaggaggaggagctgacggagagcgagagggtggactacggcttcgggctgagcctggaggcggcgcgccaccacgagaacagctcgcggggcgcggtcgtgggcgtgggcgacgagagccgcgccctgcccgacgtcatgcagggcatggtgctcagctccatgcagcacttcagcgaggccttccaccaggtcctgggcgagaagcataagcgcggccacctggccgaggccgagggccacagggacacttgcgacgaagactcggtggccggcgagtcggaccgcatagacgatggcactgttaatggccgcggctgctccccgggcgagtcggcctcggggggcctgtccaaaaagctgctgctgggcagccccagctcgctgagccccttctctaagcgcatcaagctcgagaaggagttcgacctgcccccggccgcgatgcccaacacggagaacgtgtactcgcagtggctcgccggctacgcggcctccaggcagctcaaagatcccttccttagcttcggagactccagacaatcgccttttgcctcctcgtcggagcactcctcggagaacgggagcttgcgcttctccacaccgcccggggagctggacggagggatctcggggcgcagcggcacgggaagtggagggagcacgccccatattagtggtccgggcccgggcaggcccagctcaaaagagggcagacgcagcgacacttgtgagtactgtgggaaagtcttcaagaactgtagcaatctcactgtccacaggagaagccacacgggcgaaaggccttataaatgcgagctgtgcaactatgcctgtgcccagagtagcaagctcaccaggcacatgaaaacgcatggccaggtggggaaggacgtttacaaatgtgaaatttgtaagatgccttttagcgtgtacagtaccctggagaaacacatgaaaaaatggcacagtgatcgagtgttgaataatgatataaaaactgaatagaggtatattaatacccctccctcactcccacctgacaccccctttttcaccactccccttccccatcgccctccagccccactccctgtaggatttttttctagtcccatgtgatttaaacaaacaaacaaacaaacagaagtaacgaagctaagaatatgagagtgcttgtcaccagcacacctgttttttttctttttctttttcttttttctttttccttttttttttttttcctttatgttctcaccgtttgaatgcatgatctgtatggggcaatactattgcattttacgcaaactttgagcctttctcttgtgcaataatttacatgttgtgtatgtttttttttaaacttagacagcatgtatggtatgttatggctattttaaattgtccctaattcgttgctgagcaaacatgttgctgtttccagttccgttctgagagaaaaagagagagagagagaaaaagaccatgctgcatacattctgtaatacatatcatgtacagttttattttataacgtgaggaggaaaaacagtctttggattaaccctctatagacagaatagatagcactgaaaaaaaatctctatgagctaaatgtctgtctctaaagggttaaatgtatcaattggaaaggaagaaaaaaggccttgaattgacaaattaacagaaaaacagaacaagtttattctatcatttggttttaaaatatgagtgccttggatctattaaaaccacatcgatggttctttctacttgttataaacttgtagcttaattcagcattgggtgaggtaataaaccttaggaactagcatataattctatattgtatttctcacaacaatggctacctaaaaagatgacccattatgtcctagttaatcatcatttttcctttagtttaattttataaacaaaactgattataccagtataaaagctactttgctcctggtgagagcttaaaagaaatgggctgttttgcccaaagttttattttttttaaacaatgattaaattgaatgtgtaatgtgcaaaagccctggaacgcaattaaatacactagtaaggagttcattttatgaagatatttgctttaataatgtctttttaaaaatactggcaccaaaagaaatagatccagatctacttggttgtcaagtggacaatcaaatgataaactttaagaccttgtataccatattgaaaggaagaggctgacaataaggtttgacagaggggaacagaagaaaataatatgatttattagcacaacgtggtactatttgccatttaaaactagaacaggtatataagctaatattgatacaatgatgattaactatgaattcttaagacttgcatttaaatgtgacattcttaaaaaaagaagagaaagaattttaagagtagcagtatatatgtctgtgctccctaaaagttgtacttcatttcttttccatacactgtgtgctatttgtgttaacatggaagaggattcattgtttttatttttatttttttaattttttcttttttattaagctagcatctgccccagttggtgttcaaatagcacttgactctgcctgtgatatctgtatcttttctctaatcagagatacagaggttgagtataaaataaacctgctcagataggacaattaagtgcactgtacaattttcccagtttacaggtctatacttaagggaaaagttgcaagaatgctgaaaaaaaattgaacacaatctcattgaggagcattttttaaaaactaaaaaaaaaaaaactttgccagccatttacttgactattgagcttacttacttggacgcaacattgcaagcgctgtgaatggaaacagaatacacttaacatagaaatgaatgattgctttcgcttctacagtgcaaggatttttttgtacaaaacttttttaaatataaatgttaagaaaaattttttttaaaaaacacttcattatgtttaggggggaactgcattttagggttccattgtcttggtggtgttacaagacttgttatccatttaaaaatggtagtggaaattctatgccttggatacacaccgctcttcaggttgtaaaaaaaaaaaacatacattggggaaaggtttaagattatatagtacttaaatataggaaaatgcacactcatgttgattcctatgctaaaatacatttatggtcttttttctgtatttctagaatggtatttgaattaaatgttcatctagtgttaggcactatagtatttatattgaagcttgtatttttaactgttgcttgttctcttaaaaggtatcaatgtaccttttttggtagtggaaaaaaaaaagacaggctgccacagtatatttttttaatttggcaggataatatagtgcaaattatttgtatgcttcaaaaaaaaaaaaaagagagaaacaaaaaagtgtgacattacagatgagaagccatataatggcggtttgggggagcctgctagaatgtcacatggatggctgtcataggggttgtacatatccttttttgttcctttttcctgctgccatactgtatgcagtactgcaagctaataacgttggtttgttatgtagtgtgctttttgtccctttccttctatcaccctacattccagcatcttaccttcatatgcagtaaaagaaagaaagaaaaaaaaaggaaaaaaaaaaaaaaaccaatgttttgcagtttttttcattgccaaaaactaaatggtgctttatatttagattggaaagaatttcatatgcaaagcatattaaagagaaagcccgctttagtcaatacttttttgtaaatggcaatgcagaatattttgttattggccttttctattcctgtaatgaaagctgtttgtcgtaacttgaaattttatcttttactatgggagtcactatttattattgcttatgtgccctgttcaaaacagaggcacttaatttgatcttttatttttctttgtttttatttttttttttatttagatgaccaaaggtcattacaacctggctttttattgtatttgtttctggtctttgttaagttctattggaaaaaccactgtctgtgtttttttggcagttgtctgcattaacctgttcatacacccattttgtccctttattgaaaaaataaaaaaaattaaagtac

SEQ ID NO: 297164 - DNA, 5795 bp, Homo sapiens
ctgtttttgacagcagaggaccccagttgttgaggactaaagagagagaagatgagaaagaagatgctggaaacagaggttggagaaagagaggcaaggaagtagaaaggaggaaaaggggaagagaggaggcagggggagagagggttggaattcgagctattttcagctgaatgtgagtgcagatttcatcaggcttctgggctacagggaaactgactgtgtgcggaccttgcgtgtaacttcctgtgaagcagccgtggtgactgcattttctgacactgtcagagtctggacaaccctgccagctcctagaagggcaacccaacaactgtcacagacgaagcatcaaaagcatgagctgtcgatagtgacctgcatttgcagaaaatctgagggctttctaattaacagaggagctctaaattagagtaaagctgttcgacaagacccctcatacgcgataaacttctgcactggaggggcctctcctcccctcgttctgcacatggagctctaatccccacgcctgggatgagtgcagaatatgccccgcagggtatttgtaaagatgagcccagcagctacacatgtacaacttgcaaacagccattcaccagtgcatggtttctcttgcaacacgcacagaacactcatggattaagaatctacttagaaagcgaacacggaagtcccctgaccccgcgggttggtatcccttcaggactaggtgcagaatgtccttcccagccacctctccatgggattcatattgcagacaataacccctttaacctgctaagaataccaggatcagtatcgagagaggcttccggcctggcagaagggcgctttccacccactccccccctgtttagtccaccaccgagacatcacttggacccccaccgcatagagcgcctgggggcggaagagatggccctggccacccatcacccgagtgcctttgacagggtgctgcggttgaatccaatggctatggagcctcccgccatggatttctctaggagacttagagagctggcagggaacacgtctagcccaccgctgtccccaggccggcccagccctatgcaaaggttactgcaaccattccagccaggtagcaagccgcccttcctggcgacgccccccctccctcctctgcaatccgcccctcctccctcccagcccccggtcaagtccaagtcatgcgagttctgcggcaagacgttcaaatttcagagcaacctggtggtgcaccggcgcagccacacgggcgagaagccctacaagtgcaacctgtgcgaccacgcgtgcacccaggccagcaagctgaagcgccacatgaagacgcacatgcacaaatcgtcccccatgacggtcaagtccgacgacggtctctccaccgccagctccccggaacccggcaccagcgacttggtgggcagcgccagcagcgcgctcaagtccgtggtggccaagttcaagagcgagaacgaccccaacctgatcccggagaacggggacgaggaggaagaggaggacgacgaggaagaggaagaagaggaggaagaggaggaggaggagctgacggagagcgagagggtggactacggcttcgggctgagcctggaggcggcgcgccaccacgagaacagctcgcggggcgcggtcgtgggcgtgggcgacgagagccgcgccctgcccgacgtcatgcagggcatggtgctcagctccatgcagcacttcagcgaggccttccaccaggtcctgggcgagaagcataagcgcggccacctggccgaggccgagggccacagggacacttgcgacgaagactcggtggccggcgagtcggaccgcatagacgatggcactgttaatggccgcggctgctccccgggcgagtcggcctcggggggcctgtccaaaaagctgctgctgggcagccccagctcgctgagccccttctctaagcgcatcaagctcgagaaggagttcgacctgcccccggccgcgatgcccaacacggagaacgtgtactcgcagtggctcgccggctacgcggcctccaggcagctcaaagatcccttccttagcttcggagactccagacaatcgccttttgcctcctcgtcggagcactcctcggagaacgggagcttgcgcttctccacaccgcccggggagctggacggagggatctcggggcgcagcggcacgggaagtggagggagcacgccccatattagtggtccgggcccgggcaggcccagctcaaaagagggcagacgcagcgacacttgtgagtactgtgggaaagtcttcaagaactgtagcaatctcactgtccacaggagaagccacacgggcgaaaggccttataaatgcgagctgtgcaactatgcctgtgcccagagtagcaagctcaccaggcacatgaaaacgcatggccaggtggggaaggacgtttacaaatgtgaaatttgtaagatgccttttagcgtgtacagtaccctggagaaacacatgaaaaaatggcacagtgatcgagtgttgaataatgatataaaaactgaatagaggtatattaatacccctccctcactcccacctgacaccccctttttcaccactccccttccccatcgccctccagccccactccctgtaggatttttttctagtcccatgtgatttaaacaaacaaacaaacaaacagaagtaacgaagctaagaatatgagagtgcttgtcaccagcacacctgttttttttctttttctttttcttttttctttttccttttttttttttttcctttatgttctcaccgtttgaatgcatgatctgtatggggcaatactattgcattttacgcaaactttgagcctttctcttgtgcaataatttacatgttgtgtatgtttttttttaaacttagacagcatgtatggtatgttatggctattttaaattgtccctaattcgttgctgagcaaacatgttgctgtttccagttccgttctgagagaaaaagagagagagagagaaaaagaccatgctgcatacattctgtaatacatatcatgtacagttttattttataacgtgaggaggaaaaacagtctttggattaaccctctatagacagaatagatagcactgaaaaaaaatctctatgagctaaatgtctgtctctaaagggttaaatgtatcaattggaaaggaagaaaaaaggccttgaattgacaaattaacagaaaaacagaacaagtttattctatcatttggttttaaaatatgagtgccttggatctattaaaaccacatcgatggttctttctacttgttataaacttgtagcttaattcagcattgggtgaggtaataaaccttaggaactagcatataattctatattgtatttctcacaacaatggctacctaaaaagatgacccattatgtcctagttaatcatcatttttcctttagtttaattttataaacaaaactgattataccagtataaaagctactttgctcctggtgagagcttaaaagaaatgggctgttttgcccaaagttttattttttttaaacaatgattaaattgaatgtgtaatgtgcaaaagccctggaacgcaattaaatacactagtaaggagttcattttatgaagatatttgctttaataatgtctttttaaaaatactggcaccaaaagaaatagatccagatctacttggttgtcaagtggacaatcaaatgataaactttaagaccttgtataccatattgaaaggaagaggctgacaataaggtttgacagaggggaacagaagaaaataatatgatttattagcacaacgtggtactatttgccatttaaaactagaacaggtatataagctaatattgatacaatgatgattaactatgaattcttaagacttgcatttaaatgtgacattcttaaaaaaagaagagaaagaattttaagagtagcagtatatatgtctgtgctccctaaaagttgtacttcatttcttttccatacactgtgtgctatttgtgttaacatggaagaggattcattgtttttatttttatttttttaattttttcttttttattaagctagcatctgccccagttggtgttcaaatagcacttgactctgcctgtgatatctgtatcttttctctaatcagagatacagaggttgagtataaaataaacctgctcagataggacaattaagtgcactgtacaattttcccagtttacaggtctatacttaagggaaaagttgcaagaatgctgaaaaaaaattgaacacaatctcattgaggagcattttttaaaaactaaaaaaaaaaaaactttgccagccatttacttgactattgagcttacttacttggacgcaacattgcaagcgctgtgaatggaaacagaatacacttaacatagaaatgaatgattgctttcgcttctacagtgcaaggatttttttgtacaaaacttttttaaatataaatgttaagaaaaattttttttaaaaaacacttcattatgtttaggggggaactgcattttagggttccattgtcttggtggtgttacaagacttgttatccatttaaaaatggtagtggaaattctatgccttggatacacaccgctcttcaggttgtaaaaaaaaaaaacatacattggggaaaggtttaagattatatagtacttaaatataggaaaatgcacactcatgttgattcctatgctaaaatacatttatggtcttttttctgtatttctagaatggtatttgaattaaatgttcatctagtgttaggcactatagtatttatattgaagcttgtatttttaactgttgcttgttctcttaaaaggtatcaatgtaccttttttggtagtggaaaaaaaaaagacaggctgccacagtatatttttttaatttggcaggataatatagtgcaaattatttgtatgcttcaaaaaaaaaaaaaagagagaaacaaaaaagtgtgacattacagatgagaagccatataatggcggtttgggggagcctgctagaatgtcacatggatggctgtcataggggttgtacatatccttttttgttcctttttcctgctgccatactgtatgcagtactgcaagctaataacgttggtttgttatgtagtgtgctttttgtccctttccttctatcaccctacattccagcatcttaccttcatatgcagtaaaagaaagaaagaaaaaaaaaggaaaaaaaaaaaaaaaccaatgttttgcagtttttttcattgccaaaaactaaatggtgctttatatttagattggaaagaatttcatatgcaaagcatattaaagagaaagcccgctttagtcaatacttttttgtaaatggcaatgcagaatattttgttattggccttttctattcctgtaatgaaagctgtttgtcgtaacttgaaattttatcttttactatgggagtcactatttattattgcttatgtgccctgttcaaaacagaggcacttaatttgatcttttatttttctttgtttttatttttttttttatttagatgaccaaaggtcattacaacctggctttttattgtatttgtttctggtctttgttaagttctattggaaaaaccactgtctgtgtttttttggcagttgtctgcattaacctgttcatacacccattttgtccctttattgaaaaaataaaaaaaattaaagtac

SEQ ID NO: 297165 - DNA, 5402 bp, Homo sapiens
gcggccgccgccgcagcctccgcaggcgcaagccccgcagccgcccccgccgccgcagctcgggggcgcggggggcggcagcagcaggcacgagaagagcctggggctgctcactaccaagttcgtgtcgctgctgcaggaggccaaggacggcgttctggatctcaaagcggtaaagatgagcccagcagctacacatgtacaacttgcaaacagccattcaccagtgcatggtttctcttgcaacacgcacagaacactcatggattaagaatctacttagaaagcgaacacggaagtcccctgaccccgcgggttggtatcccttcaggactaggtgcagaatgtccttcccagccacctctccatgggattcatattgcagacaataacccctttaacctgctaagaataccaggatcagtatcgagagaggcttccggcctggcagaagggcgctttccacccactccccccctgtttagtccaccaccgagacatcacttggacccccaccgcatagagcgcctgggggcggaagagatggccctggccacccatcacccgagtgcctttgacagggtgctgcggttgaatccaatggctatggagcctcccgccatggatttctctaggagacttagagagctggcagggaacacgtctagcccaccgctgtccccaggccggcccagccctatgcaaaggttactgcaaccattccagccaggtagcaagccgcccttcctggcgacgccccccctccctcctctgcaatccgcccctcctccctcccagcccccggtcaagtccaagtcatgcgagttctgcggcaagacgttcaaatttcagagcaacctggtggtgcaccggcgcagccacacgggcgagaagccctacaagtgcaacctgtgcgaccacgcgtgcacccaggccagcaagctgaagcgccacatgaagacgcacatgcacaaatcgtcccccatgacggtcaagtccgacgacggtctctccaccgccagctccccggaacccggcaccagcgacttggtgggcagcgccagcagcgcgctcaagtccgtggtggccaagttcaagagcgagaacgaccccaacctgatcccggagaacggggacgaggaggaagaggaggacgacgaggaagaggaagaagaggaggaagaggaggaggaggagctgacggagagcgagagggtggactacggcttcgggctgagcctggaggcggcgcgccaccacgagaacagctcgcggggcgcggtcgtgggcgtgggcgacgagagccgcgccctgcccgacgtcatgcagggcatggtgctcagctccatgcagcacttcagcgaggccttccaccaggtcctgggcgagaagcataagcgcggccacctggccgaggccgagggccacagggacacttgcgacgaagactcggtggccggcgagtcggaccgcatagacgatggcactgttaatggccgcggctgctccccgggcgagtcggcctcggggggcctgtccaaaaagctgctgctgggcagccccagctcgctgagccccttctctaagcgcatcaagctcgagaaggagttcgacctgcccccggccgcgatgcccaacacggagaacgtgtactcgcagtggctcgccggctacgcggcctccaggcagctcaaagatcccttccttagcttcggagactccagacaatcgccttttgcctcctcgtcggagcactcctcggagaacgggagcttgcgcttctccacaccgcccggggagctggacggagggatctcggggcgcagcggcacgggaagtggagggagcacgccccatattagtggtccgggcccgggcaggcccagctcaaaagagggcagacgcagcgacacttgtgagtactgtgggaaagtcttcaagaactgtagcaatctcactgtccacaggagaagccacacgggcgaaaggccttataaatgcgagctgtgcaactatgcctgtgcccagagtagcaagctcaccaggcacatgaaaacgcatggccaggtggggaaggacgtttacaaatgtgaaatttgtaagatgccttttagcgtgtacagtaccctggagaaacacatgaaaaaatggcacagtgatcgagtgttgaataatgatataaaaactgaatagaggtatattaatacccctccctcactcccacctgacaccccctttttcaccactccccttccccatcgccctccagccccactccctgtaggatttttttctagtcccatgtgatttaaacaaacaaacaaacaaacagaagtaacgaagctaagaatatgagagtgcttgtcaccagcacacctgttttttttctttttctttttcttttttctttttccttttttttttttttcctttatgttctcaccgtttgaatgcatgatctgtatggggcaatactattgcattttacgcaaactttgagcctttctcttgtgcaataatttacatgttgtgtatgtttttttttaaacttagacagcatgtatggtatgttatggctattttaaattgtccctaattcgttgctgagcaaacatgttgctgtttccagttccgttctgagagaaaaagagagagagagagaaaaagaccatgctgcatacattctgtaatacatatcatgtacagttttattttataacgtgaggaggaaaaacagtctttggattaaccctctatagacagaatagatagcactgaaaaaaaatctctatgagctaaatgtctgtctctaaagggttaaatgtatcaattggaaaggaagaaaaaaggccttgaattgacaaattaacagaaaaacagaacaagtttattctatcatttggttttaaaatatgagtgccttggatctattaaaaccacatcgatggttctttctacttgttataaacttgtagcttaattcagcattgggtgaggtaataaaccttaggaactagcatataattctatattgtatttctcacaacaatggctacctaaaaagatgacccattatgtcctagttaatcatcatttttcctttagtttaattttataaacaaaactgattataccagtataaaagctactttgctcctggtgagagcttaaaagaaatgggctgttttgcccaaagttttattttttttaaacaatgattaaattgaatgtgtaatgtgcaaaagccctggaacgcaattaaatacactagtaaggagttcattttatgaagatatttgctttaataatgtctttttaaaaatactggcaccaaaagaaatagatccagatctacttggttgtcaagtggacaatcaaatgataaactttaagaccttgtataccatattgaaaggaagaggctgacaataaggtttgacagaggggaacagaagaaaataatatgatttattagcacaacgtggtactatttgccatttaaaactagaacaggtatataagctaatattgatacaatgatgattaactatgaattcttaagacttgcatttaaatgtgacattcttaaaaaaagaagagaaagaattttaagagtagcagtatatatgtctgtgctccctaaaagttgtacttcatttcttttccatacactgtgtgctatttgtgttaacatggaagaggattcattgtttttatttttatttttttaattttttcttttttattaagctagcatctgccccagttggtgttcaaatagcacttgactctgcctgtgatatctgtatcttttctctaatcagagatacagaggttgagtataaaataaacctgctcagataggacaattaagtgcactgtacaattttcccagtttacaggtctatacttaagggaaaagttgcaagaatgctgaaaaaaaattgaacacaatctcattgaggagcattttttaaaaactaaaaaaaaaaaaactttgccagccatttacttgactattgagcttacttacttggacgcaacattgcaagcgctgtgaatggaaacagaatacacttaacatagaaatgaatgattgctttcgcttctacagtgcaaggatttttttgtacaaaacttttttaaatataaatgttaagaaaaattttttttaaaaaacacttcattatgtttaggggggaactgcattttagggttccattgtcttggtggtgttacaagacttgttatccatttaaaaatggtagtggaaattctatgccttggatacacaccgctcttcaggttgtaaaaaaaaaaaacatacattggggaaaggtttaagattatatagtacttaaatataggaaaatgcacactcatgttgattcctatgctaaaatacatttatggtcttttttctgtatttctagaatggtatttgaattaaatgttcatctagtgttaggcactatagtatttatattgaagcttgtatttttaactgttgcttgttctcttaaaaggtatcaatgtaccttttttggtagtggaaaaaaaaaagacaggctgccacagtatatttttttaatttggcaggataatatagtgcaaattatttgtatgcttcaaaaaaaaaaaaaagagagaaacaaaaaagtgtgacattacagatgagaagccatataatggcggtttgggggagcctgctagaatgtcacatggatggctgtcataggggttgtacatatccttttttgttcctttttcctgctgccatactgtatgcagtactgcaagctaataacgttggtttgttatgtagtgtgctttttgtccctttccttctatcaccctacattccagcatcttaccttcatatgcagtaaaagaaagaaagaaaaaaaaaggaaaaaaaaaaaaaaaccaatgttttgcagtttttttcattgccaaaaactaaatggtgctttatatttagattggaaagaatttcatatgcaaagcatattaaagagaaagcccgctttagtcaatacttttttgtaaatggcaatgcagaatattttgttattggccttttctattcctgtaatgaaagctgtttgtcgtaacttgaaattttatcttttactatgggagtcactatttattattgcttatgtgccctgttcaaaacagaggcacttaatttgatcttttatttttctttgtttttatttttttttttatttagatgaccaaaggtcattacaacctggctttttattgtatttgtttctggtctttgttaagttctattggaaaaaccactgtctgtgtttttttggcagttgtctgcattaacctgttcatacacccattttgtccctttattgaaaaaataaaaaaaattaaagtac

SEQ ID NO: 297166 - DNA, 1503 bp, Homo sapiens
tgacgttcaagttcgcagggacgtcacgtccgcacttgaacttgcagctcaggggggcttttgccatttttttcatctctctctctctctctccctctatctctcttctctctctctccctctttttttttttttttttttttttttttttgcttaaaaaaaagccatgacggctctcccacaattcatcttccctgcgccatctttgtattatttctaatttattttggatgtcaaaaggcactgatgaagatattttctctggagtctccttctttctaacccggctctcccgatgtgaaccgagccgtcgtccgcccgccgccgccgccgccgccgccgccgcccgccccgcagcccaccatgtctcgccgcaagcaaggcaaaccccagcacttaagcaaacgggaattctcgcccgagcctcttgaagccattcttacagatgatgaaccagaccacggcccgttgggagctccagaaggggatcatgacctcctcacctgtgggcagtgccagatgaacttcccattgggggacattcttatttttatcgagcacaaacggaaacaatgcaatggcagcctctgcttagaaaaagctgtggataagccaccttccccttcaccaatcgagatgaaaaaagcatccaatcccgtggaggttggcatccaggtcacgccagaggatgacgattgtttatcaacgtcatctagaggaatttgccccaaacaggaacacatagcagataaacttctgcactggaggggcctctcctcccctcgttctgcacatggagctctaatccccacgcctgggatgagtgcagaatatgccccgcagggtatttgtaaagatgagcccagcagctacacatgtacaacttgcaaacagccattcaccagtgcatggtttctcttgcaacacgcacagaacactcatggattaagaatctacttagaaagcgaacacggaagtcccctgaccccgcgggttcttcacacacccccattcggcgtagtacccagagagctcaagatgtgtggcagttttcggatggaagctcgagagcccttaagttctgagaaaatttgaagcccccaggggtggggtggacgcgtgccgcccagtcgacgtcagcgtggtctgtcatcctgctagtttgtgatgttttctgacagtagcctccaagaagccgttgtgcgaagacagagtcctgcagagtccttccagcctaggcctgcagcgccattttatttatattttttaataaaaagtaaaaacaaaaaaacagacccacattggaacagtgaatcagtcccatagagagggcccgtggaccatcgctgtcatgagtgatgccctggcccttctgaaaccagccaacctaattacctgtattgtggaaatgcgcatgagtccccaaccccttgtttctatacattctatgttgtcttttaaaaagtgtgcttaacattgacacaataaatgttggagctttaa

SEQ ID NO: 297167 - DNA, 715 bp, Homo sapiens
atgggaagacgactcagaggtcagagatacttggggaggggaggctgagtttgaaatcatgcttaagatgccagtggctcgacctgtggttggtttaagttctaatttttaaaaagctagttagagaacagaaaatcattgggccaagtcacacctgtactttttttttccccctcctctgtctccaacctctttctaggttcttgttcttcacacacccccattcggcgtagtacccagagagctcaagatgtgtggcagttttcggatggaagctcgagagcccttaagttctgagaaaatttgaagcccccaggggtggggtggacgcgtgccgcccagtcgacgtcagcgtggtctgtcatcctgctagtttgtgatgttttctgacagtagcctccaagaagccgttgtgcgaagacagagtcctgcagagtccttccagcctaggcctgcagcgccattttatttatattttttaataaaaagtaaaaacaaaaaaacagacccacattggaacagtgaatcagtcccatagagagggcccgtggaccatcgctgtcatgagtgatgccctggcccttctgaaaccagccaacctaattacctgtattgtggaaatgcgcatgagtccccaaccccttgtttctatacattctatgttgtcttttaaaaagtgtgcttaacattgacacaataaatgttggagctttaa

SEQ ID NO: 297168 - DNA, 890 bp, Homo sapiens
tgacgttcaagttcgcagggacgtcacgtccgcacttgaacttgcagctcaggggggcttttgccatttttttcatctctctctctctctctccctctatctctcttctctctctctccctctttttttttttttttttttttttttttttgcttaaaaaaaagccatgacggctctcccacaattcatcttccctgcgccatctttgtattatttctaatttattttggatgtcaaaaggcactgatgaagatattttctctggagtctccttctttctaacccggctctcccgatgtgaaccgagccgtcgtccgcccgccgccgccgccgccgccgccgccgcccgccccgcagcccaccatgtctcgccgcaagcaaggcaaaccccagcacttaagcaaacgggaattctcgcccgagcctcttgaagccattcttacagatgatgaaccagaccacggcccgttgggagctccagaaggggatcatgacctcctcacctgtgggcagtgccagatgaacttcccattgggggacattcttatttttatcgagcacaaacggaaacaatgcaatggcagcctctgcttagaaaaagctgtggataagccaccttccccttcaccaatcgagatgaaaaaagcatccaatcccgtggaggttggcatccaggtcacgccagaggatgacgattgtttatcaacgtcatctagaggaatttgccccaaacaggaacacatagcagctcagactgaactggaggatgtatttgtgtaccttatggtgtaattgtaaatgagactataaattatagtatgctattatgattacttatttttcttttctctttatttatgtgattctgaataaaaacgactgacttctga

SEQ ID NO: 297169 - DNA, 1416 bp, Homo sapiens
tttttttttagtctcatattttatgatggggggaaatattcatggaagattactgaatgtgaaactgctgttcccttatagaaaagacccaaacattatcccatcatgtcagatttgaggttttggcttattgcacataggaatctttaaattaggtttgggctgtcataaagttagctttttgagagactagagaaaaaatatgacaagtcctataaaatagtaaagtctgctcctgttgatatataacattttttctctttaaaatcatgaacatagacatttatatcagggtatttaaaattatttgcctagacagtatagctggtatttagataatgatatatcagacagatactctaaagaagggagatatagtaattcaaaatggaaatacattagcatgctcttaaaagtaaatcaaatacaatatgcttttcagaatttagaaaatgaacttaccttttctttttgtatccattctgattctctcctagctcagactgaactggaggatgtatttgtgtaccttatggtgtaattgtaaatgagactataaattatagtatgctattatgattacttatttttcttttctctttatttatgtgattctgaataaaaacgactgacttctgaagtgaattttcagcatggcagttaaaacaaaaaaacaccactaccacaaaaaacaatatactggtgaacattttacttaccttcaaaatccagagagtagagaatattgttttctaataagtacctaggattttcatagggagcctatgtttgtgaggccactatccaaagactaatgttcatgaaactgggagtcctatatacaagctgtatttgtaaataagacagagaaaggttgtgaactggcagcttggatgttttgtcaaagtacaatgtcagagaaactctttctaagacaaattgtaaatagaactgtcacagtgattgcatgattgagccgcagaagtgtcctacaattgttggcattgtcaggacttttgaaagcttaattaaacacagtggcccgcatggctgctaaacttactaaggaaagccaaaaggaaaaaaaaaatatatctaaaatgtagaagatcctaaagatcccaaacttcttcagacattacccttgtggtgacacagaaaagatgcattgtgcattttcctagtcatcttttataaataatgttttgagaataggtccacgtgatatgaagatcatcctgtgtgtgatgtggagattgtgttagtttttctgtctcctgctgttacagacagttaatgtaaaaatggccttttattggaaacacaaatatgtattcacttcaagaacaggagcagagggggacaaagtttccctcccgttctctgtgtttattctgtgaaagcttaaaaaaacaa

SEQ ID NO: 297170 - DNA, 6080 bp, Homo sapiens
tgacgttcaagttcgcagggacgtcacgtccgcacttgaacttgcagctcaggggggcttttgccatttttttcatctctctctctctctctccctctatctctcttctctctctctccctctttttttttttttttttttttttttttttgcttaaaaaaaagccatgacggctctcccacaattcatcttccctgcgccatctttgtattatttctaatttattttggatgtcaaaaggcactgatgaagatattttctctggagtctccttctttctaacccggctctcccgatgtgaaccgagccgtcgtccgcccgccgccgccgccgccgccgccgccgcccgccccgcagcccaccatgtctcgccgcaagcaaggcaaaccccagcacttaagcaaacgggaattctcgcccgagcctcttgaagccattcttacagatgatgaaccagaccacggcccgttgggagctccagaaggggatcatgacctcctcacctgtgggcagtgccagatgaacttcccattgggggacattcttatttttatcgagcacaaacggaaacaatgcaatggcagcctctgcttagaaaaagctgtggataagccaccttccccttcaccaatcgagatgaaaaaagcatccaatcccgtggaggttggcatccaggtcacgccagaggatgacgattgtttatcaacgtcatctagaggaatttgccccaaacaggaacacatagcagataaacttctgcactggaggggcctctcctcccctcgttctgcacatggagctctaatccccacgcctgggatgagtgcagaatatgccccgcagggtatttgtaaagatgagcccagcagctacacatgtacaacttgcaaacagccattcaccagtgcatggtttctcttgcaacacgcacagaacactcatggattaagaatctacttagaaagcgaacacggaagtcccctgaccccgcgggttggtatcccttcaggactaggtgcagaatgtccttcccagccacctctccatgggattcatattgcagacaataacccctttaacctgctaagaataccaggatcagtatcgagagaggcttccggcctggcagaagggcgctttccacccactccccccctgtttagtccaccaccgagacatcacttggacccccaccgcatagagcgcctgggggcggaagagatggccctggccacccatcacccgagtgcctttgacagggtgctgcggttgaatccaatggctatggagcctcccgccatggatttctctaggagacttagagagctggcagggaacacgtctagcccaccgctgtccccaggccggcccagccctatgcaaaggttactgcaaccattccagccaggtagcaagccgcccttcctggcgacgccccccctccctcctctgcaatccgcccctcctccctcccagcccccggtcaagtccaagtcatgcgagttctgcggcaagacgttcaaatttcagagcaacctggtggtgcaccggcgcagccacacgggcgagaagccctacaagtgcaacctgtgcgaccacgcgtgcacccaggccagcaagctgaagcgccacatgaagacgcacatgcacaaatcgtcccccatgacggtcaagtccgacgacggtctctccaccgccagctccccggaacccggcaccagcgacttggtgggcagcgccagcagcgcgctcaagtccgtggtggccaagttcaagagcgagaacgaccccaacctgatcccggagaacggggacgaggaggaagaggaggacgacgaggaagaggaagaagaggaggaagaggaggaggaggagctgacggagagcgagagggtggactacggcttcgggctgagcctggaggcggcgcgccaccacgagaacagctcgcggggcgcggtcgtgggcgtgggcgacgagagccgcgccctgcccgacgtcatgcagggcatggtgctcagctccatgcagcacttcagcgaggccttccaccaggtcctgggcgagaagcataagcgcggccacctggccgaggccgagggccacagggacacttgcgacgaagactcggtggccggcgagtcggaccgcatagacgatggcactgttaatggccgcggctgctccccgggcgagtcggcctcggggggcctgtccaaaaagctgctgctgggcagccccagctcgctgagccccttctctaagcgcatcaagctcgagaaggagttcgacctgcccccggccgcgatgcccaacacggagaacgtgtactcgcagtggctcgccggctacgcggcctccaggcagctcaaagatcccttccttagcttcggagactccagacaatcgccttttgcctcctcgtcggagcactcctcggagaacgggagcttgcgcttctccacaccgcccggggagctggacggagggatctcggggcgcagcggcacgggaagtggagggagcacgccccatattagtggtccgggcccgggcaggcccagctcaaaagagggcagacgcagcgacacttgtgagtactgtgggaaagtcttcaagaactgtagcaatctcactgtccacaggagaagccacacgggcgaaaggccttataaatgcgagctgtgcaactatgcctgtgcccagagtagcaagctcaccaggcacatgaaaacgcatggccaggtggggaaggacgtttacaaatgtgaaatttgtaagatgccttttagcgtgtacagtaccctggagaaacacatgaaaaaatggcacagtgatcgagtgttgaataatgatataaaaactgaatagaggtatattaatacccctccctcactcccacctgacaccccctttttcaccactccccttccccatcgccctccagccccactccctgtaggatttttttctagtcccatgtgatttaaacaaacaaacaaacaaacagaagtaacgaagctaagaatatgagagtgcttgtcaccagcacacctgttttttttctttttctttttcttttttctttttccttttttttttttttcctttatgttctcaccgtttgaatgcatgatctgtatggggcaatactattgcattttacgcaaactttgagcctttctcttgtgcaataatttacatgttgtgtatgtttttttttaaacttagacagcatgtatggtatgttatggctattttaaattgtccctaattcgttgctgagcaaacatgttgctgtttccagttccgttctgagagaaaaagagagagagagagaaaaagaccatgctgcatacattctgtaatacatatcatgtacagttttattttataacgtgaggaggaaaaacagtctttggattaaccctctatagacagaatagatagcactgaaaaaaaatctctatgagctaaatgtctgtctctaaagggttaaatgtatcaattggaaaggaagaaaaaaggccttgaattgacaaattaacagaaaaacagaacaagtttattctatcatttggttttaaaatatgagtgccttggatctattaaaaccacatcgatggttctttctacttgttataaacttgtagcttaattcagcattgggtgaggtaataaaccttaggaactagcatataattctatattgtatttctcacaacaatggctacctaaaaagatgacccattatgtcctagttaatcatcatttttcctttagtttaattttataaacaaaactgattataccagtataaaagctactttgctcctggtgagagcttaaaagaaatgggctgttttgcccaaagttttattttttttaaacaatgattaaattgaatgtgtaatgtgcaaaagccctggaacgcaattaaatacactagtaaggagttcattttatgaagatatttgctttaataatgtctttttaaaaatactggcaccaaaagaaatagatccagatctacttggttgtcaagtggacaatcaaatgataaactttaagaccttgtataccatattgaaaggaagaggctgacaataaggtttgacagaggggaacagaagaaaataatatgatttattagcacaacgtggtactatttgccatttaaaactagaacaggtatataagctaatattgatacaatgatgattaactatgaattcttaagacttgcatttaaatgtgacattcttaaaaaaagaagagaaagaattttaagagtagcagtatatatgtctgtgctccctaaaagttgtacttcatttcttttccatacactgtgtgctatttgtgttaacatggaagaggattcattgtttttatttttatttttttaattttttcttttttattaagctagcatctgccccagttggtgttcaaatagcacttgactctgcctgtgatatctgtatcttttctctaatcagagatacagaggttgagtataaaataaacctgctcagataggacaattaagtgcactgtacaattttcccagtttacaggtctatacttaagggaaaagttgcaagaatgctgaaaaaaaattgaacacaatctcattgaggagcattttttaaaaactaaaaaaaaaaaaactttgccagccatttacttgactattgagcttacttacttggacgcaacattgcaagcgctgtgaatggaaacagaatacacttaacatagaaatgaatgattgctttcgcttctacagtgcaaggatttttttgtacaaaacttttttaaatataaatgttaagaaaaattttttttaaaaaacacttcattatgtttaggggggaactgcattttagggttccattgtcttggtggtgttacaagacttgttatccatttaaaaatggtagtggaaattctatgccttggatacacaccgctcttcaggttgtaaaaaaaaaaaacatacattggggaaaggtttaagattatatagtacttaaatataggaaaatgcacactcatgttgattcctatgctaaaatacatttatggtcttttttctgtatttctagaatggtatttgaattaaatgttcatctagtgttaggcactatagtatttatattgaagcttgtatttttaactgttgcttgttctcttaaaaggtatcaatgtaccttttttggtagtggaaaaaaaaaagacaggctgccacagtatatttttttaatttggcaggataatatagtgcaaattatttgtatgcttcaaaaaaaaaaaaaagagagaaacaaaaaagtgtgacattacagatgagaagccatataatggcggtttgggggagcctgctagaatgtcacatggatggctgtcataggggttgtacatatccttttttgttcctttttcctgctgccatactgtatgcagtactgcaagctaataacgttggtttgttatgtagtgtgctttttgtccctttccttctatcaccctacattccagcatcttaccttcatatgcagtaaaagaaagaaagaaaaaaaaaggaaaaaaaaaaaaaaaccaatgttttgcagtttttttcattgccaaaaactaaatggtgctttatatttagattggaaagaatttcatatgcaaagcatattaaagagaaagcccgctttagtcaatacttttttgtaaatggcaatgcagaatattttgttattggccttttctattcctgtaatgaaagctgtttgtcgtaacttgaaattttatcttttactatgggagtcactatttattattgcttatgtgccctgttcaaaacagaggcacttaatttgatcttttatttttctttgtttttatttttttttttatttagatgaccaaaggtcattacaacctggctttttattgtatttgtttctggtctttgttaagttctattggaaaaaccactgtctgtgtttttttggcagttgtctgcattaacctgttcatacacccattttgtccctttattgaaaaaataaaaaaaattaaagtac

SEQ ID NO: 297171 - DNA, 4093 bp, Homo sapiens
tgacgttcaagttcgcagggacgtcacgtccgcacttgaacttgcagctcaggggggcttttgccatttttttcatctctctctctctctctccctctatctctcttctctctctctccctctttttttttttttttttttttttttttttgcttaaaaaaaagccatgacggctctcccacaattcatcttccctgcgccatctttgtattatttctaatttattttggatgtcaaaaggcactgatgaagatattttctctggagtctccttctttctaacccggctctcccgatgtgaaccgagccgtcgtccgcccgccgccgccgccgccgccgccgccgcccgccccgcagcccaccatgtctcgccgcaagcaaggcaaaccccagcacttaagcaaacgggaattctcgcccgagcctcttgaagccattcttacagatgatgaaccagaccacggcccgttgggagctccagaaggggatcatgacctcctcacctgtgggcagtgccagatgaacttcccattgggggacattcttatttttatcgagcacaaacggaaacaatgcaatggcagcctctgcttagaaaaagctgtggataagccaccttccccttcaccaatcgagatgaaaaaagcatccaatcccgtggaggttggcatccaggtcacgccagaggatgacgattgtttatcaacgtcatctagaggaatttgccccaaacaggaacacatagcagataaacttctgcactggaggggcctctcctcccctcgttctgcacatggagctctaatccccacgcctgggatgagtgcagaatatgccccgcagggtatttgtaaagatgagcccagcagctacacatgtacaacttgcaaacagccattcaccagtgcatggtttctcttgcaacacgcacagaacactcatggattaagaatctacttagaaagcgaacacggaagtcccctgaccccgcgggttggtatcccttcaggactaggtgcagaatgtccttcccagccacctctccatgggattcatattgcagacaataacccctttaacctgctaagaataccaggatcagtatcgagagaggcttccggcctggcagaagggcgctttccacccactccccccctgtttagtccaccaccgagacatcacttggacccccaccgcatagagcgcctgggggcggaagagatggccctggccacccatcacccgagtgcctttgacagggtgctgcggttgaatccaatggctatggagcctcccgccatggatttctctaggagacttagagagctggcagggaacacgtctagcccaccgctgtccccaggccggcccagccctatgcaaaggttactgcaaccattccagccaggtagcaagccgcccttcctggcgacgccccccctccctcctctgcaatccgcccctcctccctcccagcccccggtcaagtccaagtcatgcgagttctgcggcaagacgttcaaatttcagagcaacctggtggtgcaccggcgcagccacacgggcgagaagccctacaagtgcaacctgtgcgaccacgcgtgcacccaggccagcaagctgaagcgccacatgaagacgcacatgcacaaatcgtcccccatgacggtcaagtccgacgacggtctctccaccgccagctccccggaacccggcaccagcgacttggtgggcagcgccagcagcgcgctcaagtccgtggtggccaagttcaagagcgagaacgaccccaacctgatcccggagaacggggacgaggaggaagaggaggacgacgaggaagaggaagaagaggaggaagaggaggaggaggagctgacggagagcgagagggtggactacggcttcgggctgagcctggaggcggcgcgccaccacgagaacagctcgcggggcgcggtcgtgggcgtgggcgacgagagccgcgccctgcccgacgtcatgcagggcatggtgctcagctccatgcagcacttcagcgaggccttccaccaggtcctgggcgagaagcataagcgcggccacctggccgaggccgagggccacagggacacttgcgacgaagactcggtggccggcgagtcggaccgcatagacgatggcactgttaatggccgcggctgctccccgggcgagtcggcctcggggggcctgtccaaaaagctgctgctgggcagccccagctcgctgagccccttctctaagcgcatcaagctcgagaaggagttcgacctgcccccggccgcgatgcccaacacggagaacgtgtactcgcagtggctcgccggctacgcggcctccaggcagctcaaagatcccttccttagcttcggagactccagacaatcgccttttgcctcctcgtcggagcactcctcggagaacgggagcttgcgcttctccacaccgcccggggagctggacggagggatctcggggcgcagcggcacgggaagtggagggagcacgccccatattagtggtccgggcccgggcaggcccagctcaaaagagggcagacgcagcgacacttgttcttcacacacccccattcggcgtagtacccagagagctcaagatgtgtggcagttttcggatggaagctcgagagcccttaagttctgagaaaatttgaagcccccaggggtggggtggacgcgtgccgcccagtcgacgtcagcgtggtctgtcatcctgctagtttgtgatgttttctgacagtagcctccaagaagccgttgtgcgaagacagagtcctgcagagtccttccagcctaggcctgcagcgccattttatttatattttttaataaaaagtaaaaacaaaaaaacagacccacattggaacagtgaatcagtcccatagagagggcccgtggaccatcgctgtcatgagtgatgccctggcccttctgaaaccagccaacctaattacctgtattgtggaaatgcgcatgagtccccaaccccttgtttctatacattctatgttgtcttttaaaaagtgtgcttaacattgacacaataaatgttggagctttaaaaggtgtttgcttgttctttaatttttaatgcttataagacaatgaggctgcttatgattttgtacttctgtacctgtttcctacagacacccatcgggtgggtaggaggaacagatttgagaaatgggcaggagatgtaggaggggaactaggttaccgcttatcagatggcataaattttcaaggagaatcaaaatgcaaaacttgggaataaatcatagcaatatcataattaatgtagtagtaatattgctgtttattaatgctgaagtgtggttttcctaactgtctgacttataatttgcataccattaaataatgcataatatggcacgccgaatcctgtttttcaaatatatgcttttggtggctaccatgcaggatttgaatttgtcttttaatttagcttaggaaagaacatcactgggcgagcggtaaatcctaaagaaggtgataaatgtcagtagtttcttattaaatattctaattttaggttcccaaaccttcaggaaatatatcttaatgcagacaaacaaacataaaacttctttagtacttacatcaggaaatttggggcagattttagaggggggaaattataggaggaaagaagttcacatcagaacagacaatcacagcaatgctctattccttagaaattagtgccacaaataagttacatctacaaacaggtggtaaaaattctttctggcccagttaatttgcacagaacttttctcagtttggtattttttactgcttggagatccagaagagaattagaaacaacatagcaaattaaaataggtttgtcaataatagagctcagacacctgtgtgctgtagattcacatacaggccgtgaacctaagtggggaaaatcctacctatccaccttctggctagattacctagcttagtgaaaagatagccaaataattggcatgtgaattatttcctgcttattcataataaataatgactgtcta

SEQ ID NO: 297172 - DNA, 3042 bp, Homo sapiens
tgacgttcaagttcgcagggacgtcacgtccgcacttgaacttgcagctcaggggggcttttgccatttttttcatctctctctctctctctccctctatctctcttctctctctctccctctttttttttttttttttttttttttttttgcttaaaaaaaagccatgacggctctcccacaattcatcttccctgcgccatctttgtattatttctaatttattttggatgtcaaaaggcactgatgaagatattttctctggagtctccttctttctaacccggctctcccgatgtgaaccgagccgtcgtccgcccgccccgcagcccaccatgtctcgccgcaagcaaggcaaaccccagcacttaagcaaacgggaattctcgcccgagcctcttgaagccattcttacagatgatgaaccagaccacggcccgttgggagctccagaaggggatcatgacctcctcacctgtgggcagtgccagatgaacttcccattgggggacattcttatttttatcgagcacaaacggaaacaatgcaatggcagcctctgcttagaaaaagctgtggataagccaccttccccttcaccaatcgagatgaaaaaagcatccaatcccgtggaggttggcatccaggtcacgccagaggatgacgattgtttatcaacgtcatctagaggaatttgccccaaacaggaacacatagcagataaacttctgcactggaggggcctctcctcccctcgttctgcacatggagctctaatccccacgcctgggatgagtgcagaatatgccccgcagggtatttgtaaagatgagcccagcagctacacatgtacaacttgcaaacagccattcaccagtgcatggtttctcttgcaacacgcacagaacactcatggattaagaatctacttagaaagcgaacacggaagtcccctgaccccgcgggttggtatcccttcaggactaggtgcagaatgtccttcccagccacctctccatgggattcatattgcagacaataacccctttaacctgctaagaataccaggatcagtatcgagagaggcttccggcctggcagaagggcgctttccacccactccccccctgtttagtccaccaccgagacatcacttggacccccaccgcatagagcgcctgggggcggaagagatggccctggccacccatcacccgagtgcctttgacagggtgctgcggttgaatccaatggctatggagcctcccgccatggatttctctaggagacttagagagctggcagggaacacgtctagcccaccgctgtccccaggccggcccagccctatgcaaaggttactgcaaccattccagccaggtagcaagccgcccttcctggcgacgccccccctccctcctctgcaatccgcccctcctccctcccagcccccggtcaagtccaagtcatgcgagttctgcggcaagacgttcaaatttcagagcaacctggtggtgcaccggcgcagccacacgggcgagaagccctacaagtgcaacctgtgcgaccacgcgtgcacccaggccagcaagctgaagcgccacatgaagacgcacatgcacaaatcgtcccccatgacggtcaagtccgacgacggtctctccaccgccagctccccggaacccggcaccagcgacttggtgggcagcgccagcagcgcgctcaagtccgtggtggccaagttcaagagcgagaacgaccccaacctgatcccggagaacggggacgaggaggaagaggaggacgacgaggaagaggaagaagaggaggaagaggaggaggaggagctgacggagagcgagagggtggactacggcttcgggctgagcctggaggcggtcgtgggcgtgggcgacgagagccgcgccctgcccgacgtcatgcagggcatggtgctcagctccatgcagcacttcagcgaggccttccaccaggtcctgggcgagaagcataagcgcggccacctggccgaggccgagggccacagggacacttgcgacgaagactcggtggccggcgagtcggaccgcatagacgatggcactgttaatggccgcggctgctccccgggcgagtcggcctcggggggcctgtccaaaaagctgctgctgggcagccccagctcgctgagccccttctctaagcgcatcaagctcgagaaggagttcgacctgcccccggccgcgatgcccaacacggagaacgtgtactcgcagtggctcgccggctacgcggcctccaggcagctcaaagatcccttccttagcttcggagactccagacaatcgccttttgcctcctcgtcggagcactcctcggagaacgggagcttgcgcttctccacaccgcccggggagctggacggagggatctcggggcgcagcggcacgggaagtggagggagcacgccccatattagtggtccgggcccgggcaggcccagctcaaaagagggcagacgcagcgacacttgttcttcacacacccccattcggcgtagtacccagagagctcaagatgtgtggcagttttcggatggaagctcgagagcccttaagttctgagaaaatttgaagcccccaggggtggggtggacgcgtgccgcccagtcgacgtcagcgtggtctgtcatcctgctagtttgtgatgttttctgacagtagcctccaagaagccgttgtgcgaagacagagtcctgcagagtccttccagcctaggcctgcagcgccattttatttatattttttaataaaaagtaaaaacaaaaaaacagacccacattggaacagtgaatcagtcccatagagagggcccgtggaccatcgctgtcatgagtgatgccctggcccttctgaaaccagccaacctaattacctgtattgtggaaatgcgcatgagtccccaaccccttgtttctatacattctatgttgtcttttaaaaagtgtgcttaacattgacacaataaatgttggagctttaa

SEQ ID NO: 297173 - DNA, 5309 bp, Homo sapiens
tgacgttcaagttcgcagggacgtcacgtccgcacttgaacttgcagctcaggggggcttttgccatttttttcatctctctctctctctctccctctatctctcttctctctctctccctctttttttttttttttttttttttttttttgcttaaaaaaaagccatgacggctctcccacaattcatcttccctgcgccatctttgtattatttctaatttattttggatgtcaaaaggcactgatgaagatattttctctggagtctccttctttctaacccggctctcccgatgtgaaccgagccgtcgtccgcccgccgccgccgccgccgccgccgccgcccgccccgcagcccaccatgtctcgccgcaagcaaggcaaaccccagcacttaagcaaacgggaattctcgcccgagcctcttgaagccattcttacagatgatgaaccagaccacggcccgttgggagctccagaaggggatcatgacctcctcacctgtgggcagtgccagatgaacttcccattgggggacattcttatttttatcgagcacaaacggaaacaatgcaatggcagcctctgcttagaaaaagctgtggataagccaccttccccttcaccaatcgagatgaaaaaagcatccaatcccgtggaggttggcatccaggtcacgccagaggatgacgattgtttatcaacgtcatctagaggaatttgccccaaacaggaacacatagcagataaacttctgcactggaggggcctctcctcccctcgttctgcacatggagctctaatccccacgcctgggatgagtgcagaatatgccccgcagggtatttgtaaagatgagcccagcagctacacatgtacaacttgcaaacagccattcaccagtgcatggtttctcttgcaacacgcacagaacactcatggattaagaatctacttagaaagcgaacacggaagtcccctgaccccgcgggttggtatcccttcaggactaggtgcagaatgtccttcccagccacctctccatgggattcatattgcagacaataacccctttaacctgctaagaataccaggatcagtatcgagagaggcttccggcctggcagaagggcgctttccacccactccccccctgtttagtccaccaccgagacatcacttggacccccaccgcatagagcgcctgggggcggaagagatggccctggccacccatcacccgagtgcctttgacagggtgctgcggttgaatccaatggctatggagcctcccgccatggatttctctaggagacttagagagctggcagggaacacgtctagcccaccgctgtccccaggccggcccagccctatgcaaaggttactgcaaccattccagccaggtagcaagccgcccttcctggcgacgccccccctccctcctctgcaatccgcccctcctccctcccagcccccggtcaagtccaagtcatgcgagttctgcggcaagacgttcaaatttcagagcaacctggtggtgcaccggcgcagccacacgggcgagaagccctacaagtgcaacctgtgcgaccacgcgtgcacccaggccagcaagctgaagcgccacatgaagacgcacatgcacaaatcgtcccccatgacggtcaagtccgacgacggtctctccaccgccagctccccggaacccggcaccagcgacttggtgggcagcgccagcagcgcgctcaagtccgtggtggccaagttcaagagcgagaacgaccccaacctgatcccggagaacggggacgaggaggaagaggaggacgacgaggaagaggaagaagaggaggaagaggaggaggaggagctgacggagagcgagagggtggactacggcttcgggctgagcctggaggcggcgcgccaccacgagaacagctcgcggggcgcggtcgtgggcgtgggcgacgagagccgcgccctgcccgacgtcatgcagggcatggtgctcagctccatgcagcacttcagcgaggccttccaccaggtcctgggcgagaagcataagcgcggccacctggccgaggccgagggccacagggacacttgcgacgaagactcggtggccggcgagtcggaccgcatagacgatggcactgttaatggccgcggctgctccccgggcgagtcggcctcggggggcctgtccaaaaagctgctgctgggcagccccagctcgctgagccccttctctaagcgcatcaagctcgagaaggagttcgacctgcccccggccgcgatgcccaacacggagaacgtgtactcgcagtggctcgccggctacgcggcctccaggcagctcaaagatcccttccttagcttcggagactccagacaatcgccttttgcctcctcgtcggagcactcctcggagaacgggagcttgcgcttctccacaccgcccggggagctggacggagggatctcggggcgcagcggcacgggaagtggagggagcacgccccatattagtggtccgggcccgggcaggcccagctcaaaagagggcagacgcagcgacacttgtgagtactgtgggaaagtcttcaagaactgtagcaatctcactgtccacaggagaagccacacgggcgaaaggccttataaatgcgagctgtgcaactatgcctgtgcccagagtagcaagctcaccaggcacatgaaaacgcatggccaggtggggaaggacgtttacaaatgtgaaatttgtaagatgccttttagcgtgtacagtaccctggagaaacacatgaaaaaatggcacagtgatcgagtgttgaataatgatataaaaactgaatagaggtatattaatacccctccctcactcccacctgacaccccctttttcaccactccccttccccatcgccctccagccccactccctgtaggatttttttctagtcccatgtgatttaaacaaacaaacaaacaaacagaagtaacgaagctaagaatatgagagtgcttgtcaccagcacacctgttttttttctttttctttttcttttttctttttccttttttttttttttcctttatgttctcaccgtttgaatgcatgatctgtatggggcaatactattgcattttacgcaaactttgagcctttctcttgtgcaataatttacatgttgtgtatgtttttttttaaacttagacagcatgtatggtatgttatggctattttaaattgtccctaattcgttgctgagcaaacatgttgctgtttccagttccgttctgagagaaaaagagagagagagagaaaaagaccatgctgcatacattctgtaatacatatcatgtacagttttattttataacgtgaggaggaaaaacagtctttggattaaccctctatagacagaatagatagcactgaaaaaaaatctctatgagctaaatgtctgtctctaaagggttaaatgtatcaattggaaaggaagaaaaaaggccttgaattgacaaattaacagaaaaacagaacaagtttattctatcatttggttttaaaatatgagtgccttggatctattaaaaccacatcgatggttctttctacttgttataaacttgtagcttaattcagcattgggtgaggtaataaaccttaggaactagcatataattctatattgtatttctcacaacaatggctacctaaaaagatgacccattatgtcctagttaatcatcatttttcctttagtttaattttataaacaaaactgattataccagtataaaagctactttgctcctggtgagagcttaaaagaaatgggctgttttgcccaaagttttattttttttaaacaatgattaaattgaatgtgtaatgtgcaaaagccctggaacgcaattaaatacactagtaaggagttcattttatgaagatatttgctttaataatgtctttttaaaaatactggcaccaaaagaaatagatccagatctacttggttgtcaagtggacaatcaaatgataaactttaagaccttgtataccatattgaaaggaagaggctgacaataaggtttgacagaggggaacagaagaaaataatatgatttattagcacaacgtggtactatttgccatttaaaactagaacaggtatataagctaatattgatacaatgatgattaactatgaattcttaagacttgcatttaaatgtgacattcttaaaaaaagaagagaaagaattttaagagtagcagtatatatgtctgtgctccctaaaagttgtacttcatttcttttccatacactgtgtgctatttgtgttaacatggaagaggattcattgtttttatttttatttttttaattttttcttttttattaagctagcatctgccccagttggtgttcaaatagcacttgactctgcctgtgatatctgtatcttttctctaatcagagatacagaggttgagtataaaataaacctgctcagataggacaattaagtgcactgtacaattttcccagtttacaggtctatacttaagggaaaagttgcaagaatgctgaaaaaaaattgaacacaatctcattgaggagcattttttaaaaactaaaaaaaaaaaaactttgccagccatttacttgactattgagcttacttacttggacgcaacattgcaagcgctgtgaatggaaacagaatacacttaacatagaaatgaatgattgctttcgcttctacagtgcaaggatttttttgtacaaaacttttttaaatataaatgttaagaaaaattttttttaaaaaacacttcattatgtttaggggggaactgcattttagggttccattgtcttggtggtgttacaagacttgttatccatttaaaaatggtagtggaaattctatgccttggatacacaccgctcttcaggttgtaaaaaaaaaaaacatacattggggaaaggtttaagattatatagtacttaaatataggaaaatgcacactcatgttgattcctatgctaaaatacatttatggtcttttttctgtatttctagaatggtatttgaattaaatgttcatctagtgttaggcactatagtatttatattgaagcttgtatttttaactgttgcttgttctcttaaaaggtatcaatgtaccttttttggtagtggaaaaaaaaaagacaggctgccacagtatatttttttaatttggcaggataatatagtgcaaattatttgtatgcttca

SEQ ID NO: 297174 - DNA, 5704 bp, Homo sapiens
atcagacgcggcggcggcggtgtgaagttacagcccggccagccgagcctcttgaagccattcttacagatgatgaaccagaccacggcccgttgggagctccagaaggggatcatgacctcctcacctgtgggcagtgccagatgaacttcccattgggggacattcttatttttatcgagcacaaacggaaacaatgcaatggcagcctctgcttagaaaaagctgtggataagccaccttccccttcaccaatcgagatgaaaaaagcatccaatcccgtggaggttggcatccaggtcacgccagaggatgacgattgtttatcaacgtcatctagaggaatttgccccaaacaggaacacatagcagataaacttctgcactggaggggcctctcctcccctcgttctgcacatggagctctaatccccacgcctgggatgagtgcagaatatgccccgcagggtatttgtaaagatgagcccagcagctacacatgtacaacttgcaaacagccattcaccagtgcatggtttctcttgcaacacgcacagaacactcatggattaagaatctacttagaaagcgaacacggaagtcccctgaccccgcgggttggtatcccttcaggactaggtgcagaatgtccttcccagccacctctccatgggattcatattgcagacaataacccctttaacctgctaagaataccaggatcagtatcgagagaggcttccggcctggcagaagggcgctttccacccactccccccctgtttagtccaccaccgagacatcacttggacccccaccgcatagagcgcctgggggcggaagagatggccctggccacccatcacccgagtgcctttgacagggtgctgcggttgaatccaatggctatggagcctcccgccatggatttctctaggagacttagagagctggcagggaacacgtctagcccaccgctgtccccaggccggcccagccctatgcaaaggttactgcaaccattccagccaggtagcaagccgcccttcctggcgacgccccccctccctcctctgcaatccgcccctcctccctcccagcccccggtcaagtccaagtcatgcgagttctgcggcaagacgttcaaatttcagagcaacctggtggtgcaccggcgcagccacacgggcgagaagccctacaagtgcaacctgtgcgaccacgcgtgcacccaggccagcaagctgaagcgccacatgaagacgcacatgcacaaatcgtcccccatgacggtcaagtccgacgacggtctctccaccgccagctccccggaacccggcaccagcgacttggtgggcagcgccagcagcgcgctcaagtccgtggtggccaagttcaagagcgagaacgaccccaacctgatcccggagaacggggacgaggaggaagaggaggacgacgaggaagaggaagaagaggaggaagaggaggaggaggagctgacggagagcgagagggtggactacggcttcgggctgagcctggaggcggcgcgccaccacgagaacagctcgcggggcgcggtcgtgggcgtgggcgacgagagccgcgccctgcccgacgtcatgcagggcatggtgctcagctccatgcagcacttcagcgaggccttccaccaggtcctgggcgagaagcataagcgcggccacctggccgaggccgagggccacagggacacttgcgacgaagactcggtggccggcgagtcggaccgcatagacgatggcactgttaatggccgcggctgctccccgggcgagtcggcctcggggggcctgtccaaaaagctgctgctgggcagccccagctcgctgagccccttctctaagcgcatcaagctcgagaaggagttcgacctgcccccggccgcgatgcccaacacggagaacgtgtactcgcagtggctcgccggctacgcggcctccaggcagctcaaagatcccttccttagcttcggagactccagacaatcgccttttgcctcctcgtcggagcactcctcggagaacgggagcttgcgcttctccacaccgcccggggagctggacggagggatctcggggcgcagcggcacgggaagtggagggagcacgccccatattagtggtccgggcccgggcaggcccagctcaaaagagggcagacgcagcgacacttgtgagtactgtgggaaagtcttcaagaactgtagcaatctcactgtccacaggagaagccacacgggcgaaaggccttataaatgcgagctgtgcaactatgcctgtgcccagagtagcaagctcaccaggcacatgaaaacgcatggccaggtggggaaggacgtttacaaatgtgaaatttgtaagatgccttttagcgtgtacagtaccctggagaaacacatgaaaaaatggcacagtgatcgagtgttgaataatgatataaaaactgaatagaggtatattaatacccctccctcactcccacctgacaccccctttttcaccactccccttccccatcgccctccagccccactccctgtaggatttttttctagtcccatgtgatttaaacaaacaaacaaacaaacagaagtaacgaagctaagaatatgagagtgcttgtcaccagcacacctgttttttttctttttctttttcttttttctttttccttttttttttttttcctttatgttctcaccgtttgaatgcatgatctgtatggggcaatactattgcattttacgcaaactttgagcctttctcttgtgcaataatttacatgttgtgtatgtttttttttaaacttagacagcatgtatggtatgttatggctattttaaattgtccctaattcgttgctgagcaaacatgttgctgtttccagttccgttctgagagaaaaagagagagagagagaaaaagaccatgctgcatacattctgtaatacatatcatgtacagttttattttataacgtgaggaggaaaaacagtctttggattaaccctctatagacagaatagatagcactgaaaaaaaatctctatgagctaaatgtctgtctctaaagggttaaatgtatcaattggaaaggaagaaaaaaggccttgaattgacaaattaacagaaaaacagaacaagtttattctatcatttggttttaaaatatgagtgccttggatctattaaaaccacatcgatggttctttctacttgttataaacttgtagcttaattcagcattgggtgaggtaataaaccttaggaactagcatataattctatattgtatttctcacaacaatggctacctaaaaagatgacccattatgtcctagttaatcatcatttttcctttagtttaattttataaacaaaactgattataccagtataaaagctactttgctcctggtgagagcttaaaagaaatgggctgttttgcccaaagttttattttttttaaacaatgattaaattgaatgtgtaatgtgcaaaagccctggaacgcaattaaatacactagtaaggagttcattttatgaagatatttgctttaataatgtctttttaaaaatactggcaccaaaagaaatagatccagatctacttggttgtcaagtggacaatcaaatgataaactttaagaccttgtataccatattgaaaggaagaggctgacaataaggtttgacagaggggaacagaagaaaataatatgatttattagcacaacgtggtactatttgccatttaaaactagaacaggtatataagctaatattgatacaatgatgattaactatgaattcttaagacttgcatttaaatgtgacattcttaaaaaaagaagagaaagaattttaagagtagcagtatatatgtctgtgctccctaaaagttgtacttcatttcttttccatacactgtgtgctatttgtgttaacatggaagaggattcattgtttttatttttatttttttaattttttcttttttattaagctagcatctgccccagttggtgttcaaatagcacttgactctgcctgtgatatctgtatcttttctctaatcagagatacagaggttgagtataaaataaacctgctcagataggacaattaagtgcactgtacaattttcccagtttacaggtctatacttaagggaaaagttgcaagaatgctgaaaaaaaattgaacacaatctcattgaggagcattttttaaaaactaaaaaaaaaaaaactttgccagccatttacttgactattgagcttacttacttggacgcaacattgcaagcgctgtgaatggaaacagaatacacttaacatagaaatgaatgattgctttcgcttctacagtgcaaggatttttttgtacaaaacttttttaaatataaatgttaagaaaaattttttttaaaaaacacttcattatgtttaggggggaactgcattttagggttccattgtcttggtggtgttacaagacttgttatccatttaaaaatggtagtggaaattctatgccttggatacacaccgctcttcaggttgtaaaaaaaaaaaacatacattggggaaaggtttaagattatatagtacttaaatataggaaaatgcacactcatgttgattcctatgctaaaatacatttatggtcttttttctgtatttctagaatggtatttgaattaaatgttcatctagtgttaggcactatagtatttatattgaagcttgtatttttaactgttgcttgttctcttaaaaggtatcaatgtaccttttttggtagtggaaaaaaaaaagacaggctgccacagtatatttttttaatttggcaggataatatagtgcaaattatttgtatgcttcaaaaaaaaaaaaaagagagaaacaaaaaagtgtgacattacagatgagaagccatataatggcggtttgggggagcctgctagaatgtcacatggatggctgtcataggggttgtacatatccttttttgttcctttttcctgctgccatactgtatgcagtactgcaagctaataacgttggtttgttatgtagtgtgctttttgtccctttccttctatcaccctacattccagcatcttaccttcatatgcagtaaaagaaagaaagaaaaaaaaaggaaaaaaaaaaaaaaaccaatgttttgcagtttttttcattgccaaaaactaaatggtgctttatatttagattggaaagaatttcatatgcaaagcatattaaagagaaagcccgctttagtcaatacttttttgtaaatggcaatgcagaatattttgttattggccttttctattcctgtaatgaaagctgtttgtcgtaacttgaaattttatcttttactatgggagtcactatttattattgcttatgtgccctgttcaaaacagaggcacttaatttgatcttttatttttctttgtttttatttttttttttatttagatgaccaaaggtcattacaacctggctttttattgtatttgtttctggtctttgttaagttctattggaaaaaccactgtctgtgtttttttggcagttgtctgcattaacctgttcatacacccattttgtccctttattgaaaaaataaaaaaaattaaagtac

SEQ ID NO: 297175 - DNA, 1667 bp, Homo sapiens
tgacgttcaagttcgcagggacgtcacgtccgcacttgaacttgcagctcaggggggcttttgccatttttttcatctctctctctctctctccctctatctctcttctctctctctccctctttttttttttttttttttttttttttttgcttaaaaaaaagccatgacggctctcccacaattcatcttccctgcgccatctttgtattatttctaatttattttggatgtcaaaaggcactgatgaagatattttctctggagtctccttctttctaacccggctctcccgatgtgaaccgagccgtcgtccgcccgccgccgccgccgccgccgccgccgcccgccccgcagcccaccatgtctcgccgcaagcaaggcaaaccccagcacttaagcaaacgggaattctcgcccgagcctcttgaagccattcttacagatgatgaaccagaccacggcccgttgggagctccagaaggggatcatgacctcctcacctgtgggcagtgccagatgaacttcccattgggggacattcttatttttatcgagcacaaacggaaacaatgcaatggcagcctctgcttagaaaaagctgtggataagccaccttccccttcaccaatcgagatgaaaaaagcatccaatcccgtggaggttggcatccaggtcacgccagaggatgacgattgtttatcaacgtcatctagaggaatttgccccaaacaggaacacatagcagctcagactgaactggaggatgtatttgtgtaccttatggtgtaattgtaaatgagactataaattatagtatgctattatgattacttatttttcttttctctttatttatgtgattctgaataaaaacgactgacttctgaagtgaattttcagcatggcagttaaaacaaaaaaacaccactaccacaaaaaacaatatactggtgaacattttacttaccttcaaaatccagagagtagagaatattgttttctaataagtacctaggattttcatagggagcctatgtttgtgaggccactatccaaagactaatgttcatgaaactgggagtcctatatacaagctgtatttgtaaataagacagagaaaggttgtgaactggcagcttggatgttttgtcaaagtacaatgtcagagaaactctttctaagacaaattgtaaatagaactgtcacagtgattgcatgattgagccgcagaagtgtcctacaattgttggcattgtcaggacttttgaaagcttaattaaacacagtggcccgcatggctgctaaacttactaaggaaagccaaaaggaaaaaaaaaatatatctaaaatgtagaagatcctaaagatcccaaacttcttcagacattacccttgtggtgacacagaaaagatgcattgtgcattttcctagtcatcttttataaataatgttttgagaataggtccacgtgatatgaagatcatcctgtgtgtgatgtggagattgtgttagtttttctgtctcctgctgttacagacagttaatgtaaaaatggccttttattggaaacacaaatatgtattcacttcaagaacaggagcagagggggacaaagtttccctcccgttctctgtgtttattctgtgaaagcttaaaaaaacaa

SEQ ID NO: 297176 - DNA, 636 bp, Homo sapiens
gttattacttgtttcgaatttaaaacgcctccctaaagggatattggcccccaaggcccaaaatttcggcacaaggaggggcgcagggtttgaaacatggcggacgacgtagaccagcaacaaactaccaacactgtagaggagcccctggatcttatcaggctcagcctagatgagcgaatttatgtgaaaatgagaaatgaccgagagcttcgaggcagattacatgcttatgatcaacatttaaatatgatcttgggagatgtggaagaaactgtgactactatagaaattgatgaagaaacatatgaagagatatataaatcaacgaaacggaatattccaatgctctttgtccggggagatggcgttgtcctggttgcccctccactgagagttggctgaaacaaagaatttgtcctgtatggaaaacgggagactttgtacagtggcctctctaaaagtacaaaacattcataagagaaacctgcatacattttgatattaagaaataattccggggattcttccactcctgaaatgagttgatttgcagataactcacaacttcttaagctaaatggtattttcatttttctcaagctctccaataaatatgaccaccaagatgcagaa

SEQ ID NO: 297177 - DNA, 749 bp, Homo sapiens
gtaaagagcgaacaaacagatcaagcactttggcatgcttcgccgctgtggatgactgccataaatttacctgtcagcacaacgtccaccatggtgtgcgacggagacagccaattaccatggtcatttggtgcattgacctagaggtggaggagaaatgtgcactcattgagcaggtggcccaccagacaatcgtcctaacctatattggttggactgacgtagaccagcaacaaactaccaacactgtagaggagcccctggatcttatcaggctcagcctagatgagcgaatttatgtgaaaatgagaaatgaccgagagcttcgaggcagattacatgcttatgatcaacatttaaatatgatcttgggagatgtggaagaaactgtgactactatagaaattgatgaagaaacatatgaagagatatataaatcaacgaaacggaatattccaatgctctttgtccggggagatggcgttgtcctggttgcccctccactgagagttggctgaaacaaagaatttgtcctgtatggaaaacgggagactttgtacagtggcctctctaaaagtacaaaacattcataagagaaacctgcatacattttgatattaagaaataattccggggattcttccactcctgaaatgagttgatttgcagataactcacaacttcttaagctaaatggtattttcatttttctcaagctctccaataaatatgaccaccaagatgcagaa

SEQ ID NO: 297178 - DNA, 814 bp, Homo sapiens
  misc_feature (662)..(663): n is a, c, g, or t
  misc_feature (667)..(667): n is a, c, g, or t
gagattgacgttgctcttgtgttctcgcgagaggcgggaaagggcgcagggtttgaaacatggcggacgacgtagaccagcaacaaactaccaacactgtagaggagcccctggatcttatcaggctcagcctagatgagcgaatttatgtgaaaatgagaaatgaccgagagcttcgaggcagattacatgcttatgatcaacatttaaatatgatcttgggagatgtggaagaaactgtgactactatagaaattgatgaagaaacatatgaagagatatataaatcaacgaaacggaatattccaatgctctttgtccggggagatggcgttgtcctggttgcccctccactgagagttggctgaaacaaagaatttgtcctgtatggaaaacgggagactttgtacagtggcctctctaaaagtacaaaacattcataagagaaacctgcatacattttgatattaagaaataattccggggattcttccactcctgaaatgagttgatttgcagataactcacaacttcttaagctaaatggtattttcatttttctcaagctctccaataaatatgaccaccaagatgcagaaaaacaaaaccaaacaaaaaaatttgggggggccgccggggcccgaaaaagttttctaaacccnntcgnttgggggcgggccccgagggtagggacctggcaaagcgggccccgggaaacccggcctgaacagggcgggtctccaccaataaaaagcccggggcaccgggtctgaacccaggggtcggggctacgggctccagggccaggcgatac

SEQ ID NO: 297179 - DNA, 651 bp, Homo sapiens
  misc_feature (26)..(26): n is a, c, g, or t
  misc_feature (34)..(34): n is a, c, g, or t
  misc_feature (41)..(41): n is a, c, g, or t
cacagaggatgaaacacggcgatctnaggacacnagcttcnttttaccacccttgactaggagcccctggatcttatcaggctcagcctagatgagcgaatttatgtgaaaatgagaaatgaccgagagcttcgaggcagattacatgcttatgatcaacatttaaatatgatcttgggagatgtggaagaaactgtgactactatagaaattgatgaagaaacatatgaagagatatataaatcaacgaaacggaatattccaatgctctttgtccggggagatggcgttgtcctggttgcccctccactgagagttggctgaaacaaagaatttgtcctgtatggaaaacgggagactttgtacagtggcctctctaaaagtacaaaacattcataagagaaacctgcatacattttgatattaagaaataattccggggattcttccactcctgaaatgagttgatttgcagataactcacaacttcttaagctaaatggtattttcatttttctcaagctctccaataaatatgaccaccaagatgcagaaaattttaaaacccaataccctcaatcgctgaacacccttttaaaaaaaaaaacatgtcggccgcttgggcccagcggactttgccctattgggggc

SEQ ID NO: 297180 - DNA, 635 bp, Homo sapiens
  misc_feature (26)..(26): n is a, c, g, or t
  misc_feature (34)..(34): n is a, c, g, or t
  misc_feature (41)..(41): n is a, c, g, or t
cacagaggatgaaacacggcgatctnaggacacnagcttcnttttaccacccttgactaggagcccctggatcttatcaggctcagcctagatgagcgaatttatgtgaaaatgagaaatgaccgagagcttcgaggcagattacatgcttatgatcaacatttaaatatgatcttgggagatgtggaagaaactgtgactactatagaaattgatgaagaaacatatgaagagatatataaatcaacgaaacggaatattccaatgctctttgtccggggagatggcgttgtcctggttgcccctccactgagagttggctgaaacaaagaatttgtcctgtatggaaaacgggagactttgtacagtggcctctctaaaagtacaaaacattcataagagaaacctgcatacattttgatattaagaaataattccggggattcttccactcctgaaatgagttgatttgcagataactcacaacttcttaagctaaatggtattttcatttttctcaagctctccaataaatatgaccaccaagatgcagaaaaatttaaacacaataggcccaaatcgggaaaacccctttaaaaaaatggacgaattggggcccattggcaattggcata

SEQ ID NO: 297181 - DNA, 556 bp, Homo sapiens
tcataggttcgcaggcatggcggacgacgtagaccagcaacaaactaccaacactgtagaggagcccctggatcttatcaggctcagcctagatgagcgaatttatgtgaaaatgagaaatgaccgagagcttcgaggcagattacatgcttatgatcaacatttaaatatgatcttgggagatgtggaagaaactgtgactactatagaaattgatgaagaaacatatgaagagatatataaatcaacgaaacggaatattccaatgctctttgtccggggagatggcgttgtcctggttgcccctccactgagagttggctgaaacaaagaatttgtcctgtatggaaaacgggagactttgtacagtggcctctctaaaagtacaaaacattcataagagaaacctgcatacattttgatattaagaaataattccggggattcttccactcctgaaatgagttgatttgcagataactcacaacttcttaagctaaatggtattttcatttttctcaagctctccaataaatatgaccaccaagatgcagaa

SEQ ID NO: 297182 - DNA, 673 bp, Homo sapiens
gagattgacgttgctcttgtgttctcgcgagaggcgggaaagggcgcagggtttgaaacatggcggacgacgtagaccagcaacaaactaccaacactgtagaggagcccctggatcttatcaggctcagcctagatgagcgaatttatgtgaaaatgagaaatgaccgagagcttcgaggcagattacatgcttatgatcaacatttaaatatgatcttgggagatgtggaagaaactgtgactactatagaaattgatgaagaaacatatgaagagatatataaatcaacgaaacggaatattccaatgctctttgtccggggagatggcgttgtcctggttgcccctccactgagagttggctgaaacaaagaatttgtcctgtatggaaaacgggagactttgtacagtggcctctctaaaagtacaaaacattcataagagaaacctgcatacattttgatattaagaaataattccggggattcttccactcctgaaatgagttgatttgcagataactcacaacttcttaagctaaatggtattttcatttttctcaagctctccaataaatatgaccaccaagatgcagaaaaaaagaagaaaaaaaaaaaaattttggggggcgggttggggccttggagaaggtttttaggacacttggtggg

SEQ ID NO: 297183 - DNA, 618 bp, Homo sapiens
gagattgacgttgctcttgtgttctcgcgagaggcgggaaagggcgcagggtttgaaacatggcggacgacgtagaccagcaacaaactaccaacactgtagaggagcccctggatcttatcaggctcagcctagatgagcgaatttatgtgaaaatgagaaatgaccgagagcttcgaggcagattacatgcttatgatcaacatttaaatatgatcttgggagatgtggaagaaactgtgactactatagaaattgatgaagaaacatatgaagagatatataaatcaacgaaacggaatattccaatgctctttgtccggggagatggcgttgtcctggttgcccctccactgagagttggctgaaacaaagaatttgtcctgtatggaaaacgggagactttgtacagtggcctctctaaaagtacaaaacattcataagagaaacctgcatacattttgatattaagaaataattccggggattcttccactcctgaaatgagttgatttgcagataactcacaacttcttaagctaaatggtattttcatttttctcaagctctccaataaatatgaccaccaagatgcagaaactctttcaggacttcttt

SEQ ID NO: 297184 - DNA, 599 bp, Homo sapiens
gagattgacgttgctcttgtgttctcgcgagaggcgggaaagggcgcagggtttgaaacatggcggacgacgtagaccagcaacaaactaccaacactgtagaggagcccctggatcttatcaggctcagcctagatgagcgaatttatgtgaaaatgagaaatgaccgagagcttcgaggcagattacatgcttatgatcaacatttaaatatgatcttgggagatgtggaagaaactgtgactactatagaaattgatgaagaaacatatgaagagatatataaatcaacgaaacggaatattccaatgctctttgtccggggagatggcgttgtcctggttgcccctccactgagagttggctgaaacaaagaatttgtcctgtatggaaaacgggagactttgtacagtggcctctctaaaagtacaaaacattcataagagaaacctgcatacattttgatattaagaaataattccggggattcttccactcctgaaatgagttgatttgcagataactcacaacttcttaagctaaatggtattttcatttttctcaagctctccaataaatatgaccaccaagatgcagaa

SEQ ID NO: 297185 - DNA, 774 bp, Homo sapiens
gagattgacgttgctcttgtgttctcgcgagaggcgggaaagggcgcagggtttgaaacatggcggacgacgtagaccagcaacaaactaccaacactgtagaggagcccctggatcttatcaggctcagcctagatgagcgaatttatgtgaaaatgagaaatgaccgagagcttcgaggcagattacatgcttatgatcaacatttaaatatgatcttgggagatgtggaagaaactgtgactactatagaaattgatgaagaaacatatgaagagatatataaatcaacgaaacggaatattccaatgctctttgtccggggagatggcgttgtcctggttgcccctccactgagagttggctgaaacaaagaatttgtcctgtatggaaaacgggagactttgtacagtggcctctctaaaagtacaaaacattcataagagaaacctgcatacattttgatattaagaaataattccggggattcttccactcctgaaatgagttgatttgcagataactcacaacttcttaagctaaatggtattttcatttttctcaagctctccaataaatatgaccaccaagatgcagaaaaaaaaaaaaacaaaagagacaacaactctttttgtggccgcccttggcccccgaaaaagtttttaaaaccatccttttggggggggggcccctgtgggttctggagcccggggccaagagtgttcccaagagacccgggcggaactaggggtggggttccccccataaaaggcc

SEQ ID NO: 297186 - DNA, 478 bp, Homo sapiens
gagattgacgttgctcttgtgttctcgcgagaggcgggaaagggcgcagggtttgaaacatggcggacgacgtagaccagcaacaaactaccaacactgtagaggagcccctggatcttatcaggctcagcctagatgagcgaatttatgtgaaaatgagaaatgaccgagagcttcgaggcagattacatgcttatgatcaacatttaaatatgatcttgggagatgtggaagaaactgtgactactatagaaattgatgaagaaacatatgaagagatatataaatcaacgaaacggaatattccaatgctctttgtccggggagatggcgttgtcctggttgcccctccactgagagttggctgaaacaaagaatttgtcctgtatggaaaacgggagactttgtacagtggcctctctaaaagtacaaaacattcataagagaaacctgcgaacctatgagggtaccgagctcg

SEQ ID NO: 297187 - DNA, 1556 bp, Homo sapiens
  misc_feature (1279)..(1279): n is a, c, g, or t
  misc_feature (1300)..(1300): n is a, c, g, or t
  misc_feature (1337)..(1337): n is a, c, g, or t
  misc_feature (1355)..(1355): n is a, c, g, or t
caggcgtggtcgggtgcgtggtgcgtgggtccggctttcggtgactagacggtccgcagggacatcccgtccctggggcctccccagtctccctccccctcgcgcctgggcagctctctcccagggcttcggctcgagcctgcgacctgcacggacacccccccctcaggatctaaaatgtccactgaggcacaaagagttgatgacagtccaagcactagtggaggaagttccgatggagatcaacgtgaaagtgttcagcaagaaccagaaagagaacaagttcagcccaagaaaaaggagggaaaaatatccagcaaaaccgctgctaaattgtcaactagtgctaaaagaattcagaaggaacttgcagaaatcacattggaccctcctcccaactgtagtgctggacccaaaggagacaacatttatgaatggaggtcaactatattgggacccccaggatctgtctatgaaggaggggtgttctttcttgacattaccttttcaccagactatccgtttaaaccccctaaggttaccttccgaacaagaatctatcactgtaatattaacagccaaggtgtgatctgtctggacatcttaaaggacaactggagtccggctttaactatttctaaagttctcctctccatctgctcacttcttacagattgcaaccctgctgaccctctggtgggcagcatcgccacacagtacatgaccaacagagcagagcatgaccggatggccagacagtggaccaagcggtacgccacataggggcctgctgcctgccgccccgcgggacctgtgcaagcacattcaccaagtgcatcggtagccctgcccacccctccagacctcggttcttattttcctatttttattaaatttggaaccattttgtgatggtatgttgtccatcttcccatcccagttcttcctgccccccttcctctctcccacgctctcttttatctctcattttattcccttgttgatttctgttaacttgaaagatttgggattttttcccacctcatcatagatgggaacttttgttttcagtgcaaacaatgttggagctgtaatagtaagagctttcttacaaagctttgtattactgtgtggttttggtttttttggtggtgttatttgattttgatttttttttctttatgggatctttgggaaacacattcaaaatatatctcgtttctacttaaatgtagtgcttagggttaatttttgtactgaagtctttattgggggtgcntgctacgggaaccagttttgnccaaaacttaatcaaaatactgggcttactgaaactntgttatactagcctctgnccctcccgagaagactgttggattgaacaaataatatgtattttgatttacttaaaagggcttggaaatgtcttaagggccctgccacttttgactgtggatcagttgatgtacactagtattattaaagcactcattaatcccgatgcggccgcttcctttagggagggtaattatgatcctggttacttgactcttggc

SEQ ID NO: 297188 - DNA, 1173 bp, Homo sapiens
  misc_feature (896)..(896): n is a, c, g, or t
  misc_feature (917)..(917): n is a, c, g, or t
  misc_feature (954)..(954): n is a, c, g, or t
  misc_feature (972)..(972): n is a, c, g, or t
catttgtatgtcttatttcagtgctggacccaaaggagacaacatttatgaatggaggtcaactatattgggacccccaggatctgtctatgaaggaggggtgttctttcttgacattaccttttcaccagactatccgtttaaaccccctaaggttaccttccgaacaagaatctatcactgtaatattaacagccaaggtgtgatctgtctggacatcttaaaggacaactggagtccggctttaactatttctaaagttctcctctccatctgctcacttcttacagattgcaaccctgctgaccctctggtgggcagcatcgccacacagtacatgaccaacagagcagagcatgaccggatggccagacagtggaccaagcggtacgccacataggggcctgctgcctgccgccccgcgggacctgtgcaagcacattcaccaagtgcatcggtagccctgcccacccctccagacctcggttcttattttcctatttttattaaatttggaaccattttgtgatggtatgttgtccatcttcccatcccagttcttcctgccccccttcctctctcccacgctctcttttatctctcattttattcccttgttgatttctgttaacttgaaagatttgggattttttcccacctcatcatagatgggaacttttgttttcagtgcaaacaatgttggagctgtaatagtaagagctttcttacaaagctttgtattactgtgtggttttggtttttttggtggtgttatttgattttgatttttttttctttatgggatctttgggaaacacattcaaaatatatctcgtttctacttaaatgtagtgcttagggttaatttttgtactgaagtctttattgggggtgcntgctacgggaaccagttttgnccaaaacttaatcaaaatactgggcttactgaaactntgttatactagcctctgnccctcccgagaagactgttggattgaacaaataatatgtattttgatttacttaaaagggcttggaaatgtcttaagggccctgccacttttgactgtggatcagttgatgtacactagtattattaaagcactcattaatcccgatgcggccgcttcctttagggagggtaattatgatcctggttacttgactcttggc

SEQ ID NO: 297189 - DNA, 1617 bp, Homo sapiens
  misc_feature (1340)..(1340): n is a, c, g, or t
  misc_feature (1361)..(1361): n is a, c, g, or t
  misc_feature (1398)..(1398): n is a, c, g, or t
  misc_feature (1416)..(1416): n is a, c, g, or t
cgcggcgccgcatggccgacgtggggctcgcgctctcgcggtctctcccgggcgggcgcgcaggcacgcgcactcgcgggtgcgcgcgcggacggccgggcggcggcggctcccggaggtggtggcttcactttccaggactcaggggcagccacagcgacagccgcgggcagcagcctcaggagccggagctggaacggccgggggcggcggcagcggcggcgctgagggatctaaaatgtccactgaggcacaaagagttgatgacagtccaagcactagtggaggaagttccgatggagatcaacgtgaaagtgttcagcaagaaccagaaagagaacaagttcagcccaagaaaaaggagggaaaaatatccagcaaaaccgctgctaaattgtcaactagtgctaaaagaattcagaaggaacttgcagaaatcacattggaccctcctcccaactgtagtgctggacccaaaggagacaacatttatgaatggaggtcaactatattgggacccccaggatctgtctatgaaggaggggtgttctttcttgacattaccttttcaccagactatccgtttaaaccccctaaggttaccttccgaacaagaatctatcactgtaatattaacagccaaggtgtgatctgtctggacatcttaaaggacaactggagtccggctttaactatttctaaagttctcctctccatctgctcacttcttacagattgcaaccctgctgaccctctggtgggcagcatcgccacacagtacatgaccaacagagcagagcatgaccggatggccagacagtggaccaagcggtacgccacataggggcctgctgcctgccgccccgcgggacctgtgcaagcacattcaccaagtgcatcggtagccctgcccacccctccagacctcggttcttattttcctatttttattaaatttggaaccattttgtgatggtatgttgtccatcttcccatcccagttcttcctgccccccttcctctctcccacgctctcttttatctctcattttattcccttgttgatttctgttaacttgaaagatttgggattttttcccacctcatcatagatgggaacttttgttttcagtgcaaacaatgttggagctgtaatagtaagagctttcttacaaagctttgtattactgtgtggttttggtttttttggtggtgttatttgattttgatttttttttctttatgggatctttgggaaacacattcaaaatatatctcgtttctacttaaatgtagtgcttagggttaatttttgtactgaagtctttattgggggtgcntgctacgggaaccagttttgnccaaaacttaatcaaaatactgggcttactgaaactntgttatactagcctctgnccctcccgagaagactgttggattgaacaaataatatgtattttgatttacttaaaagggcttggaaatgtcttaagggccctgccacttttgactgtggatcagttgatgtacactagtattattaaagcactcattaatcccgatgcggccgcttcctttagggagggtaattatgatcctggttacttgactcttggc

SEQ ID NO: 297190 - DNA, 840 bp, Homo sapiens
  misc_feature (563)..(563): n is a, c, g, or t
  misc_feature (584)..(584): n is a, c, g, or t
  misc_feature (621)..(621): n is a, c, g, or t
  misc_feature (639)..(639): n is a, c, g, or t
gctttgctggactgactctcttaactaccatcgctacacgatctaaaatgtccactgaggcacaaagagttgatgacagtccaagcactagtggaggaagttccgatggagatcaacgtgaaagtgttcagcaagaaccagaaagagaacaagttcttattttcctatttttattaaatttggaaccattttgtgatggtatgttgtccatcttcccatcccagttcttcctgccccccttcctctctcccacgctctcttttatctctcattttattcccttgttgatttctgttaacttgaaagatttgggattttttcccacctcatcatagatgggaacttttgttttcagtgcaaacaatgttggagctgtaatagtaagagctttcttacaaagctttgtattactgtgtggttttggtttttttggtggtgttatttgattttgatttttttttctttatgggatctttgggaaacacattcaaaatatatctcgtttctacttaaatgtagtgcttagggttaatttttgtactgaagtctttattgggggtgcntgctacgggaaccagttttgnccaaaacttaatcaaaatactgggcttactgaaactntgttatactagcctctgnccctcccgagaagactgttggattgaacaaataatatgtattttgatttacttaaaagggcttggaaatgtcttaagggccctgccacttttgactgtggatcagttgatgtacactagtattattaaagcactcattaatcccgatgcggccgcttcctttagggagggtaattatgatcctggttacttgactcttggc

SEQ ID NO: 297191 - DNA, 1628 bp, Homo sapiens
  misc_feature (1351)..(1351): n is a, c, g, or t
  misc_feature (1372)..(1372): n is a, c, g, or t
  misc_feature (1409)..(1409): n is a, c, g, or t
  misc_feature (1427)..(1427): n is a, c, g, or t
caggcgtggtcgggtgcgtggtgcgtgggtccggctttcggtgactagacggtccgcagggacatcccgtccctggggcctccccagtctccctccccctcgcgcctgggcagctctctcccagggcttcggctcgagcctgcgacctgcacggacacccccccctcaggatctaaaatgtccactgaggcacaaagagttgatgacagtccaagcactagtggaggaagttccgatggagatcaacgtgaaagtgttcagcaagaaccagaaagagaacaagttcagcccaagaaaaaggagggaaaaatatccagcaaaaccgctgctaaattgtcaactagtgctaaaagaattcagaaggaacttgcagaaatcacattggaccctcctcccaactgtagcaccaacataacactgaaaggaaatgctcattcaattctcaattggatttttggattttggatgcccactagtgctggacccaaaggagacaacatttatgaatggaggtcaactatattgggacccccaggatctgtctatgaaggaggggtgttctttcttgacattaccttttcaccagactatccgtttaaaccccctaaggttaccttccgaacaagaatctatcactgtaatattaacagccaaggtgtgatctgtctggacatcttaaaggacaactggagtccggctttaactatttctaaagttctcctctccatctgctcacttcttacagattgcaaccctgctgaccctctggtgggcagcatcgccacacagtacatgaccaacagagcagagcatgaccggatggccagacagtggaccaagcggtacgccacataggggcctgctgcctgccgccccgcgggacctgtgcaagcacattcaccaagtgcatcggtagccctgcccacccctccagacctcggttcttattttcctatttttattaaatttggaaccattttgtgatggtatgttgtccatcttcccatcccagttcttcctgccccccttcctctctcccacgctctcttttatctctcattttattcccttgttgatttctgttaacttgaaagatttgggattttttcccacctcatcatagatgggaacttttgttttcagtgcaaacaatgttggagctgtaatagtaagagctttcttacaaagctttgtattactgtgtggttttggtttttttggtggtgttatttgattttgatttttttttctttatgggatctttgggaaacacattcaaaatatatctcgtttctacttaaatgtagtgcttagggttaatttttgtactgaagtctttattgggggtgcntgctacgggaaccagttttgnccaaaacttaatcaaaatactgggcttactgaaactntgttatactagcctctgnccctcccgagaagactgttggattgaacaaataatatgtattttgatttacttaaaagggcttggaaatgtcttaagggccctgccacttttgactgtggatcagttgatgtacactagtattattaaagcactcattaatcccgatgcggccgcttcctttagggagggtaattatgatcctggttacttgactcttggc

SEQ ID NO: 297192 - DNA, 1689 bp, Homo sapiens
  misc_feature (1412)..(1412): n is a, c, g, or t
  misc_feature (1433)..(1433): n is a, c, g, or t
  misc_feature (1470)..(1470): n is a, c, g, or t
  misc_feature (1488)..(1488): n is a, c, g, or t
cgcggcgccgcatggccgacgtggggctcgcgctctcgcggtctctcccgggcgggcgcgcaggcacgcgcactcgcgggtgcgcgcgcggacggccgggcggcggcggctcccggaggtggtggcttcactttccaggactcaggggcagccacagcgacagccgcgggcagcagcctcaggagccggagctggaacggccgggggcggcggcagcggcggcgctgagggatctaaaatgtccactgaggcacaaagagttgatgacagtccaagcactagtggaggaagttccgatggagatcaacgtgaaagtgttcagcaagaaccagaaagagaacaagttcagcccaagaaaaaggagggaaaaatatccagcaaaaccgctgctaaattgtcaactagtgctaaaagaattcagaaggaacttgcagaaatcacattggaccctcctcccaactgtagcaccaacataacactgaaaggaaatgctcattcaattctcaattggatttttggattttggatgcccactagtgctggacccaaaggagacaacatttatgaatggaggtcaactatattgggacccccaggatctgtctatgaaggaggggtgttctttcttgacattaccttttcaccagactatccgtttaaaccccctaaggttaccttccgaacaagaatctatcactgtaatattaacagccaaggtgtgatctgtctggacatcttaaaggacaactggagtccggctttaactatttctaaagttctcctctccatctgctcacttcttacagattgcaaccctgctgaccctctggtgggcagcatcgccacacagtacatgaccaacagagcagagcatgaccggatggccagacagtggaccaagcggtacgccacataggggcctgctgcctgccgccccgcgggacctgtgcaagcacattcaccaagtgcatcggtagccctgcccacccctccagacctcggttcttattttcctatttttattaaatttggaaccattttgtgatggtatgttgtccatcttcccatcccagttcttcctgccccccttcctctctcccacgctctcttttatctctcattttattcccttgttgatttctgttaacttgaaagatttgggattttttcccacctcatcatagatgggaacttttgttttcagtgcaaacaatgttggagctgtaatagtaagagctttcttacaaagctttgtattactgtgtggttttggtttttttggtggtgttatttgattttgatttttttttctttatgggatctttgggaaacacattcaaaatatatctcgtttctacttaaatgtagtgcttagggttaatttttgtactgaagtctttattgggggtgcntgctacgggaaccagttttgnccaaaacttaatcaaaatactgggcttactgaaactntgttatactagcctctgnccctcccgagaagactgttggattgaacaaataatatgtattttgatttacttaaaagggcttggaaatgtcttaagggccctgccacttttgactgtggatcagttgatgtacactagtattattaaagcactcattaatcccgatgcggccgcttcctttagggagggtaattatgatcctggttacttgactcttggc

SEQ ID NO: 297193 - DNA, 924 bp, Homo sapiens
tcaggatggcttgcactgaagctaacctgacatgtgtttcagaactccctgtgggctggacccaggaatatatactctggtcaatggagcggagccttcaacagatcttccgatacctagaaagcgcaagatcaaggcttgtggaacaggatttgcctgaatcacaggatatgatttcttcctctaccacctctgttcttgtggctcagaagactgttctatgctgttgtgactataagaaagcaaaacattctactgaccacagcatctcctttagttcatcatgcaatgactccagtctgtctcatcttcctgtcttttctgaaggaacaacttgggaattccggagccatagtttacctatttcccacaaaaagcaatcctctgtgttcaggaaccaaggcagaaccctgcctctttttcagctctcagagccccagaaatcaaaaatttttcagaatttggcagatctttcacccttacaacctcagagctcttttatcaactctatttctgaacccctaaatatctgcaaacaaaaaaggaaaaaaaatgatgagagaatgagcaagagtcatttgacatcagatcatgagccaaattctgtttccaaggagagaccacgacttccaaggtgggctacattcaagctctctccttcagttagaagggagctagaaggacatatgtctcagaaggtttttgctttgcggcaacaaacagcacctttacctttgaggaaatcatgggcaatgctgaattatataactgaagtacaaggaggagttgctgaatcagagaaaccccaaactcagttatctatgcccattcatcaaaacactgagcaaaatatcaacaacaaatcctcagaccttccatcatttcagctccatgtgaatgctggagtgggatctggatcaaata

SEQ ID NO: 297194 - DNA, 913 bp, Homo sapiens
agaaactttttttttttttcaaattctccttcaggccaaaaatattttgcatttgaaatggccacttttttcgttttcctatttcaatgcaaactgaaacatttctctttatttcttagatcaaggcttgtggaacaggatttgcctgaatcacaggatatgatttcttcctctaccacctctgttcttgtggctcagaagactgttctatgctgttgtgactataagaaagcaaaacattctactgaccacagcatctcctttagttcatcatgcaatgactccagtctgtctcatcttcctgtcttttctgaaggaacaacttgggaattccggagccatagtttacctatttcccacaaaaagcaatcctctgtgttcaggaaccaaggcagaaccctgcctctttttcagctctcagagccccagaaatcaaaaatttttcagaatttggcagatctttcacccttacaacctcagagctcttttatcaactctatttctgaacccctaaatatctgcaaacaaaaaaggaaaaaaaatgatgagagaatgagcaagagtcatttgacatcagatcatgagccaaattctgtttccaaggagagaccacgacttccaaggtgggctacattcaagctctctccttcagttagaagggagctagaaggacatatgtctcagaaggtttttgctttgcggcaacaaacagcacctttacctttgaggaaatcatgggcaatgctgaattatataactgaagtacaaggaggagttgctgaatcagagaaaccccaaactcagttatctatgcccattcatcaaaacactgagcaaaatatcaacaacaaatcctcagaccttccatcatttcagctccatgtgaatgctggagtgggatctggatcaaata

SEQ ID NO: 297195 - DNA, 402 bp, Homo sapiens
aacatttttgtatagaaatgggtttttgccagattacccagtctggtcttgaactcctggcctcaggcgatctgtccgcctcagcctcccagagtgctgcaattacaggcatgagccatcgcgacggacaacctcttgcggccctggcttcatcccttctaaggctgtccaccaggagcccggtgctaggggaagcatccccaggcctgactgagcggcaggggagcacggcccgtgggtttgattgtattactctgttccactggttctaagacgcagagcttctcacatctcaatcaggatgcttctctccattggtagcactttagagtccatgaaatatggtaaaaaatatatatatatcataataaatgacagctgatgttcatggaaaaaaaaaaa

SEQ ID NO: 297196 - DNA, 986 bp, Homo sapiens
actcattccattcacagactcttgttgggcagcagccacccgctcacctccatccccaggacttagagggacgcagggcgttgggaacagaggacactccaggcgctgaccctgggaggccaggaccaggccaaagtcccgtgggcaagaggagtcctcagaggtccttcattcagcggttccgggaggtctgggaagcccacggcctggctggggcagggtcaacgccgccaggccgccatggtcctgtgctggctgctgcttctggtgatggctctgcccccaggcacgacgggcgtcaaggactgcgtcttctgtgagctcaccgactccatgcagtgtcctggtacctacatgcactgtggcgatgacgaggactgcttcacaggccacggggtcgccccgggcactggtccggtcatcaacaaaggctgcctgcgagccaccagctgcggccttgaggaacccgtcagctacaggggcgtcacctacagcctcaccaccaactgctgcaccggccgcctgtgtaacagagccccgagcagccagacagtgggggccaccaccagcctggcactggggctgggtatgctgcttcctccacgtttgctgtgaccaacagggaggacagggcctgggactgttctcccagatccgccactccccatgtccccatgtccttcccccactaaatggccagagaggccctggacaacctcttgcggccctggcttcatcccttctaaggctgtccaccaggagcccggtgctaggggaagcatccccaggcctgactgagcggcaggggagcacggcccgtgggtttgattgtattactctgttccactggttctaagacgcagagcttctcacatctcaatcaggatgcttctctccattggtagcactttagagtccatgaaatatggtaaaaaatatatatatatcataataaatgacagctgatgttcatggaaaaaaaaaaa

SEQ ID NO: 297197 - DNA, 2424 bp, Homo sapiens
gcaggactgccaccccaggccccgtgggaggcctgctgagggcacagagctgctcggtgcagccttcatgctttgatctggaaagagcagctgtccgcaggcctctgtctccaagaggcctgtcacacaggaggaccgctggaaacataccaacacgtgcagtctcccctccaagctattcatgctgtttgtggaatctctctcaaacataagtgtcaggtgtgtgtcgtcccaacgggtcctgtgctgtgaatagatccatgtgcagcacaaagggaatgtggcacgtggccccaggaagagttcacccggccagggggcagttgttcagttgcctggggctgacactgaccactggcctctggggtgtcctgcagcccaaatgcccaccttgccctcctcacatctcagtcaggggaggccatgcccaagccaatgtgctgtcacagcctgcagcgggggcagcacttcctcggagggcctgggaggtgctggggatgccccagcgcttctcttcctgcctcgccctggcatggcccagcgcctctaggatcaacttacgatccgtggagcagccccgggaaacccaaatctggctcaggacagcgtacgggcaggagggctgtaaatcatcccaggctaagcctccgtgggcactggctcctgccgcagcctggctatggactcagttagaaccaggtagaaagtcagcgacaccccacagaaggccactgcggctaggtaaacacctgagaaagaaactgctccagaagagatgacgtgggcttccaggagcatggaggaggtggcacttgaacttttaggaaactccttagatgagataaagtgggggttggaggtggcgaaaagagggtaaccctgggaaagtcagtcagaacccatggcagaagactgcaggagaggcaggggaggggcttcggggaccactgtggacagagctctgaaagcaccctggccaaagcccctcctgaggtgacagagcgtgggaggaggctgcactgggcctgcgtgccatcctcacccctgttccccgctggcgccaggccctgccttcttggtacctgtgccaacaggaggagccctcaccagccgatcttgtcactctccgtggtgacagtgtcttggccagctgtggcccctagtttctagcagcgtttctcagtgtccttggcccttctgagaaggcaggcgggaggcacacggtgccctggttcttccccgtttgtccagttgcttgcaaagcagagaatgagtaggagtgaacccgagtgacttcacccgccctgtcccccacgtcaggacaggcttgaggcctctctgggcgtgagcgaggaaaccaggctgctctaacttctgaagagtgggctctggctcaagactccaatcggccagaagcccacagagatcaaagcactagcaagttcagctgtcctggccctcgggtagaacccacgggcgtgcctgggtgcggctccacccacatgccccactgtcagcccaggcaggagccttcctggccgggctcaggatctgcctgcagcccagccaggccatcacccagccccgatgcatcctggcactgcacgcttactcttcacaagcacttatacgcggatggcctccgagaccctgcctccctggtctgctgaggtcaggccaggtctcccacggagccgggcagctccacaccccaccacctggcaccgttaggtttcagatctcccgtgtggtgtttgatgtcggcttttgttcctaccttgggagtttggattgtttcctctggtgtctttgtttaccttcctcactgttctacctcctggccaggtctcagcttagcttccctggtgtggggtgtttttcaagccttccagccacagctgtctcccctcaggctggacggctccggggtgacagggcttcaccctctgcctgcagacccctggtgggcacatctcacaggcttccgtcttgctgagttgggtacggaggcagaagtggggtgtggaggaaagtcagagggaaatctgcttcagaaaggaagggtctttagacacaaagactggaggcccttccccgcccgcacgggagctgccatcgtgggtctcatgcacgtcaagaccttcccacatccaaactcagcttccagcagggattttgactttggatgacaaggctttatttgtaaatatgctcttaatatgcaactttgagaataaaatagaaacatcatgtattttaaaatataagatgaagtgtgacgcactgtatacaatttaatatatatttttagggttttgttatttaagaaaatggaatgtaatggtacttttacaaaagagaaaaaatgttatttttactttctggaaaaaataaatattctcattgttgtagaaagaaaaaaag

SEQ ID NO: 297198 - DNA, 1066 bp, Homo sapiens
aataaataaataaaagtttctcgtgtattttctaatccccacaaagaaactgtaagctcccagagagaaggaggtgggcctgtgattcctctgtcgctcccttagggctccaggtggagctgactggctgcttttgggagatgggctgggcacgacttctctgcctgggagtattgaaaagatagactctgggctcatggggttggcgcaggcagctgggagagctgaggcagccagagaccacaaacggcaccgtgagctgggtggagctggccttgtgggaaggaagcaaggcctgctgttaagggtctctctgagcttttccacatttccaatttcccatggataatccatcatgttcatctgtactttttgtctccatatcatgtggacaggttctaacattcccatggaccagccctgctgtcgtggtctctatgactttgagccagaaaaccaaggagaattaggatttaaagaaggggacatcattacattaaccaatcaaatagatgaaaactggtatgaaggaatgatacacggagaatcgggattcttccccattaattacgtggaagtgatcgtgcctttacctcagtaaatgtgtaacacaaactctggacatactttcgtaactgaaatgaattcacaccagtgtgctctcagtgcggtgttctgtgacatcctttgctctctgaccaacttaatgacttttgtatgtgtgctctctttataatgtattttatatcactttaatttgtataaatgattttcttgtccttgctacatgaaaatattgttttcttttttgcttcctgtcctaaaagtcattggttaaatgtatttgcttcctgtggctaaaaataagtctcacccattgcagttatgtcaacgaatggcctatattcctcagctgcaatgaaatggtaacatttgaaactaagaaatgctaaatattttgtttctcgacattcctgatgacgtctggtcttttcttttcattgtattttaagcttacctgtgaatagcccaataaacatgacacactgtgttggcaaaaggcctt

SEQ ID NO: 297199 - DNA, 1686 bp, Homo sapiens
agcgggtgcgtgtgcgagtgtgacagcggctgtggctgtggccgtggccgtgggaggcgggcccggcggagcccagccgcggggggaccggcccgggctcccgctccccgagcgcgtcgcggccgcgtggcccagccgagccttgagaccaccccgcccctgccggtcgcagtcgcgatgtcggtggccgggctgaagaagcagttccacaaagccagccagctatttagtgaaaaaataagtggtgctgaaggaactaaactagacgatgaatttcttgacatggaaaggaaaatagatgttaccaataaagttgttgcagaaattctttcaaaaaccactgaatatcttcagccaaatccagcatacagagctaagctaggaatgctgaacactgtgtcgaagatccgagggcaggtgaagaccacaggatacccgcagacggaaggcttgctgggggactgtatgctgaaatacgggaaggagctcggggaagactccacctttggcaatgcattgatagaagttggtgaatccatgaagctaatggctgaggtgaaagactctcttgatattaatgtaaagcaaacttttattgatccacttcagttactacaagataaagatttaaaagagatcgggcatcacctgaaaaagctggaaggccgccgcctggattacgattataaaaagaaacgagtaggtaagataccagacgaagaagtcagacaagcggtagaaaaatttgaagagtcaaaggagttggctgaaagaagcatgtttaactttttagaaaatgatgtagaacaagtcagccagttggctgtgttcatagaggcagcattagactatcacagacagtccacagagattctgcaggagctgcagagcaagctacagatgcgaatatcagctgcatccagtgtccccagacgagaatacaagccaaggcctgtgaaaaggagttctagtgagctcaatggagtttccaccacctctgtagtgaagacgacaggttctaacattcccatggaccagccctgctgtcgtggtctctatgactttgagccagaaaaccaaggagaattaggatttaaagaaggggacatcattacattaaccaatcaaatagatgaaaactggtatgaaggaatgatacacggagaatcgggattcttccccattaattacgtggaagtgatcgtgcctttacctcagtaaatgtgtaacacaaactctggacatactttcgtaactgaaatgaattcacaccagtgtgctctcagtgcggtgttctgtgacatcctttgctctctgaccaacttaatgacttttgtatgtgtgctctctttataatgtattttatatcactttaatttgtataaatgattttcttgtccttgctacatgaaaatattgttttcttttttgcttcctgtcctaaaagtcattggttaaatgtatttgcttcctgtggctaaaaataagtctcacccattgcagttatgtcaacgaatggcctatattcctcagctgcaatgaaatggtaacatttgaaactaagaaatgctaaatattttgtttctcgacattcctgatgacgtctggtcttttcttttcattgtattttaagcttacctgtgaatagcccaataaacatgacacactgtgttggcaaaaggcctt

SEQ ID NO: 297200 - DNA, 1633 bp, Homo sapiens
agcgggtgcgtgtgcgagtgtgacagcggctgtggctgtggccgtggccgtgggaggcgggcccggcggagcccagccgcggggggaccggcccgggctcccgctccccgagcgcgcagtcgcgatgtcggtggccgggctgaagaagcagttccacaaagccagccagctatttagtgaaaaaataagtggtgctgaaggaactaaactagacgatgaatttcttgacatggaaaggaaaatagatgttaccaataaagttgttgcagaaattctttcaaaaaccactgaatatcttcagccaaatccagcatacagagctaagctaggaatgctgaacactgtgtcgaagatccgagggcaggtgaagaccacaggatacccgcagacggaaggcttgctgggggactgtatgctgaaatacgggaaggagctcggggaagactccacctttggcaatgcattgatagaagttggtgaatccatgaagctaatggctgaggtgaaagactctcttgatattaatgtaaagcaaacttttattgatccacttcagttactacaagataaagatttaaaagagatcgggcatcacctgaaaaagctggaaggccgccgcctggattacgattataaaaagaaacgagtaggtaagataccagacgaagaagtcagacaagcggtagaaaaatttgaagagtcaaaggagttggctgaaagaagcatgtttaactttttagaaaatgatgtagaacaagtcagccagttggctgtgttcatagaggcagcattagactatcacagacagtccacagagattctgcaggagctgcagagcaagctacagatgcgaatatcagctgcatccagtgtccccagacgagaatacaagccaaggcctgtgaaaaggagttctagtgagctcaatggagtttccaccacctctgtagtgaagacgacaggttctaacattcccatggaccagccctgctgtcgtggtctctatgactttgagccagaaaaccaaggagaattaggatttaaagaaggggacatcattacattaaccaatcaaatagatgaaaactggtatgaaggaatgatacacggagaatcgggattcttccccattaattacgtggaagtgatcgtgcctttacctcagtaaatgtgtaacacaaactctggacatactttcgtaactgaaatgaattcacaccagtgtgctctcagtgcggtgttctgtgacatcctttgctctctgaccaacttaatgacttttgtatgtgtgctctctttataatgtattttatatcactttaatttgtataaatgattttcttgtccttgctacatgaaaatattgttttcttttttgcttcctgtcctaaaagtcattggttaaatgtatttgcttcctgtggctaaaaataagtctcacccattgcagttatgtcaacgaatggcctatattcctcagctgcaatgaaatggtaacatttgaaactaagaaatgctaaatattttgtttctcgacattcctgatgacgtctggtcttttcttttcattgtattttaagcttacctgtgaatagcccaataaacatgacacactgtgttggcaaaaggcctt

SEQ ID NO: 297201 - DNA, 2912 bp, Homo sapiens
agcgggtgcgtgtgcgagtgtgacagcggctgtggctgtggccgtggccgtgggaggcgggcccggcggagcccagccgcggggggaccggcccgggctcccgctccccgagcgcgtcgcggccgcgtggcccagccgagccttgagaccaccccgcccctgccggtcgcagtcgcgatgtcggtggccgggctgaagaagcagttccacaaagccagccagctatttagtgaaaaaataagtggtgctgaaggaactaaactagacgatgaatttcttgacatggaaaggaaaatagatgttaccaataaagttgttgcagaaattctttcaaaaaccactgaatatcttcagccaaatccagcatacagagctaagctaggaatgctgaacactgtgtcgaagatccgagggcaggtgaagaccacaggatacccgcagacggaaggcttgctgggggactgtatgctgaaatacgggaaggagctcggggaagactccacctttggcaatgcattgatagaagttggtgaatccatgaagctaatggctgaggtgaaagactctcttgatattaatgtaaagcaaacttttattgatccacttcagttactacaagataaagatttaaaagagatcgggcatcacctgaaaaagctggaaggccgccgcctggattacgattataaaaagaaacgagtaggtaagataccagacgaagaagtcagacaagcggtagaaaaatttgaagagtcaaaggagttggctgaaagaagcatgtttaactttttagaaaatgatgtagaacaagtcagccagttggctgtgttcatagaggcagcattagactatcacagacagtccacagagattctgcaggagctgcagagcaagctacagatgcgaatatcagctgcatccagtgtccccagacgagaatacaagccaaggcctgtgaaaaggagttctagtgagctcaatggagtttccaccacctctgtagtgaagacgacaggttctaacattcccatggaccagccctgctgtcgtggtctctatgactttgagccagaaaaccaaggagaattaggatttaaagaaggggacggcaccttcagaaaaatcaaaagggaaactaagattaaaatgtgcagaaagaaaattgtcaatatttacaaattaaaagatcagcaacattgattttctgtgtcgttgttatgaaagccttactagtggatgcaaagtggcatctcatttgggttttgccttgcattttattaatgaataatggtgtttagcatcttttcttttccttcttagacatttgtgtaacttctttgggagaaatgtctgttcaagtcctttgcctatttttttaattgggatcttagaaattctgttgttgagttgtgggatattaagcttttatcagatacacattttgattttatcagatacatattttctcacatattatgggttgccttttcactcccttgatagtatcctttgatttttattttgattaaatctaattttcgtgtattttcttttgttatctgtgcttttctgtcatatttcaaaatacacttaaaactcaaaggtcataaaggtttaccgtgtgttttcttctaagagttacatatttttagtccttacatttaagtcttttattaatttagaattaatttttgtatatactgcaaggtaggggtctaacttctctcttgtacactgacatccagctgttgaagagactgttctttcctcccttgactagacttggccaccttgttgaacagtcattgaccatatatgtgaggactaacttgtaggatctcaaatctgtcctattgtatttgtctgaaagtctattggtcttattccagtaccacactctcttgattactgtagatttgtagtagtctgtgaaactgaaaaatgtgagttttccaatgttctttttcaagactgttttgtctgtcagatcctttgaatttttgtatgattttagaatgagtttctttgtttctgcaaaaatgcctttgggattttgatggtattgcattgaatctgtagattactttagatggtattgtcatcttaacaatattgtcttacaacccgtgaacacagaatgtctttccacttatttccactctctttagttttttgcagcaatgttttgtgtataccaccatggttagatttatgcctgaataacgtattctttgatgtcattataaatggaatttttaaaatgttttcatagttctttacaactatatagaaatatagctcatttgcctatgtttgtttgcatcctgcctcctttattagttataatcggttttgtgttttgtttggagctttatacctataagatcatgtgtagatataattttacacctattttttatttctaatttagatgccttttatttctttgtcttgcctaattgctctggctagaactgccagtgctacgttgaatacaagtggcaaatgcaccatccttttcttctagatgttaggaaaacagctttcagtgtttcatcattgatcatgatattaactgttgggtttttgtacatcccattgtcatgttgcagaagatcccttctatgcctagtttatagagtatttttattatagaagggtgttgtatttcatcaatgttttctctgcagcaattgaaataatcacgtgcttattcattttactgttacagcatattacactgattgattttttatatgttgaaccacccatgcattttggggataaatctcaaagggtgatagtttacaatcctttgattatacagtattgctgctagtattttgctagtattgctagtattttgctgagatttttgcttatatattcataggggatatagtgctgtattt

SEQ ID NO: 297202 - DNA, 2199 bp, Homo sapiens
agcgggtgcgtgtgcgagtgtgacagcggctgtggctgtggccgtggccgtgggaggcgggcccggcggagcccagccgcggggggaccggcccgggctcccgctccccgagcgcgtcgcggccgcgtggcccagccgagccttgagaccaccccgcccctgccggtcgcagtcgcgatgtcggtggccgggctgaagaagcagttccacaaagccagccagtagagatgggtttcaccatgttggccaatatggtctcgatctcctgacctcgtgatccgcctgcctcggcctcccagagtgctgggattacaggtgtgagccactgtgcccagcctcttctctcactatccgtttctgacaaatgaaaaaaatggatgtgggtcctgcagaacctgaggccagctctaaccagtctttcatggatgcatacacctgcctgcaggcgctgctcccaggttatgaggctggttcttgggtttgactctgggaatcatgctcattgatctgcttttcctaatcatgtcagtgaatacctacacgtgaagaaaactcaagctgcaccataaagctaaaggaagaaggagcttttaagtgaataagaccattttcccaatgagcagtgtcataaacattgaggactctcttaaatcagaagatgaatgaatggatggaatctttgctgggataatatgcaatcaagctaataggtgccttacctggacctcccaacagctatttagtgaaaaaataagtggtgctgaaggaactaaactagacgatgaatttcttgacatggaaaggaaaatagatgttaccaataaagttgttgcagaaattctttcaaaaaccactgaatatcttcagccaaatccagcatacagagctaagctaggaatgctgaacactgtgtcgaagatccgagggcaggtgaagaccacaggatacccgcagacggaaggcttgctgggggactgtatgctgaaatacgggaaggagctcggggaagactccacctttggcaatgcattgatagaagttggtgaatccatgaagctaatggctgaggtgaaagactctcttgatattaatgtaaagcaaacttttattgatccacttcagttactacaagataaagatttaaaagagatcgggcatcacctgaaaaagctggaaggccgccgcctggattacgattataaaaagaaacgagtaggtaagataccagacgaagaagtcagacaagcggtagaaaaatttgaagagtcaaaggagttggctgaaagaagcatgtttaactttttagaaaatgatgtagaacaagtcagccagttggctgtgttcatagaggcagcattagactatcacagacagtccacagagattctgcaggagctgcagagcaagctacagatgcgaatatcagctgcatccagtgtccccagacgagaatacaagccaaggcctgtgaaaaggagttctagtgagctcaatggagtttccaccacctctgtagtgaagacgacaggttctaacattcccatggaccagccctgctgtcgtggtctctatgactttgagccagaaaaccaaggagaattaggatttaaagaaggggacatcattacattaaccaatcaaatagatgaaaactggtatgaaggaatgatacacggagaatcgggattcttccccattaattacgtggaagtgatcgtgcctttacctcagtaaatgtgtaacacaaactctggacatactttcgtaactgaaatgaattcacaccagtgtgctctcagtgcggtgttctgtgacatcctttgctctctgaccaacttaatgacttttgtatgtgtgctctctttataatgtattttatatcactttaatttgtataaatgattttcttgtccttgctacatgaaaatattgttttcttttttgcttcctgtcctaaaagtcattggttaaatgtatttgcttcctgtggctaaaaataagtctcacccattgcagttatgtcaacgaatggcctatattcctcagctgcaatgaaatggtaacatttgaaactaagaaatgctaaatattttgtttctcgacattcctgatgacgtctggtcttttcttttcattgtattttaagcttacctgtgaatagcccaataaacatgacacactgtgttggcaaaaggcctt

SEQ ID NO: 297203 - DNA, 1347 bp, Homo sapiens
agcgggtgcgtgtgcgagtgtgacagcggctgtggctgtggccgtggccgtgggaggcgggcccggcggagcccagccgcggggggaccggcccgggctcccgctccccgagcgcgtcgcggccgcgtggcccagccgagccttgagaccaccccgcccctgccggtcgcagtcgcgatgtcggtggccgggctgaagaagcagttccacaaagccagccagctatttagtgaaaaaataagtggtgctgaaggaactaaactagacgatgaatttcttgacatggaaaggaaaatagatgttaccaataaagttgttgcagaaattctttcaaaaaccactgaatatcttcagccaaatccagcatacagagctaagctaggaatgctgaacactgtgtcgaagatccgagggcaggtgaagaccacaggatacccgcagacggaaggcttgctgggggactgtatgctgaaatacgggaaggagctcggggaagactccacctttggcaatgcattgatagaagttggtgaatccatgaagctaatggctgaggtgaaagactctcttgatattaatgtaaagcaaacttttattgatccacttcagttactacaagataaagatttaaaagagatcgggcatcacctgaaaaagctggaaggccgccgcctggattacgattataaaaagaaacgagtaggtaagataccagacgaagaagtcagacaagcggtagaaaaatttgaagagtcaaaggagttggctgaaagaagcatgtttaactttttagaaaatgatgtagaacaagtcagccagttggctgtgttcatagaggcagcattagactatcacagacagtccacagagattctgcaggagctgcagagcaagctacagatgcggtaagcacctccacgtttcttacaagccaagggctgcggaggtaacatctattgaaatccatctgtctgtctctccatctctccatctcccccttcccctgcctcattctgttttgaattttctttcactggctttcatggttggatgtgggatgggactgagataataagtactggctttggccagtaggatagaactgggaaaagggacctggcagcttttctcctttttcttttcattaaatcccttttttttgtgacccgtgtttagggcaactaaccaagttgctctcccacctgggacatcaacccctacagaactaccctggcttcattgctgatttgatgagagtttaactccccattcacaaagggatggaaaacatccagagctatggaaaaaagtgagatgctgtatggaaaatatgtaaatatctgtaaa

SEQ ID NO: 297204 - DNA, 1254 bp, Homo sapiens
cttgatttggcttagctagaaagtgcgtgttgagacacttgacaaagtaggcagttcttttgctaaatgttggcttcgtttgtaactggaagagctttatctctctgttttcagatccatgagctttatagcatagaaaatctgctgagaaaaatcatcatctaattggaaatgtttttccagcatttatagctccataccatgacctgtatgattattatacagagctcctacatgaaattaaatgaaatggaccaaggcagacactggtcttccctgcaaagctaggtctttgctgctggtctcctctctctctggacattacacaggctcgggcctccatggaataattttgcacttctgctgcaggtagaacaagtcagccagttggctgtgttcatagaggcagcattagactatcacagacagtccacagagattctgcaggagctgcagagcaagctacagatgcgaatatcagctgcatccagtgtccccagacgagaatacaagccaaggcctgtgaaaaggagttctagtgagctcaatggagtttccaccacctctgtagtgaagacgacaggttctaacattcccatggaccagccctgctgtcgtggtctctatgactttgagccagaaaaccaaggagaattaggatttaaagaaggggacatcattacattaaccaatcaaatagatgaaaactggtatgaaggaatgatacacggagaatcgggattcttccccattaattacgtggaagtgatcgtgcctttacctcagtaaatgtgtaacacaaactctggacatactttcgtaactgaaatgaattcacaccagtgtgctctcagtgcggtgttctgtgacatcctttgctctctgaccaacttaatgacttttgtatgtgtgctctctttataatgtattttatatcactttaatttgtataaatgattttcttgtccttgctacatgaaaatattgttttcttttttgcttcctgtcctaaaagtcattggttaaatgtatttgcttcctgtggctaaaaataagtctcacccattgcagttatgtcaacgaatggcctatattcctcagctgcaatgaaatggtaacatttgaaactaagaaatgctaaatattttgtttctcgacattcctgatgacgtctggtcttttcttttcattgtattttaagcttacctgtgaatagcccaataaacatgacacactgtgttggcaaaaggcctt

SEQ ID NO: 297205 - DNA, 873 bp, Homo sapiens
cccagcctacagcagactggaaccagcagattaggaaggcccaagggactgcttcgggaaggccattgacagcaggaaaaagtgacaggtcgcagccagactacaagggaggcaagagaaaaactataaaaagcaggaacaaaaacactcaaaagacacagcagtctgggggatttactaaaagacaaagagccctactcaggttctaacattcccatggaccagccctgctgtcgtggtctctatgactttgagccagaaaaccaaggagaattaggatttaaagaaggggacatcattacattaaccaatcaaatagatgaaaactggtatgaaggaatgatacacggagaatcgggattcttccccattaattacgtggaagtgatcgtgcctttacctcagtaaatgtgtaacacaaactctggacatactttcgtaactgaaatgaattcacaccagtgtgctctcagtgcggtgttctgtgacatcctttgctctctgaccaacttaatgacttttgtatgtgtgctctctttataatgtattttatatcactttaatttgtataaatgattttcttgtccttgctacatgaaaatattgttttcttttttgcttcctgtcctaaaagtcattggttaaatgtatttgcttcctgtggctaaaaataagtctcacccattgcagttatgtcaacgaatggcctatattcctcagctgcaatgaaatggtaacatttgaaactaagaaatgctaaatattttgtttctcgacattcctgatgacgtctggtcttttcttttcattgtattttaagcttacctgtgaatagcccaataaacatgacacactgtgttggcaaaaggcctt

SEQ ID NO: 297206 - DNA, 772 bp, Homo sapiens
tggacagcccagggtcaggggtttcagccgcctgttcaaggacaccgagatccacagcagccacctgggagctcctacacaactatgcccagcgattccaggttctaacattcccatggaccagccctgctgtcgtggtctctatgactttgagccagaaaaccaaggagaattaggatttaaagaaggggacatcattacattaaccaatcaaatagatgaaaactggtatgaaggaatgatacacggagaatcgggattcttccccattaattacgtggaagtgatcgtgcctttacctcagtaaatgtgtaacacaaactctggacatactttcgtaactgaaatgaattcacaccagtgtgctctcagtgcggtgttctgtgacatcctttgctctctgaccaacttaatgacttttgtatgtgtgctctctttataatgtattttatatcactttaatttgtataaatgattttcttgtccttgctacatgaaaatattgttttcttttttgcttcctgtcctaaaagtcattggttaaatgtatttgcttcctgtggctaaaaataagtctcacccattgcagttatgtcaacgaatggcctatattcctcagctgcaatgaaatggtaacatttgaaactaagaaatgctaaatattttgtttctcgacattcctgatgacgtctggtcttttcttttcattgtattttaagcttacctgtgaatagcccaataaacatgacacactgtgttggcaaaaggcctt

SEQ ID NO: 297207 - DNA, 1558 bp, Homo sapiens
gggcttccgtccattcttccggtggagatggctgcggccgtggcggggatgctgcgagggggtctcctgccccaggcgggccggctgcctaccctccagactgtccgctatggctccaaggctgttacccgccaccgtcgtgtgatgcactttcagcggcagaagctgatggctgtgactgaatatatccccccgaaaccagccatccacccatcatgcctgccatctcctcccagccccccacaggaggagataggcctcatcaggcttctccgccgggagatagcagcagttttccaggacaaccgaatgatagccgtctgccagaatgtggctctgagtgcagaggacaagcttcttatgcgacaccagctgcggaaacacaagatcctgatgaaggtcttccccaaccaggtcctgaagcccttcctggaggattccaagtaccaaaatctgctgcccctttttgtggggcacaacatgctgctggtcagtgaagagcccaaggtcaaggagatggtacggatcttaaggactgtgccattcctgccgctgctaggtggctgcattgatgacaccatcctcagcaggcagggctttatcaactactccaagctccccagcctgcccctggtgcagggggagcttgtaggaggcctcacctgcctcacagcccagacccactccctgctccagcaccagcccctccagctgaccaccctgttggaccagtacatcagagagcaacgcgagaaggattctgtcatgtcggccaatgggaagccagatcctgacactgttccggactcgtagccagcctgtttagccagccctgcgcataaatacactctgcgttattggctgtgctctcctcaatgggacatgtggaagaacttggggtcggggagtgtgtttgtcacttggttttcactagtaatgatattgtcaggtatagggccacttggagatgcagaggattccatttcagatgtcagtcaccggcttcgtccttagttttcccaacttgggacgtgataggagcaaagtctctccattctccaggtccaaggcagagatcctgaaaagatagggctattgtcccctgcctccttggtcactgcctcttgctgcacgggctcctgagcccacccccttggggcacaacctgccactgccacagtagctcaaccaagcagttgtgctgagaatggcacctggtgagagcctgctgtgtgccaggctttgtgctgagtgctgtacatgtattagttcctttactgctgaccacattgtacccatttcacagagaaggagcagagaaattaagtggcttgctcaaggtcatgcagttagtaagtggcagaacagggacttgaaccaagccctctgctctgaagaccgcgtcctgaatttcttcactagagcttcctcatcaggttacccagaagtgggtcccatccaccatccaggtgtgcttggatgttagttctccaccctcgaggtgtacgctgtgaaaagtttgggagcactgctttataataaaatgaaatatattcta

SEQ ID NO: 297208 - DNA, 1704 bp, Homo sapiens
gggcttccgtccattcttccggtggagatggctgcggccgtggcggggatgctgcgagggggtctcctgccccaggcgggccggctgcctaccctccagactgtccgctatggctccaaggctgttacccgccaccgtcgtgtgatgcactttcagcggcagaagctgatggctgtgactgaatatatccccccgaaaccagccatccacccatcatgcctgccatctcctcccagccccccacaggaggagataggcctcatcaggcttctccgccgggagatagcagcagttttccaggacaaccgaatgatagccgtctgccagaatgtggctctgagtgcagaggacaagcttcttatgcgacaccagctgcggaaacacaagatcctgatgaaggtcttccccaaccaggtcctgaagcccttcctggaggattccaagtaccaaaatctgctgcccctttttgtggggcacaacatgctgctggtcagtgaagagcccaaggtcaaggagatggtacggatcttaaggactgtgccattcctgccgctgctaggtggctgcattgatgacaccatcctcagcaggcagggctttatcaactactccaagctccccagcctgcccctggtgcagggggagcttgtaggaggcctcacctgcctcacagcccagacccactccctgctccagcaccagcccctccagctgaccaccctgttggaccagtacatcagagagcaacgcgagaaggattctgtcatgtcggccaatgggaagccagatcctgacactgttccggactcgtagccagcctgtttagccagccctgcgcataaatacactctgcgttattggctgtgctctcctcaatgggacatgtggaagaacttggggtcggggagtgtgtttgtcacttggttttcactagtaatgatattgtcaggtatagggccacttggagatgcagaggattccatttcagatgtcagtcaccggcttcgtccttagttttcccaacttgggacgtgataggagcaaagtctctccattctccaggtccaaggcagagatcctgaaaagatagggctattgtcccctgcctccttggtcactgcctcttgctgcacgggctcctgagcccacccccttggggcacaacctgccactgccacagtagctcaaccaagcagttgtgctgagaatggcacctggtgagagcctgctgtgtgccaggctttgtgctgagtgctgtacatgtattagttcctttactgctgaccacattgtacccatttcacagagaaggagcagagaaattaagtggcttgctcaaggtcatgcagttagtaagtggcagaacagggacttgaaccaagccctctgctctgaagaccgcgtcctgaatttcttcactagagcttcctcatcaggttacccagaagtgggtcccatccaccatccaggtgtgcttggatgttagttctccaccctcgaggtgtacgctgtgaaaagtttgggagcactgctttataataaaatgaaatatattctaaaaaaaaaaaaaagggggcgcggctaaaataaccccgaggggcaagttaacggttccacgttttgtacaagggcccaagagcgaattagaagggggcgcgtaaaaagttgcggccacagcacgggcctggggaccacctgggggaa

SEQ ID NO: 297209 - DNA, 1535 bp, Homo sapiens
gggcttccgtccattcttccggtggagatggctgcggccgtggcggggatgctgcgagggggtctcctgccccaggcgggccggctgcctaccctccagactgtccgctatggctccaaggctgttacccgccaccgtcgtgtgatgcactttcagcggcagaagctgatggctgtgactgaatatatccccccgaaaccagccatccacccatcatgcctgccatctcctcccagccccccacaggaggagataggcctcatcaggcttctccgccgggagatagcagcagttttccaggacaaccgaatgatagccgtctgccagaatgtggctctgagtgcagaggacaagcttcttatgcgacaccagctgcggaaacacaagatcctgatgaaggtcttccccaaccaggtcctgaagcccttcctggaggattccaagtaccaaaatctgctgcccctttttgtggggcacaacatgctgctggtcagtgaagagcccaaggtcaaggagatggtacggatcttaaggactgtgccattcctgccgctgctaggtggctgcattgatgacaccatcctcagcaggcagggctttatcaactactccaagctccccagcctgcccctggtgcagggggagcttgtaggaggcctcacctgcctcacagcccagacccactccctgctccagcaccagcccctccagctgaccaccctgttggaccagtacatcagagagcaacgcgagaaggattctgtcatgtcggccaatgggaagccagatcctgacactgttccggactcgtagccagcctgtttagccagccctgcgcataaatacactctgcgttattggctgtgctctcctcaatgggacatgtggaagaacttggggtcggggagtgtgtttgtcacttggttttcactagtaatgatattgtcaggtatagggccacttggagatgcagaggattccatttcagatgtcagtcaccggcttcgtccttagttttcccaacttgggacgtgataggagcaaagtctctccattctccaggtccaaggcagagatcctgaaaagatagggctattgtcccctgcctccttggtcactgcctcttgctgcacgggctcctgagcccacccccttggggcacaacctgccactgccacagtagctcaaccaagcagttgtgctgagaatggcacctggtgagagcctgctgtgtgccaggctttgtgctgagtgctgtacatgtattagttcctttactgctgaccacattgtacccatttcacagagaaggagcagagaaattaagtggcttgctcaaggtcatgcagttagtaagtggcagaacagggacttgaaccaagccctctgctctgaagaccgcgtcctgaatttcttcactagagcttcctcatcaggttacccagaagtgggtcccatccaccatccaggtgtgcttggatgttagttctcgcagcctttatccgaccgggttgggagtctgcactgttgataac

SEQ ID NO: 297210 - DNA, 1557 bp, Homo sapiens
  misc_feature (1162)..(1163): n is a, c, g, or t
  misc_feature (1181)..(1181): n is a, c, g, or t
  misc_feature (1248)..(1249): n is a, c, g, or t
gggcttccgtccattcttccggtggagatggctgcggccgtggcggggatgctgcgagggggtctcctgccccaggcgggccggctgcctaccctccagactgtccgctatggctccaaggctgttacccgccaccgtcgtgtgatgcactttcagcggcagaagctgatggctgtgactgaatatatccccccgaaaccagccatccacccatcatgcctgccatctcctcccagccccccacaggaggagataggcctcatcaggcttctccgccgggagatagcagcagttttccaggacaaccgaatgatagccgtctgccagaatgtggctctgagtgcagaggacaagcttcttatgcgacaccagctgcggaaacacaagatcctgatgaaggtcttccccaaccaggtcctgaagcccttcctggaggattccaagtaccaaaatctgctgcccctttttgtggggcacaacatgctgctggtcagtgaagagcccaaggtcaaggagatggtacggatcttaaggactgtgccattcctgccgctgctaggtggctgcattgatgacaccatcctcagcaggcagggctttatcaactactccaagctccccagcctgcccctggtgcagggggagcttgtaggaggcctcacctgcctcacagcccagacccactccctgctccagcaccagcccctccagctgaccaccctgttggaccagtacatcagagagcaacgcgagaaggattctgtcatgtcggccaatgggaagccagatcctgacactgttccggactcgtagccagcctgtttagccagccctgcgcataaatacactctgcgttattggctgtgctctcctcaatgggacatgtggaagaacttggggtcggggagtgtgtttgtcacttggttttcactagtaatgatattgtcaggtatagggccacttggagatgcagaggattccatttcagatgtcagtcaccggcttcgtccttagttttcccaacttgggacgtgataggagcaaagtctctccattctccaggtccaaggcagagatcctgaaaagatagggctattgtcccctcccccccccctcactccctccccccccacggccccccaccccaccccccccgcccacnnccccccactcccacactnccccacccaaccacctccccccacaatcccccccccccagaccccccccccccccaccccctgcccnnagtgctgtacatgtattagttcctttactgctgaccacattgtacccatttcacagagaaggagcagagaaattaagtggcttgctcaaggtcatgcagttagtaagtggcagaacagggacttgaaccaagccctctgctctgaagaccgcgtcctgaatttcttcactagagcttcctcatcaggttacccagaagtgggtcccatccaccatccaggtgtgcttggatgttagttctccaccctcgaggtgtacgctgtgaaaagtttgggagcactgctttataataaaatgaaatatattcta

SEQ ID NO: 297211 - DNA, 1656 bp, Homo sapiens
gggcttccgtccattcttccggtggagatggctgcggccgtggcggggatgctgcgagggggtctcctgccccaggcgggctagagtgcagtggcatgatctcggctcactgcaacctccacctcccgggttcaagcgattctcctgcctcagcctctcaagtagctgggattacaggccggctgcctaccctccagactgtccgctatggctccaaggctgttacccgccaccgtcgtgtgatgcactttcagcggcagaagctgatggctgtgactgaatatatccccccgaaaccagccatccacccatcatgcctgccatctcctcccagccccccacaggaggagataggcctcatcaggcttctccgccgggagatagcagcagttttccaggacaaccgaatgatagccgtctgccagaatgtggctctgagtgcagaggacaagcttcttatgcgacaccagctgcggaaacacaagatcctgatgaaggtcttccccaaccaggtcctgaagcccttcctggaggattccaagtaccaaaatctgctgcccctttttgtggggcacaacatgctgctggtcagtgaagagcccaaggtcaaggagatggtacggatcttaaggactgtgccattcctgccgctgctaggtggctgcattgatgacaccatcctcagcaggcagggctttatcaactactccaagctccccagcctgcccctggtgcagggggagcttgtaggaggcctcacctgcctcacagcccagacccactccctgctccagcaccagcccctccagctgaccaccctgttggaccagtacatcagagagcaacgcgagaaggattctgtcatgtcggccaatgggaagccagatcctgacactgttccggactcgtagccagcctgtttagccagccctgcgcataaatacactctgcgttattggctgtgctctcctcaatgggacatgtggaagaacttggggtcggggagtgtgtttgtcacttggttttcactagtaatgatattgtcaggtatagggccacttggagatgcagaggattccatttcagatgtcagtcaccggcttcgtccttagttttcccaacttgggacgtgataggagcaaagtctctccattctccaggtccaaggcagagatcctgaaaagatagggctattgtcccctgcctccttggtcactgcctcttgctgcacgggctcctgagcccacccccttggggcacaacctgccactgccacagtagctcaaccaagcagttgtgctgagaatggcacctggtgagagcctgctgtgtgccaggctttgtgctgagtgctgtacatgtattagttcctttactgctgaccacattgtacccatttcacagagaaggagcagagaaattaagtggcttgctcaaggtcatgcagttagtaagtggcagaacagggacttgaaccaagccctctgctctgaagaccgcgtcctgaatttcttcactagagcttcctcatcaggttacccagaagtgggtcccatccaccatccaggtgtgcttggatgttagttctccaccctcgaggtgtacgctgtgaaaagtttgggagcactgctttataataaaatgaaatatattcta

SEQ ID NO: 297212 - DNA, 1707 bp, Homo sapiens
gggcttccgtccattcttccggtggagatggctgcggccgtggcggggatgctgcgagggggtctcctgccccaggcgggtaaggagtggcccaggtcctcacggcgtgtcttgcggccgctctctagtcctcatctgccctcctctactactgattcttcccataatctctgaccccagctagatcgctggcctccttaccccgtccagttccttgtgactcgactggccggctgcctaccctccagactgtccgctatggctccaaggctgttacccgccaccgtcgtgtgatgcactttcagcggcagaagctgatggctgtgactgaatatatccccccgaaaccagccatccacccatcatgcctgccatctcctcccagccccccacaggaggagataggcctcatcaggcttctccgccgggagatagcagcagttttccaggacaaccgaatgatagccgtctgccagaatgtggctctgagtgcagaggacaagcttcttatgcgacaccagctgcggaaacacaagatcctgatgaaggtcttccccaaccaggtcctgaagcccttcctggaggattccaagtaccaaaatctgctgcccctttttgtggggcacaacatgctgctggtcagtgaagagcccaaggtcaaggagatggtacggatcttaaggactgtgccattcctgccgctgctaggtggctgcattgatgacaccatcctcagcaggcagggctttatcaactactccaagctccccagcctgcccctggtgcagggggagcttgtaggaggcctcacctgcctcacagcccagacccactccctgctccagcaccagcccctccagctgaccaccctgttggaccagtacatcagagagcaacgcgagaaggattctgtcatgtcggccaatgggaagccagatcctgacactgttccggactcgtagccagcctgtttagccagccctgcgcataaatacactctgcgttattggctgtgctctcctcaatgggacatgtggaagaacttggggtcggggagtgtgtttgtcacttggttttcactagtaatgatattgtcaggtatagggccacttggagatgcagaggattccatttcagatgtcagtcaccggcttcgtccttagttttcccaacttgggacgtgataggagcaaagtctctccattctccaggtccaaggcagagatcctgaaaagatagggctattgtcccctgcctccttggtcactgcctcttgctgcacgggctcctgagcccacccccttggggcacaacctgccactgccacagtagctcaaccaagcagttgtgctgagaatggcacctggtgagagcctgctgtgtgccaggctttgtgctgagtgctgtacatgtattagttcctttactgctgaccacattgtacccatttcacagagaaggagcagagaaattaagtggcttgctcaaggtcatgcagttagtaagtggcagaacagggacttgaaccaagccctctgctctgaagaccgcgtcctgaatttcttcactagagcttcctcatcaggttacccagaagtgggtcccatccaccatccaggtgtgcttggatgttagttctccaccctcgaggtgtacgctgtgaaaagtttgggagcactgctttataataaaatgaaatatattcta

SEQ ID NO: 297213 - DNA, 1557 bp, Homo sapiens
tagcaccccaagacaccacgcaccacacttagctagtcacaggccgcgtgttatggccgtggcggggatgctgcgagggggtctcctgccccaggcggactgtccgctatggctccaaggctgttacccgccaccgtcgtgtgatgcactttcagcggcagaagctgatggctgtgactgaatatatccccccgaaaccagccatccacccatcatgcctgccatctcctcccagccccccacaggaggagataggcctcatcaggcttctccgccgggagatagcagcagttttccaggacaaccgaatgatagccgtctgccagaatgtggctctgagtgcagaggacaagcttcttatgcgacaccagctgcggaaacacaagatcctgatgaaggtcttccccaaccaggtcctgaagcccttcctggaggattccaagtaccaaaatctgctgcccctttttgtggggcacaacatgctgctggtcagtgaagagcccaaggtcaaggagatggtacggatcttaaggactgtgccattcctgccgctgctaggtggctgcattgatgacaccatcctcagcaggcagggctttatcaactactccaagctccccagcctgcccctggtgcagggggagcttgtaggaggcctcacctgcctcacagcccagacccactccctgctccagcaccagcccctccagctgaccaccctgttggaccagtacatcagagagcaacgcgagaaggattctgtcatgtcggccaatgggaagccagatcctgacactgttccggactcgtagccagcctgtttagccagccctgcgcataaatacactctgcgttattggctgtgctctcctcaatgggacatgtggaagaacttggggtcggggagtgtgtttgtcacttggttttcactagtaatgatattgtcaggtatagggccacttggagatgcagaggattccatttcagatgtcagtcaccggcttcgtccttagttttcccaacttgggacgtgataggagcaaagtctctccattctccaggtccaaggcagagatcctgaaaagatagggctattgtcccctgcctccttggtcactgcctcttgctgcacgggctcctgagcccacccccttggggcacaacctgccactgccacagtagctcaaccaagcagttgtgctgagaatggcacctggtgagagcctgctgtgtgccaggctttgtgctgagtgctgtacatgtattagttcctttactgctgaccacattgtacccatttcacagagaaggagcagagaaattaagtggcttgctcaaggtcatgcagttagtaagtggcagaacagggacttgaaccaagccctctgctctgaagaccgcgtcctgaatttcttcactagagcttcctcatcaggttacccagaagtgggtcccatccaccatccaggtgtgcttggatgttagttctccaccctcgaggtgtacgctgtgaaaagtttgggagcactgctttataataaaatgaaatatattcta

SEQ ID NO: 297214 - DNA, 944 bp, Homo sapiens
  misc_feature (553)..(553): n is a, c, g, or t
  misc_feature (567)..(567): n is a, c, g, or t
  misc_feature (578)..(578): n is a, c, g, or t
  misc_feature (603)..(603): n is a, c, g, or t
  misc_feature (681)..(681): n is a, c, g, or t
  misc_feature (717)..(717): n is a, c, g, or t
  misc_feature (751)..(751): n is a, c, g, or t
  misc_feature (754)..(754): n is a, c, g, or t
  misc_feature (761)..(761): n is a, c, g, or t
  misc_feature (802)..(802): n is a, c, g, or t
  misc_feature (814)..(814): n is a, c, g, or t
  misc_feature (818)..(818): n is a, c, g, or t
  misc_feature (827)..(827): n is a, c, g, or t
  misc_feature (841)..(841): n is a, c, g, or t
  misc_feature (846)..(846): n is a, c, g, or t
  misc_feature (848)..(848): n is a, c, g, or t
  misc_feature (869)..(869): n is a, c, g, or t
  misc_feature (938)..(938): n is a, c, g, or t
gggcttccgtccattcttccggtggagatggctgcggccgtggcggggatgctgcgagggggtctcctgccccaggcgggccggctgcctaccctccagactgtccgctatggctccaaggctgttacccgccaccgtcgtgtgatgcactttcagcggcagaagctgatggctgtgactgaatatatccccccgaaaccagccatccacccatcatgcctgccatctcctcccagccccccacaggaggagataggcctcatcaggcttctccgccgggagatagcagcagttttccaggacaaccgaatgatagccgtctgccagaatgtggctctgagtgcagaggacaagcttcttatgcgacaccagctgcggaaacacaagatcctgatgaaggtcttccccaaccaggtcctgaagcccttcctggaggattccaagtaccaaaatctgctgcccctttttgtggggcacaacatcctcctcctaactcaacaccccaacctcaaccacatcctacccatcttaaccactctcacattcctccccntcctacctccctcnattcatcacancatcctcaccacccacccctttatnaactactccaacctccccaccctccccctcctcaacccccaccttctaccacccctcacctccctcacaccccacacncactccctcctccaccaccaccccctccacctcacnaccctcttccaccactacatcacacaccaccccncantccattntctcatctccccaaatcccaacccacatcctcacactcttncccattcctacncacnctctatacncacccctccccatnaatanantctcccttattccctctcgtntcttaaatcccaaatctccaacaattcccctcccccactctctttctaattccttttaatactaatcanattcta

SEQ ID NO: 297215 - DNA, 611 bp, Homo sapiens
tagcaccccaagacaccacgcaccacacttagctagtcacaggccgcgtgttatggccgtggcggggatgctgcgagggggtctcctgccccaggcgggtaaggagtggcccaggtcctcacggcgtgtcttgcggccgctctctagtcctcatctgccctcctctactactgattcttcccataatctctgaccccagctagatcgctggcctccttaccccgtccagttccttgtgactcgactggtaatcacagcaacaacgtccagatgttgtctgtctccagcgtttcttttgcctggaccactcctcgcccagacctttgcattatgtctccatcttaatgtgtcagtctaaatgtcacctcaggtcttcccttgactccttagccccgtcgcaatctgtaattttgcatttgtttagttgcttgtttcctctattaaactccgcaagggcagaaccatgttcattcagcatagccagcaggtggcatggtgctggatgttagtaagcgtgcggtagatatttgtttagtgaatggatttgagcacttaatataggccaggcactgtgataactatttttatatgtgttagctcatttaaatctt

SEQ ID NO: 297216 - DNA, 1747 bp, Homo sapiens
gggcttccgtccattcttccggtggagatggctgcggccgtggcggggatgctgcgagggggtctcctgccccaggcgggccggctgcctaccctccagactgtccgctatggctccaaggctgttacccgccaccgtcgtgtgatgcactttcagcggcagaagctgatggctgtgactgaatatatccccccgaaaccagccatccacccatcatgcctgccatctcctcccagccccccacaggaggagataggcctcatcaggcttctccgccgggagatagcagcagttttccaggacaaccgaatgatagccgtctgccagaatgtggctctgagtgcagaggacaagcttcttatgcgacaccagctgcggaaacacaagatcctgatgaaggtcttccccaaccaggtcctgaagcccttcctggaggattccaagtaccaaaatctgctgcccctttttgtggggcacaacatgctgctggtcagtgaagagcccaaggtcaaggagatggtacggatcttaaggactgtgccattcctgccgctgctaggtggctgcattgatgacaccatcctcagcaggcagggctttatcaactactccaagctccccagcctgcccctggtgcagggggagcttgtaggaggcctcacctgcctcacagcccagacccactccctgctccagcaccagcccctccagctgaccaccctgttggaccagtacatcagagagcaacgcgagaaggattctgtcatgtcggccaatgggaagccagatcctgacactgttccggactcgtagccagcctgtttagccagccctgcgcataaatacactctgcgttattggctgtgctctcctcaatgggacatgtggaagaacttggggtcggggagtgtgtttgtcacttggttttcactagtaatgatattgtcaggtatagggccacttggagatgcagaggattccatttcagatgtcagtcaccggcttcgtccttagttttcccaacttgggacgtgataggagcaaagtctctccattctccaggtccaaggcagagatcctgaaaagatagggctattgtcccctgcctccttggtcactgcctcttgctgcacgggctcctgagcccacccccttggggcacaacctgccactgccacagtagctcaaccaagcagttgtgctgagaatggcacctggtgagagcctgctgtgtgccaggctttgtgctgagtgctgtacatgtattagttcctttactgctgaccacattgtacccatttcacagagaaggagcagagaaattaagtggcttgctcaaggtcatgcagttagtaagtggcagaacagggacttgaaccaagccctctgctctgaagaccgcgtcctgaatttcttcactagagcttcctcatcaggttacccagaagtgggtcccatccaccatccaggtgtgcttggatgttagttctccaccctcgaggtgtacgctgtgaaaagtttgggagcactgctttataataaaatgaaatatattctactttattttgtggtttacacggttgtcctccctctaaacttactctcaggggcttctctgtcatctgactttcctcactcttgcttcccttcctaggaaaatcctcttcccctatacctgttcccacaaatggcatcccgcgcatgcttgccctattaaaggcagctgacagctgtacccactagctaa

SEQ ID NO: 297217 - DNA, 1658 bp, Homo sapiens
atgaaaggttctgccattacaggaccagtagcaaaggagtgtgcagacttgtggccccggagtgcatccaatgctggcagcattgcatgattctccagtatatttgtaaaaaataaaaaaaaaaacgtttaaaccggccgtggcggggatgctgcgagggggtctcctgccccaggcgggccggctgcctaccctccagactgtccgctatggctccaaggctgttacccgccaccgtcgtgtgatgcactttcagcggcagaagctgatggctgtgactgaatatatccccccgaaaccagccatccacccatcatgcctgccatctcctcccagccccccacaggaggagataggcctcatcaggcttctccgccgggagatagcagcagttttccaggacaaccgaatgatagccgtctgccagaatgtggctctgagtgcagaggacaagcttcttatgcgacaccagctgcggaaacacaagatcctgatgaaggtcttccccaaccaggtcctgaagcccttcctggaggattccaagtaccaaaatctgctgcccctttttgtggggcacaacatgctgctggtcagtgaagagcccaaggtcaaggagatggtacggatcttaaggactgtgccattcctgccgctgctaggtggctgcattgatgacaccatcctcagcaggcagggctttatcaactactccaagctccccagcctgcccctggtgcagggggagcttgtaggaggcctcacctgcctcacagcccagacccactccctgctccagcaccagcccctccagctgaccaccctgttggaccagtacatcagagagcaacgcgagaaggattctgtcatgtcggccaatgggaagccagatcctgacactgttccggactcgtagccagcctgtttagccagccctgcgcataaatacactctgcgttattggctgtgctctcctcaatgggacatgtggaagaacttggggtcggggagtgtgtttgtcacttggttttcactagtaatgatattgtcaggtatagggccacttggagatgcagaggattccatttcagatgtcagtcaccggcttcgtccttagttttcccaacttgggacgtgataggagcaaagtctctccattctccaggtccaaggcagagatcctgaaaagatagggctattgtcccctgcctccttggtcactgcctcttgctgcacgggctcctgagcccacccccttggggcacaacctgccactgccacagtagctcaaccaagcagttgtgctgagaatggcacctggtgagagcctgctgtgtgccaggctttgtgctgagtgctgtacatgtattagttcctttactgctgaccacattgtacccatttcacagagaaggagcagagaaattaagtggcttgctcaaggtcatgcagttagtaagtggcagaacagggacttgaaccaagccctctgctctgaagaccgcgtcctgaatttcttcactagagcttcctcatcaggttacccagaagtgggtcccatccaccatccaggtgtgcttggatgttagttctccaccctcgaggtgtacgctgtgaaaagtttgggagcactgctttataataaaatgaaatatattcta

SEQ ID NO: 297218 - DNA, 1675 bp, Homo sapiens
tagcaccccaagacaccacgcaccacacttagctagtcacaggccgcgtgttatggccgtggcggggatgctgcgagggggtctcctgccccaggcgggctagagtgcagtggcatgatctcggctcactgcaacctccacctcccgggttcaagcgattctcctgcctcagcctctcaagtagctgggattacaggccggctgcctaccctccagactgtccgctatggctccaaggctgttacccgccaccgtcgtgtgatgcactttcagcggcagaagctgatggctgtgactgaatatatccccccgaaaccagccatccacccatcatgcctgccatctcctcccagccccccacaggaggagataggcctcatcaggcttctccgccgggagatagcagcagttttccaggacaaccgaatgatagccgtctgccagaatgtggctctgagtgcagaggacaagcttcttatgcgacaccagctgcggaaacacaagatcctgatgaaggtcttccccaaccaggtcctgaagcccttcctggaggattccaagtaccaaaatctgctgcccctttttgtggggcacaacatgctgctggtcagtgaagagcccaaggtcaaggagatggtacggatcttaaggactgtgccattcctgccgctgctaggtggctgcattgatgacaccatcctcagcaggcagggctttatcaactactccaagctccccagcctgcccctggtgcagggggagcttgtaggaggcctcacctgcctcacagcccagacccactccctgctccagcaccagcccctccagctgaccaccctgttggaccagtacatcagagagcaacgcgagaaggattctgtcatgtcggccaatgggaagccagatcctgacactgttccggactcgtagccagcctgtttagccagccctgcgcataaatacactctgcgttattggctgtgctctcctcaatgggacatgtggaagaacttggggtcggggagtgtgtttgtcacttggttttcactagtaatgatattgtcaggtatagggccacttggagatgcagaggattccatttcagatgtcagtcaccggcttcgtccttagttttcccaacttgggacgtgataggagcaaagtctctccattctccaggtccaaggcagagatcctgaaaagatagggctattgtcccctgcctccttggtcactgcctcttgctgcacgggctcctgagcccacccccttggggcacaacctgccactgccacagtagctcaaccaagcagttgtgctgagaatggcacctggtgagagcctgctgtgtgccaggctttgtgctgagtgctgtacatgtattagttcctttactgctgaccacattgtacccatttcacagagaaggagcagagaaattaagtggcttgctcaaggtcatgcagttagtaagtggcagaacagggacttgaaccaagccctctgctctgaagaccgcgtcctgaatttcttcactagagcttcctcatcaggttacccagaagtgggtcccatccaccatccaggtgtgcttggatgttagttctccaccctcgaggtgtacgctgtgaaaagtttgggagcactgctttataataaaatgaaatatattcta

SEQ ID NO: 297219 - DNA, 1800 bp, Homo sapiens
ttctgctgtctctttaaatattgtctgtggctgcttttggcagagttgagcattagagacagattacatgggccccaaacttaaaatatttactgtttgaccattttaagaaaaagtttatttaaccttatcccctttttctttctctctctctctctctctttccttccttccttccttccttctttttttttctgagacggagtctttactctgtgcccaggctagagtgcagtggcatgatctcggctcactgcaacctccacctcccgggttcaagcgattctcctgcctcagcctctcaagtagctgggattacaggccggctgcctaccctccagactgtccgctatggctccaaggctgttacccgccaccgtcgtgtgatgcactttcagcggcagaagctgatggctgtgactgaatatatccccccgaaaccagccatccacccatcatgcctgccatctcctcccagccccccacaggaggagataggcctcatcaggcttctccgccgggagatagcagcagttttccaggacaaccgaatgatagccgtctgccagaatgtggctctgagtgcagaggacaagcttcttatgcgacaccagctgcggaaacacaagatcctgatgaaggtcttccccaaccaggtcctgaagcccttcctggaggattccaagtaccaaaatctgctgcccctttttgtggggcacaacatgctgctggtcagtgaagagcccaaggtcaaggagatggtacggatcttaaggactgtgccattcctgccgctgctaggtggctgcattgatgacaccatcctcagcaggcagggctttatcaactactccaagctccccagcctgcccctggtgcagggggagcttgtaggaggcctcacctgcctcacagcccagacccactccctgctccagcaccagcccctccagctgaccaccctgttggaccagtacatcagagagcaacgcgagaaggattctgtcatgtcggccaatgggaagccagatcctgacactgttccggactcgtagccagcctgtttagccagccctgcgcataaatacactctgcgttattggctgtgctctcctcaatgggacatgtggaagaacttggggtcggggagtgtgtttgtcacttggttttcactagtaatgatattgtcaggtatagggccacttggagatgcagaggattccatttcagatgtcagtcaccggcttcgtccttagttttcccaacttgggacgtgataggagcaaagtctctccattctccaggtccaaggcagagatcctgaaaagatagggctattgtcccctgcctccttggtcactgcctcttgctgcacgggctcctgagcccacccccttggggcacaacctgccactgccacagtagctcaaccaagcagttgtgctgagaatggcacctggtgagagcctgctgtgtgccaggctttgtgctgagtgctgtacatgtattagttcctttactgctgaccacattgtacccatttcacagagaaggagcagagaaattaagtggcttgctcaaggtcatgcagttagtaagtggcagaacagggacttgaaccaagccctctgctctgaagaccgcgtcctgaatttcttcactagagcttcctcatcaggttacccagaagtgggtcccatccaccatccaggtgtgcttggatgttagttctccaccctcgaggtgtacgctgtgaaaagtttgggagcactgctttataataaaatgaaatatattcta

SEQ ID NO: 297220 - DNA, 1702 bp, Homo sapiens
tttctgttatgccttttcatttctattcagataagatgtggatattgtgagtttctggcttgaaagctagaactgaggggttttttttgtttgtttgtttgtttgtttgttttgagatggagtctcgctctgttgccattgcactccagtctgggcgacaagagtgaaactccgtctcaaaaaaaaaaaaaaaaaaaaaaaaaaaagagcaatgtccttggatgtggtggtgaagggatttcagaataacatactcactggagcatggtgggatgtaccgccctagttgaagaaatcgtgatgtaacattgacagtcgttgggtataatgtgataacaggagcaagaaatgagtaatcaataaataccaattttattgaaataacagtgtttatttctctaaagaaagtaggagaatgagtctttagacttaaggagcatatactttaatgaaagagacagtacagatatcgtagaacaagtgactgaaagcacatgtctatttgtaaatgtctagaaagaaacattcaccctgagactaatcagtctgtgtagctatttagtgaatatttttcagtcaagggaaggaattaagactttaaatttaaaaaacaaaattgatctgggagcagcggcttgtgcctctaagcccagctactcaggaggctgagtcaggaggattgcttgaggccaggagtttgagaccaggctggagtgcagtggcgcaatctcggctcactgcaacctccgcctcccaggttgacaccattctcctgcctcaccctcccaagtagctgggactacaggcgcctgccagcacgcctggctaattttttgtatttttagtagagacagggtttcaccgtgttagccaggatggtctcgatctcctgacctcgtgatccgcctgcctctgcctcccaaagtgctgggattacaggcgtgagccaccgcgtccggcctctttttttcttttcttttttttgagacaaagtctcactgtgtcacccagactggaatgcagtgacacaatctcggctcactgaaacctctgccttccaggttcaagctattctcatgcctcagcctctcaagtagctgggactacagatgtgggccaccatgtctggctaattttttttttttttttttttttgtagagacagggtttcgccatgttgacgagactggtctcgaactcctggcctcaagtgatctgccgcctcagcttctcaaagtactgggattatataggcatgagccactgagcctggcccagaagcgtttttctcaaaggccctcagtgagataaattagatttggcatctcctgtcctgggccagggatctctctacaagagcccctgcccctctgttggaggcacagttttagaataaggaggaggagggagaagagaaaatgtaaaggagggagatctttcccaggccgcaccatttctgtcactcacatggacccaagataaaagaatggccaaaccctcacaacccctgatgtttgaagagttccaagttgaagggaaacaaagaagtgtttgatggtgccagagaggggctgctctccagaaagctaaaatttaatttcttttttcctctgagttctgtacttcaaccagcctacaagctggcacttgctaacaaatcagaaatatgacaattaatgattaaagactgtgattgccacca

SEQ ID NO: 297221 - DNA, 394 bp, Homo sapiens
tattactagtgattactagtgaattcactagtaatcatttctgtcactcacatggacccaagataaaagaatggccaaaccctcacaacccctgatgtttgaagagttccaagttgaagggaaacaaagaagtgtttgatggtgccagagaggggctgctctccagaaagctaaaatttaatttcttttttcctctgagttctgtacttcaaccagcctacaagctggcacttgctaacaaatcagaaatatgacaattaatgattaaagactgtgattgccaccaaaaaaaacagactgtatttgcacccaataccttctgtctcccagacagcctcttcagagcttttcttttctttttcttttccttttttttttttaagacagggcactc

SEQ ID NO: 297222 - DNA, 455 bp, Homo sapiens
gatcccctgatggctgatgagatgtcttcaggctgtgcatctcagatcccgaggatgtactccagagcagatgaatggcctggcaactcttcgtcaatgagggtaagaccctagagagggagggggagtaggtggggcagtctcgcaggtgagagccaagctcagctccctctgagtgtattcatcaatagtcatcaatcagccaacagcatccactcaatgaccagccccgaactggaggctgcgtgggctgctgcacaggacagcaagaaaaagcaacctctgcctgatggcagctcctaattactcttctgttatcaaagtcattttgatggctgtccctgcttaacaagcaagaggtgagtaaagctcttgattgaggcaggacttatagactgtgtttcagggctgtggcaggctctgcaggggtcctctgtcccctcccctggcccctg

SEQ ID NO: 297223 - DNA, 297 bp, Homo sapiens
ccttacaccaactcctcttcctcccggacagaccgagtttcaatcagaagctacaggacagacattagcatgtcagacttcgagaactccagggaatttggagccaatgacaacatgggagcctcttcgatcactcaggagacatccctcggaggaaaagaagagtttgttgccaccactgagagcaccacagagaccaaagaacccaagaaggcaaaaagggtgaggaggaagaaggaagccccactacatgacaaagaaatgcagcatgaggggatgcagttagacttcagaaag

SEQ ID NO: 297224 - DNA, 4268 bp, Homo sapiens
agagtttcagttttggcagcagcgtccagtgccctgccagtagctcctagagaggcaggggttaccaactggccagcaggctgtgtccctgaagtcagatcaacgggagagaaggaagtggctaaaacattgcacaggagaagtcggcctgagtggtgcggcgctcgggacccaccagcaatgctgctcttcgtgctcacctgcctgctggcggtcttcccagccatctccacgaagagtcccatatttggtcccgaggaggtgaatagtgtggaaggtaactcagtgtccatcacgtgctactacccacccacctctgtcaaccggcacacccggaagtactggtgccggcagggagctagaggtggctgcataaccctcatctcctcggagggctacgtctccagcaaatatgcaggcagggctaacctcaccaacttcccggagaacggcacatttgtggtgaacattgcccagctgagccaggatgactccgggcgctacaagtgtggcctgggcatcaatagccgaggcctgtcctttgatgtcagcctggaggtcagccagggtcctgggctcctaaatgacactaaagtctacacagtggacctgggcagaacggtgaccatcaactgccctttcaagactgagaatgctcaaaagaggaagtccttgtacaagcagataggcctgtaccctgtgctggtcatcgactccagtggttatgtgaatcccaactatacaggaagaatacgccttgatattcagggtactggccagttactgttcagcgttgtcatcaaccaactcaggctcagcgatgctgggcagtatctctgccaggctggggatgattccaatagtaataagaagaatgctgacctccaagtgctaaagcccgagcccgagctggtttatgaagacctgaggggctcagtgaccttccactgtgccctgggccctgaggtggcaaacgtggccaaatttctgtgccgacagagcagtggggaaaactgtgacgtggtcgtcaacaccctggggaagagggccccagcctttgagggcaggatcctgctcaacccccaggacaaggatggctcattcagtgtggtgatcacaggcctgaggaaggaggatgcagggcgctacctgtgtggagcccattcggatggtcagctgcaggaaggctcgcctatccaggcctggcaactcttcgtcaatgaggagtccacgattccccgcagccccactgtggtgaagggggtggcaggaagctctgtggccgtgctctgcccctacaaccgtaaggaaagcaaaagcatcaagtactggtgtctctgggaaggggcccagaatggccgctgccccctgctggtggacagcgaggggtgggttaaggcccagtacgagggccgcctctccctgctggaggagccaggcaacggcaccttcactgtcatcctcaaccagctcaccagccgggacgccggcttctactggtgtctgaccaacggcgatactctctggaggaccaccgtggagatcaagattatcgaaggagaaccaaacctcaaggtaccagggaatgtcacggctgtgctgggagagactctcaaggtcccctgtcactttccatgcaaattctcctcgtacgagaaatactggtgcaagtggaataacacgggctgccaggccctgcccagccaagacgaaggccccagcaaggccttcgtgaactgtgacgagaacagccggcttgtctccctgaccctgaacctggtgaccagggctgatgagggctggtactggtgtggagtgaagcagggccacttctatggagagactgcagccgtctatgtggcagttgaagagaggaaggcagcggggtcccgcgatgtcagcctagcgaaggcagacgctgctcctgatgagaaggtgctagactctggttttcgggagattgagaacaaagccattcaggatcccaggctttttgcagaggaaaaggcggtggcagatacaagagatcaagccgatgggagcagagcatctgtggattccggcagctctgaggaacaaggtggaagctccagagcgctggtctccaccctggtgcccctgggcctggtgctggcagtgggagccgtggctgtgggggtggccagagcccggcacaggaagaacgtcgaccgagtttcaatcagaagctacaggacagacattagcatgtcagacttcgagaactccagggaatttggagccaatgacaacatgggagcctcttcgatcactcaggagacatccctcggaggaaaagaagagtttgttgccaccactgagagcaccacagagaccaaagaacccaagaaggcaaaaaggtcatccaaggaggaagccgagatggcctacaaagacttcctgctccagtccagcaccgtggccgccgaggcccaggacggcccccaggaagcctagacggtgtcgccgcctgctccctgcacccatgacaatcaccttcagaatcatgtcgatcctggggccctcagctcctggggaccccactccctgctctaacacctgcctaggtttttcctactgtcctcagaggcgtgctggtcccctcctcagtgacatcaaagcctggcctaattgttcctattggggatgagggtggcatgaggaggtcccacttgcaacttctttctgttgagagaacctcaggtacggagaagaatagaggtcctcatgggtcccttgaaggaagagggaccagggtgggagagctgattgcagaaaggagagacgtgcagcgcccctctgcacccttatcatgggatgtcaacagaatttttccctccactccatccctccctcccgtccttcccctcttcttctttccttccatcaaaagatgtatttgaattcatactagaattcaggtgctttgctagatgctgtgacaggtatgccaccaacactgctcacagcctttctgaggacaccagtgaaagaagccacagctcttcttggcgtatttatactcactgagtcttaacttttcaccaggggtgctcacctctgcccctattgggagaggtcataaaatgtctcgagtcctaaggccttaggggtcatgtatgatgagcatacacacaggtaattataaacccacattcttaccatttcacacataagaaaattgaggtttggaagagtgaagcgtttttctttttcttttttttttttgagacggagtctctcactgtcgcccaggctggagtgcagtggcgcaatctcggctcactgcaacctccgcctcccaggttgacaccattctcctgcctcaccctcccaagtagctgggactacaggcgcctgccagcacgcctggctaattttttgtatttttagtagagacagggtttcaccgtgttagccaggatggtctcgatctcctgacctcgtgatccgcctgcctctgcctcccaaagtgctgggattacaggcgtgagccaccgcgtccggcctctttttttcttttcttttttttgagacaaagtctcactgtgtcacccagactggaatgcagtgacacaatctcggctcactgaaacctctgccttccaggttcaagctattctcatgcctcagcctctcaagtagctgggactacagatgtgggccaccatgtctggctaattttttttttttttttttttttgtagagacagggtttcgccatgttgacgagactggtctcgaactcctggcctcaagtgatctgccgcctcagcttctcaaagtactgggattatataggcatgagccactgagcctggcccagaagcgtttttctcaaaggccctcagtgagataaattagatttggcatctcctgtcctgggccagggatctctctacaagagcccctgcccctctgttggaggcacagttttagaataaggaggaggagggagaagagaaaatgtaaaggagggagatctttcccaggccgcaccatttctgtcactcacatggacccaagataaaagaatggccaaaccctcacaacccctgatgtttgaagagttccaagttgaagggaaacaaagaagtgtttgatggtgccagagaggggctgctctccagaaagctaaaatttaatttcttttttcctctgagttctgtacttcaaccagcctacaagctggcacttgctaacaaatcagaaatatgacaattaatgattaaagactgtgattgccacca

SEQ ID NO: 297225 - DNA, 4376 bp, Homo sapiens
agagtttcagttttggcagcagcgtccagtgccctgccagtagctcctagagaggcaggggttaccaactggccagcaggctgtgtccctgaagtcagatcaacgggagagaaggaagtggctaaaacattgcacaggagaagtcggcctgagtggtgcggcgctcgggacccaccagcaatgctgctcttcgtgctcacctgcctgctggcggtcttcccagccatctccacgaagagtcccatatttggtcccgaggaggtgaatagtgtggaaggtaactcagtgtccatcacgtgctactacccacccacctctgtcaaccggcacacccggaagtactggtgccggcagggagctagaggtggctgcataaccctcatctcctcggagggctacgtctccagcaaatatgcaggcagggctaacctcaccaacttcccggagaacggcacatttgtggtgaacattgcccagctgagccaggatgactccgggcgctacaagtgtggcctgggcatcaatagccgaggcctgtcctttgatgtcagcctggaggtcagccagggtcctgggctcctaaatgacactaaagtctacacagtggacctgggcagaacggtgaccatcaactgccctttcaagactgagaatgctcaaaagaggaagtccttgtacaagcagataggcctgtaccctgtgctggtcatcgactccagtggttatgtgaatcccaactatacaggaagaatacgccttgatattcagggtactggccagttactgttcagcgttgtcatcaaccaactcaggctcagcgatgctgggcagtatctctgccaggctggggatgattccaatagtaataagaagaatgctgacctccaagtgctaaagcccgagcccgagctggtttatgaagacctgaggggctcagtgaccttccactgtgccctgggccctgaggtggcaaacgtggccaaatttctgtgccgacagagcagtggggaaaactgtgacgtggtcgtcaacaccctggggaagagggccccagcctttgagggcaggatcctgctcaacccccaggacaaggatggctcattcagtgtggtgatcacaggcctgaggaaggaggatgcagggcgctacctgtgtggagcccattcggatggtcagctgcaggaaggctcgcctatccaggcctggcaactcttcgtcaatgaggagtccacgattccccgcagccccactgtggtgaagggggtggcaggaagctctgtggccgtgctctgcccctacaaccgtaaggaaagcaaaagcatcaagtactggtgtctctgggaaggggcccagaatggccgctgccccctgctggtggacagcgaggggtgggttaaggcccagtacgagggccgcctctccctgctggaggagccaggcaacggcaccttcactgtcatcctcaaccagctcaccagccgggacgccggcttctactggtgtctgaccaacggcgatactctctggaggaccaccgtggagatcaagattatcgaaggagaaccaaacctcaaggtaccagggaatgtcacggctgtgctgggagagactctcaaggtcccctgtcactttccatgcaaattctcctcgtacgagaaatactggtgcaagtggaataacacgggctgccaggccctgcccagccaagacgaaggccccagcaaggccttcgtgaactgtgacgagaacagccggcttgtctccctgaccctgaacctggtgaccagggctgatgagggctggtactggtgtggagtgaagcagggccacttctatggagagactgcagccgtctatgtggcagttgaagagaggaaggcagcggggtcccgcgatgtcagcctagcgaaggcagacgctgctcctgatgagaaggtgctagactctggttttcgggagattgagaacaaagccattcaggatcccaggctttttgcagaggaaaaggcggtggcagatacaagagatcaagccgatgggagcagagcatctgtggattccggcagctctgaggaacaaggtggaagctccagagcgctggtctccaccctggtgcccctgggcctggtgctggcagtgggagccgtggctgtgggggtggccagagcccggcacaggaagaacgtcgaccgagtttcaatcagaagctacaggacagacattagcatgtcagacttcgagaactccagggaatttggagccaatgacaacatgggagcctcttcgatcactcaggagacatccctcggaggaaaagaagagtttgttgccaccactgagagcaccacagagaccaaagaacccaagaaggcaaaaaggtcatccaaggaggaagccgagatggcctacaaagacttcctgctccagtccagcaccgtggccgccgaggcccaggacggcccccaggaagcctagacggtgtcgccgcctgctccctgcacccatgacaatcaccttcagaatcatgtcgatcctggggccctcagctcctggggaccccactccctgctctaacacctgcctaggtttttcctactgtcctcagaggcgtgctggtcccctcctcagtgacatcaaagcctggcctaattgttcctattggggatgagggtggcatgaggaggtcccacttgcaacttctttctgttgagagaacctcaggtacggagaagaatagaggtcctcatgggtcccttgaaggaagagggaccagggtgggagagctgattgcagaaaggagagacgtgcagcgcccctctgcacccttatcatgggatgtcaacagaatttttccctccactccatccctccctcccgtccttcccctcttcttctttccttccatcaaaagatgtatttgaattcatactagaattcaggtgctttgctagatgctgtgacaggtatgccaccaacactgctcacagcctttctgaggacaccagtgaaagaagccacagctcttcttggcgtatttatactcactgagtcttaacttttcaccaggggtgctcacctctgcccctattgggagaggtcataaaatgtctcgagtcctaaggccttaggggtcatgtatgatgagcatacacacaggtaattataaacccacattcttaccatttcacacataagaaaattgaggtttggaagagtgaagcgtttttctttttcttttttttttttgagacggagtctctcactgtcgcccaggctggagtgcagtggcgcaatctcggctcactgcaacctccgcctcccaggttgacaccattctcctgcctcaccctcccaagtagctgggactacaggcgcctgccagcacgcctggctaattttttgtatttttagtagagacagggtttcaccgtgttagccaggatggtctcgatctcctgacctcgtgatccgcctgcctctgcctcccaaagtgctgggattacaggcgtgagccaccgcgtccggcctctttttttcttttcttttttttgagacaaagtctcactgtgtcacccagactggaatgcagtgacacaatctcggctcactgaaacctctgccttccaggttcaagctattctcatgcctcagcctctcaagtagctgggactacagatgtgggccaccatgtctggctaattttttttttttttttttttttgtagagacagggtttcgccatgttgacgagactggtctcgaactcctggcctcaagtgatctgccgcctcagcttctcaaagtactgggattatataggcatgagccactgagcctggcccagaagcgtttttctcaaaggccctcagtgagataaattagatttggcatctcctgtcctgggccagggatctctctacaagagcccctgcccctctgttggaggcacagttttagaataaggaggaggagggagaagagaaaatgtaaaggagggagatctttcccaggccgcaccatttctgtcactcacatggacccaagataaaagaatggccaaaccctcacaacccctgatgtttgaagagttccaagttgaagggaaacaaagaagtgtttgatggtgccagagaggggctgctctccagaaagctaaaatttaatttcttttttcctctgagttctgtacttcaaccagcctacaagctggcacttgctaacaaatcagaaatatgacaattaatgattaaagactgtgattgccaccaaaaaaaacagactgtatttgcacccaataccttctgtctcccagacagcctcttcagagcttttcttttctttttcttttccttttttttttttaagacagggcactc

SEQ ID NO: 297226 - DNA, 4503 bp, Homo sapiens
agagtttcagttttggcagcagcgtccagtgccctgccagtagctcctagagaggcaggggttaccaactggccagcaggctgtgtccctgaagtcagatcaacgggagagaaggaagtggctaaaacattgcacaggagaagtcggcctgagtggtgcggcgctcgggacccaccagcaatgctgctcttcgtgctcacctgcctgctggcggtcttcccagccatctccacgaagagtcccatatttggtcccgaggaggtgaatagtgtggaaggtaactcagtgtccatcacgtgctactacccacccacctctgtcaaccggcacacccggaagtactggtgccggcagggagctagaggtggctgcataaccctcatctcctcggagggctacgtctccagcaaatatgcaggcagggctaacctcaccaacttcccggagaacggcacatttgtggtgaacattgcccagctgagccaggatgactccgggcgctacaagtgtggcctgggcatcaatagccgaggcctgtcctttgatgtcagcctggaggtcagccagggtcctgggctcctaaatgacactaaagtctacacagtggacctgggcagaacggtgaccatcaactgccctttcaagactgagaatgctcaaaagaggaagtccttgtacaagcagataggcctgtaccctgtgctggtcatcgactccagtggttatgtgaatcccaactatacaggaagaatacgccttgatattcagggtactggccagttactgttcagcgttgtcatcaaccaactcaggctcagcgatgctgggcagtatctctgccaggctggggatgattccaatagtaataagaagaatgctgacctccaagtgctaaagcccgagcccgagctggtttatgaagacctgaggggctcagtgaccttccactgtgccctgggccctgaggtggcaaacgtggccaaatttctgtgccgacagagcagtggggaaaactgtgacgtggtcgtcaacaccctggggaagagggccccagcctttgagggcaggatcctgctcaacccccaggacaaggatggctcattcagtgtggtgatcacaggcctgaggaaggaggatgcagggcgctacctgtgtggagcccattcggatggtcagctgcaggaaggctcgcctatccaggcctggcaactcttcgtcaatgaggagtccacgattccccgcagccccactgtggtgaagggggtggcaggaagctctgtggccgtgctctgcccctacaaccgtaaggaaagcaaaagcatcaagtactggtgtctctgggaaggggcccagaatggccgctgccccctgctggtggacagcgaggggtgggttaaggcccagtacgagggccgcctctccctgctggaggagccaggcaacggcaccttcactgtcatcctcaaccagctcaccagccgggacgccggcttctactggtgtctgaccaacggcgatactctctggaggaccaccgtggagatcaagattatcgaaggagaaccaaacctcaaggtaccagggaatgtcacggctgtgctgggagagactctcaaggtcccctgtcactttccatgcaaattctcctcgtacgagaaatactggtgcaagtggaataacacgggctgccaggccctgcccagccaagacgaaggccccagcaaggccttcgtgaactgtgacgagaacagccggcttgtctccctgaccctgaacctggtgaccagggctgatgagggctggtactggtgtggagtgaagcagggccacttctatggagagactgcagccgtctatgtggcagttgaagagaggaaggcagcggggtcccgcgatgtcagcctagcgaaggcagacgctgctcctgatgagaaggtgctagactctggttttcgggagattgagaacaaagccattcaggatcccaggctttttgcagaggaaaaggcggtggcagatacaagagatcaagccgatgggagcagagcatctgtggattccggcagctctgaggaacaaggtggaagctccagagcgctggtctccaccctggtgcccctgggcctggtgctggcagtgggagccgtggctgtgggggtggccagagcccggcacaggaagaacgtcgaccgagtttcaatcagaagctacaggacagacattagcatgtcagacttcgagaactccagggaatttggagccaatgacaacatgggagcctcttcgatcactcaggagacatccctcggaggaaaagaagagtttgttgccaccactgagagcaccacagagaccaaagaacccaagaaggcaaaaaggtcatccaaggaggaagccgagatggcctacaaagacttcctgctccagtccagcaccgtggccgccgaggcccaggacggcccccaggaagcctagacggtgtcgccgcctgctccctgcacccatgacaatcaccttcagaatcatgtcgatcctggggccctcagctcctggggaccccactccctgctctaacacctgcctaggtttttcctactgtcctcagaggcgtgctggtcccctcctcagtgacatcaaagcctggcctaattgttcctattggggatgagggtggcatgaggaggtcccacttgcaacttctttctgttgagagaacctcaggtacggagaagaatagaggtcctcatgggtcccttgaaggaagagggaccagggtgggagagctgattgcagaaaggagagacgtgcagcgcccctctgcacccttatcatgggatgtcaacagaatttttccctccactccatccctccctcccgtccttcccctcttcttctttccttccatcaaaagatgtatttgaattcatactagaattcaggtgctttgctagatgctgtgacaggtatgccaccaacactgctcacagcctttctgaggacaccagtgaaagaagccacagctcttcttggcgtatttatactcactgagtcttaacttttcaccaggggtgctcacctctgcccctattgggagaggtcataaaatgtctcgagtcctaaggccttaggggtcatgtatgatgagcatacacacaggtaattataaacccacattcttaccatttcacacataagaaaattgaggtttggaagagtgaagcgtttttctttttcttttttttttttgagacggagtctctcactgtcgcccaggctggagtgcagtggcgcaatctcggctcactgcaacctccgcctcccaggttgacaccattctcctgcctcaccctcccaagtagctgggactacaggcgcctgccagcacgcctggctaattttttgtatttttagtagagacagggtttcaccgtgttagccaggatggtctcgatctcctgacctcgtgatccgcctgcctctgcctcccaaagtgctgggattacaggcgtgagccaccgcgtccggcctctttttttcttttcttttttttgagacaaagtctcactgtgtcacccagactggaatgcagtgacacaatctcggctcactgaaacctctgccttccaggttcaagctattctcatgcctcagcctctcaagtagctgggactacagatgtgggccaccatgtctggctaattttttttttttttttttttttgtagagacagggtttcgccatgttgacgagactggtctcgaactcctggcctcaagtgatctgccgcctcagcttctcaaagtactgggattatataggcatgagccactgagcctggcccagaagcgtttttctcaaaggccctcagtgagataaattagatttggcatctcctgtcctgggccagggatctctctacaagagcccctgcccctctgttggaggcacagttttagaataaggaggaggagggagaagagaaaatgtaaaggagggagatctttcccaggccgcaccatttctgtcactcacatggacccaagataaaagaatggccaaaccctcacaacccctgatgtttgaagagttccaagttgaagggaaacaaagaagtgtttgatggtgccagagaggggctgctctccagaaagctaaaatttaatttcttttttcctctgagttctgtacttcaaccagcctacaagctggcacttgctaacaaatcagaagagtttattgccaccactgagagcaccacagagaccaaagaacccaagaaggcaaaaaggtcatccaaggaggaagccgagatggcctacaaagacttcctgctccagtccagcaccgtggccgccgaggcccaggacggcccccaggaagcctagacggtgtcgccgcctgctccctgcacccatgacaatcaccttcagaatcatgtcgatcctggggccctcagctcctggggacaccactccccgcctgcccctcctcctcctatatca

SEQ ID NO: 297227 - DNA, 4355 bp, Homo sapiens
agagtttcagttttggcagcagcgtccagtgccctgccagtagctcctagagaggcaggggttaccaactggccagcaggctgtgtccctgaagtcagatcaacgggagagaaggaagtggctaaaacattgcacaggagaagtcggcctgagtggtgcggcgctcgggacccaccagcaatgctgctcttcgtgctcacctgcctgctggcggtcttcccagccatctccacgaagagtcccatatttggtcccgaggaggtgaatagtgtggaaggtaactcagtgtccatcacgtgctactacccacccacctctgtcaaccggcacacccggaagtactggtgccggcagggagctagaggtggctgcataaccctcatctcctcggagggctacgtctccagcaaatatgcaggcagggctaacctcaccaacttcccggagaacggcacatttgtggtgaacattgcccagctgagccaggatgactccgggcgctacaagtgtggcctgggcatcaatagccgaggcctgtcctttgatgtcagcctggaggtcagccagggtcctgggctcctaaatgacactaaagtctacacagtggacctgggcagaacggtgaccatcaactgccctttcaagactgagaatgctcaaaagaggaagtccttgtacaagcagataggcctgtaccctgtgctggtcatcgactccagtggttatgtgaatcccaactatacaggaagaatacgccttgatattcagggtactggccagttactgttcagcgttgtcatcaaccaactcaggctcagcgatgctgggcagtatctctgccaggctggggatgattccaatagtaataagaagaatgctgacctccaagtgctaaagcccgagcccgagctggtttatgaagacctgaggggctcagtgaccttccactgtgccctgggccctgaggtggcaaacgtggccaaatttctgtgccgacagagcagtggggaaaactgtgacgtggtcgtcaacaccctggggaagagggccccagcctttgagggcaggatcctgctcaacccccaggacaaggatggctcattcagtgtggtgatcacaggcctgaggaaggaggatgcagggcgctacctgtgtggagcccattcggatggtcagctgcaggaaggctcgcctatccaggcctggcaactcttcgtcaatgaggagtccacgattccccgcagccccactgtggtgaagggggtggcaggaagctctgtggccgtgctctgcccctacaaccgtaaggaaagcaaaagcatcaagtactggtgtctctgggaaggggcccagaatggccgctgccccctgctggtggacagcgaggggtgggttaaggcccagtacgagggccgcctctccctgctggaggagccaggcaacggcaccttcactgtcatcctcaaccagctcaccagccgggacgccggcttctactggtgtctgaccaacggcgatactctctggaggaccaccgtggagatcaagattatcgaaggagaaccaaacctcaaggtaccagggaatgtcacggctgtgctgggagagactctcaaggtcccctgtcactttccatgcaaattctcctcgtacgagaaatactggtgcaagtggaataacacgggctgccaggccctgcccagccaagacgaaggccccagcaaggccttcgtgaactgtgacgagaacagccggcttgtctccctgaccctgaacctggtgaccagggctgatgagggctggtactggtgtggagtgaagcagggccacttctatggagagactgcagccgtctatgtggcagttgaagagaggaaggcagcggggtcccgcgatgtcagcctagcgaaggcagacgctgctcctgatgagaaggtgctagactctggttttcgggagattgagaacaaagccattcaggatcccaggctttttgcagaggaaaaggcggtggcagatacaagagatcaagccgatgggagcagagcatctgtggattccggcagctctgaggaacaaggtggaagctccagagcgctggtctccaccctggtgcccctgggcctggtgctggcagtgggagccgtggctgtgggggtggccagagcccggcacaggaagaacgtcgaccgagtttcaatcagaagctacaggacagacattagcatgtcagacttcgagaactccagggaatttggagccaatgacaacatgggagcctcttcgatcactcaggagacatccctcggaggaaaagaagagtttgttgccaccactgagagcaccacagagaccaaagaacccaagaaggcaaaaaggtcatccaaggaggaagccgagatggcctacaaagacttcctgctccagtccagcaccgtggccgccgaggcccaggacggcccccaggaagcctagacggtgtcgccgcctgctccctgcacccatgacaatcaccttcagaatcatgtcgatcctggggccctcagctcctggggaccccactccctgctctaacacctgcctaggtttttcctactgtcctcagaggcgtgctggtcccctcctcagtgacatcaaagcctggcctaattgttcctattggggatgagggtggcatgaggaggtcccacttgcaacttctttctgttgagagaacctcaggtacggagaagaatagaggtcctcatgggtcccttgaaggaagagggaccagggtgggagagctgattgcagaaaggagagacgtgcagcgcccctctgcacccttatcatgggatgtcaacagaatttttccctccactccatccctccctcccgtccttcccctcttcttctttccttccatcaaaagatgtatttgaattcatactagaattcaggtgctttgctagatgctgtgacaggtatgccaccaacactgctcacagcctttctgaggacaccagtgaaagaagccacagctcttcttggcgtatttatactcactgagtcttaacttttcaccaggggtgctcacctctgcccctattgggagaggtcataaaatgtctcgagtcctaaggccttaggggtcatgtatgatgagcatacacacaggtaattataaacccacattcttaccatttcacacataagaaaattgaggtttggaagagtgaagcgtttttctttttcttttttttttttgagacggagtctctcactgtcgcccaggctggagtgcagtggcgcaatctcggctcactgcaacctccgcctcccaggttgacaccattctcctgcctcaccctcccaagtagctgggactacaggcgcctgccagcacgcctggctaattttttgtatttttagtagagacagggtttcaccgtgttagccaggatggtctcgatctcctgacctcgtgatccgcctgcctctgcctcccaaagtgctgggattacaggcgtgagccaccgcgtccggcctctttttttcttttcttttttttgagacaaagtctcactgtgtcacccagactggaatgcagtgacacaatctcggctcactgaaacctctgccttccaggttcaagctattctcatgcctcagcctctcaagtagctgggactacagatgtgggccaccatgtctggctaattttttttttttttttttttttgtagagacagggtttcgccatgttgacgagactggtctcgaactcctggcctcaagtgatctgccgcctcagcttctcaaagtactgggattatataggcatgagccactgagcctggcccagaagcgtttttctcaaaggccctcagtgagataaattagatttggcatctcctgtcctgggccagggatctctctacaagagcccctgcccctctgttggaggcacagttttagaataaggaggaggagagggagatctttcccaggccgcaccatttctgtcactcacatggacccaagataaaagaatggccaaaccctcacaacccctgatgtttgaagagttccaagttgaagggaaacaaagaagtgtttgatggtgccagagaggggctgctctccagaaagctaaaatttaatttcttttttcctctgagttctgtacttcaaccagcctacaagctggcacttgctaacaaatcagaaatatgacaattaatgattaaagactgtgattgccaccaaaaaaaacagactgtatttgcacccaataccttctgtctcccagacagcctcttcagagcttttcttttctttttcttttccttttttttttttaagacagggcactc

SEQ ID NO: 297228 - DNA, 3598 bp, Homo sapiens
agagtttcagttttggcagcagcgtccagtgccctgccagtagctcctagagaggcaggggttaccaactggccagcaggctgtgtccctgaagtcagatcaacgggagagaaggaagtggctaaaacattgcacaggagaagtcggcctgagtggtgcggcgctcgggacccaccagcaatgctgctcttcgtgctcacctgcctgctggcggtcttcccagccatctccacgaagagtcccatatttggtcccgaggaggtgaatagtgtggaaggtaactcagtgtccatcacgtgctactacccacccacctctgtcaaccggcacacccggaagtactggtgccggcagggagctagaggtggctgcataaccctcatctcctcggagggctacgtctccagcaaatatgcaggcagggctaacctcaccaacttcccggagaacggcacatttgtggtgaacattgcccagctgagccaggatgactccgggcgctacaagtgtggcctgggcatcaatagccgaggcctgtcctttgatgtcagcctggaggtcagccagggtcctgggctcctaaatgacactaaagtctacacagtggacctgggcagaacggtgaccatcaactgccctttcaagactgagaatgctcaaaagaggaagtccttgtacaagcagataggcctgtaccctgtgctggtcatcgactccagtggttatgtgaatcccaactatacaggaagaatacgccttgatattcagggtactggccagttactgttcagcgttgtcatcaaccaactcaggctcagcgatgctgggcagtatctctgccaggctggggatgattccaatagtaataagaagaatgctgacctccaagtgctaaagcccgagcccgagctggtttatgaagacctgaggggctcagtgaccttccactgtgccctgggccctgaggtggcaaacgtggccaaatttctgtgccgacagagcagtggggaaaactgtgacgtggtcgtcaacaccctggggaagagggccccagcctttgagggcaggatcctgctcaacccccaggacaaggatggctcattcagtgtggtgatcacaggcctgaggaaggaggatgcagggcgctacctgtgtggagcccattcggatggtcagctgcaggaaggctcgcctatccaggcctggcaactcttcgtcaatgaggagtccacgattccccgcagccccactgtggtgaagggggtggcaggaagctctgtggccgtgctctgcccctacaaccgtaaggaaagcaaaagcatcaagtactggtgtctctgggaaggggcccagaatggccgctgccccctgctggtggacagcgaggggtgggttaaggcccagtacgagggccgcctctccctgctggaggagccaggcaacggcaccttcactgtcatcctcaaccagctcaccagccgggacgccggcttctactggtgtctgaccaacggcgatactctctggaggaccaccgtggagatcaagattatcgaaggagaaccaaacctcaaggtaccagggaatgtcacggctgtgctgggagagactctcaaggtcccctgtcactttccatgcaaattctcctcgtacgagaaatactggtgcaagtggaataacacgggctgccaggccctgcccagccaagacgaaggccccagcaaggccttcgtgaactgtgacgagaacagccggcttgtctccctgaccctgaacctggtgaccagggctgatgagggctggtactggtgtggagtgaagcagggccacttctatggagagactgcagccgtctatgtggcagttgaagagaggaaggcagcggggtcccgcgatgtcagcctagcgaaggcagacgctgctcctgatgagaaggtgctagactctggttttcgggagattgagaacaaagccattcaggatcccaggctttttgcagaggaaaaggcggtggcagatacaagagatcaagccgatgggagcagagcatctgtggattccggcagctctgaggaacaaggtggaagctccagagcgctggtctccaccctggtgcccctgggcctggtgctggcagtgggagccgtggctgtgggggtggccagagcccggcacaggaagaacgtcgaccgagtttcaatcagaagctacaggacagacattagcatgtcagacttcgagaactccagggaatttggagccaatgacaacatgggagcctcttcgatcactcaggagacatccctcggaggaaaagaagagtttgttgccaccactgagagcaccacagagaccaaagaacccaagaaggcaaaaaggtcatccaaggaggaagccgagatggcctacaaagacttcctgctccagtccagcaccgtggccgccgaggcccaggacggcccccaggaagcctagacggtgtcgccgcctgctccctgcacccatgacaatcaccttcagaatcatgtcgatcctggggccctcagctcctggggaccccactccctgctctaacacctgcctaggtttttcctactgtcctcagaggcgtgctggtcccctcctcagtgacatcaaagcctggcctaattgttcctattggggatgagggtggcatgaggaggtcccacttgcaacttctttctgttgagagaacctcaggtacggagaagaatagaggtcctcatgggtcccttgaaggaagagggaccagggtgggagagctgattgcagaaaggagagacgtgcagcgcccctctgcacccttatcatgggatgtcaacagaatttttccctccactccatccctccctcccgtccttcccctcttcttctttccttccatcaaaagatgtatttgaattcatactagaattcaggtgctttgctagatgctgtgacaggtatgccaccaacactgctcacagcctttctgaggacaccagtgaaagaagccacagctcttcttggcgtatttatactcactgagtcttaacttttcaccaggggtgctcacctctgcccctattgggagaggtcataaaatgtctcgagtcctaaggccttaggggtcatgtatgatgagcatacacacaggtaattataaacccacattcttaccatttcacacatagggagaagagaaaatgtaaaggagggagatctttcccaggccgcaccatttctgtcactcacatggacccaagataaaagaatggccaaaccctcacaacccctgatgtttgaagagttccaagttgaagggaaacaaagaagtgtttgatggtgccagagaggggctgctctccagaaagctaaaatttaatttcttttttcctctgagttctgtacttcaaccagcctacaagctggcacttgctaacaaatcagaaatatgacaattaatgattaaagactgtgattgccaccaaaaaaaacagactgtatttgcacccaataccttctgtctcccagacagcctcttcagagcttttcttttctttttcttttccttttttttttttaagacagggcactc

SEQ ID NO: 297229 - DNA, 4004 bp, Homo sapiens
agagtttcagttttggcagcagcgtccagtgccctgccagtagctcctagagaggcaggggttaccaactggccagcaggctgtgtccctgaagtcagatcaacgggagagaaggaagtggctaaaacattgcacaggagaagtcggcctgagtggtgcggcgctcgggacccaccagcaatgctgctcttcgtgctcacctgcctgctggcggtcttcccagccatctccacgaagagtcccatatttggtcccgaggaggtgaatagtgtggaaggtaactcagtgtccatcacgtgctactacccacccacctctgtcaaccggcacacccggaagtactggtgccggcagggagctagaggtggctgcataaccctcatctcctcggagggctacgtctccagcaaatatgcaggcagggctaacctcaccaacttcccggagaacggcacatttgtggtgaacattgcccagctgagccaggatgactccgggcgctacaagtgtggcctgggcatcaatagccgaggcctgtcctttgatgtcagcctggaggtcagccagggtcctgggctcctaaatgacactaaagtctacacagtggacctgggcagaacggtgaccatcaactgccctttcaagactgagaatgctcaaaagaggaagtccttgtacaagcagataggcctgtaccctgtgctggtcatcgactccagtggttatgtgaatcccaactatacaggaagaatacgccttgatattcagggtactggccagttactgttcagcgttgtcatcaaccaactcaggctcagcgatgctgggcagtatctctgccaggctggggatgattccaatagtaataagaagaatgctgacctccaagtgctaaagcccgagcccgagctggtttatgaagacctgaggggctcagtgaccttccactgtgccctgggccctgaggtggcaaacgtggccaaatttctgtgccgacagagcagtggggaaaactgtgacgtggtcgtcaacaccctggggaagagggccccagcctttgagggcaggatcctgctcaacccccaggacaaggatggctcattcagtgtggtgatcacaggcctgaggaaggaggatgcagggcgctacctgtgtggagcccattcggatggtcagctgcaggaaggctcgcctatccaggcctggcaactcttcgtcaatgaggagtccacgattccccgcagccccactgtggtgaagggggtggcaggaagctctgtggccgtgctctgcccctacaaccgtaaggaaagcaaaagcatcaagtactggtgtctctgggaaggggcccagaatggccgctgccccctgctggtggacagcgaggggtgggttaaggcccagtacgagggccgcctctccctgctggaggagccaggcaacggcaccttcactgtcatcctcaaccagctcaccagccgggacgccggcttctactggtgtctgaccaacggcgatactctctggaggaccaccgtggagatcaagattatcgaaggagaaccaaacctcaaggtaccagggaatgtcacggctgtgctgggagagactctcaaggtcccctgtcactttccatgcaaattctcctcgtacgagaaatactggtgcaagtggaataacacgggctgccaggccctgcccagccaagacgaaggccccagcaaggccttcgtgaactgtgacgagaacagccggcttgtctccctgaccctgaacctggtgaccagggctgatgagggctggtactggtgtggagtgaagcagggccacttctatggagagactgcagccgtctatgtggcagttgaagagaggaaggcagcggggtcccgcgatgtcagcctagcgaaggcagacgctgctcctgatgagaaggtgctagactctggttttcgggagattgagaacaaagccattcaggatcccaggctttttgcagaggaaaaggcggtggcagatacaagagatcaagccgatgggagcagagcatctgtggattccggcagctctgaggaacaaggtggaagctccagagcgctggtctccaccctggtgcccctgggcctggtgctggcagtgggagccgtggctgtgggggtggccagagcccggcacaggaagaacgtcgaccgagtttcaatcagaagctacaggacagacattagcatgtcagacttcgagaactccagggaatttggagccaatgacaacatgggagcctcttcgatcactcaggagacatccctcggaggaaaagaagagtttgttgccaccactgagagcaccacagagaccaaagaacccaagaaggcaaaaaggtcatccaaggaggaagccgagatggcctacaaagacttcctgctccagtccagcaccgtggccgccgaggcccaggacggcccccaggaagcctagacggtgtcgccgcctgctccctgcacccatgacaatcaccttcagaatcatgtcgatcctggggccctcagctcctggggaccccactccctgctctaacacctgcctaggtttttcctactgtcctcagaggcgtgctggtcccctcctcagtgacatcaaagcctggcctaattgttcctattggggatgagggtggcatgaggaggtcccacttgcaacttctttctgttgagagaacctcaggtacggagaagaatagaggtcctcatgggtcccttgaaggaagagggaccagggtgggagagctgattgcagaaaggagagacgtgcagcgcccctctgcacccttatcatgggatgtcaacagaatttttccctccactccatccctccctcccgtccttcccctcttcttctttccttccatcaaaagatgtatttgaattcatactagaattcaggtgctttgctagatgctgtgacaggtatgccaccaacactgctcacagcctttctgaggacaccagtgaaagaagccacagctcttcttggcgtatttatactcactgagtcttaacttttcaccaggggtgctcacctctgcccctattgggagaggtcataaaatgtctcgagtcctaaggccttaggggtcatgtatgatgagcatacacacaggtaattataaacccacattcttaccatttcacacataagaaaattgaggtttggaagagtgaagcgtttttctttttcttttttttttttgagacggagtctctcactgtcgcccaggctggagtgcagtggcgcaatctcggctcactgcaacctccgcctcccaggttgacaccattctcctgcctcaccctcccaagtagctgggactacaggcgcctgccagcacgcctggctaattttttgtatttttagtagagacagggtttcaccgtgttagccaggatggtctcgatctcctgacctcgtgatccgcctgcctctgcctcccaaagtgctgggattacaggcgtgagccaccgcgtccggcctctttttttcttttcttttttttgagacaaagtctcactgtgtcacccagactggaatgcagtgacacaatctcggctcactgaaacctctgccttccaggttcaagctattctcatgcctcagcctctcaagtagctgggactacagatgtgggccaccatgtctggctaattttttttttttttttttttttgtagagacagggtttcgccatgttgacgagactggtctcgaactcctggcctcaagtgatctgccgcctcagcttctcaaagtactgggattatataggcatgagccactgagcctggcccagaagcgtttttctcaaaggccctcagtgagataaattagatttggcatctcctgtcctgggccagggatctctctacaagagcccctgcccctctctggcaccatcaaacacttctttgtttcccttctttagtaagaacccctatatatgaggggcagct

SEQ ID NO: 297230 - DNA, 3415 bp, Homo sapiens
agagtttcagttttggcagcagcgtccagtgccctgccagtagctcctagagaggcaggggttaccaactggccagcaggctgtgtccctgaagtcagatcaacgggagagaaggaagtggctaaaacattgcacaggagaagtcggcctgagtggtgcggcgctcgggacccaccagcaatgctgctcttcgtgctcacctgcctgctggcggtcttcccagccatctccacgaagagtcccatatttggtcccgaggaggtgaatagtgtggaaggtaactcagtgtccatcacgtgctactacccacccacctctgtcaaccggcacacccggaagtactggtgccggcagggagctagaggtggctgcataaccctcatctcctcggagggctacgtctccagcaaatatgcaggcagggctaacctcaccaacttcccggagaacggcacatttgtggtgaacattgcccagctgagccaggatgactccgggcgctacaagtgtggcctgggcatcaatagccgaggcctgtcctttgatgtcagcctggaggtcagccagggtcctgggctcctaaatgacactaaagtctacacagtggacctgggcagaacggtgaccatcaactgccctttcaagactgagaatgctcaaaagaggaagtccttgtacaagcagataggcctgtaccctgtgctggtcatcgactccagtggttatgtgaatcccaactatacaggaagaatacgccttgatattcagggtactggccagttactgttcagcgttgtcatcaaccaactcaggctcagcgatgctgggcagtatctctgccaggctggggatgattccaatagtaataagaagaatgctgacctccaagtgctaaagcccgagcccgagctggtttatgaagacctgaggggctcagtgaccttccactgtgccctgggccctgaggtggcaaacgtggccaaatttctgtgccgacagagcagtggggaaaactgtgacgtggtcgtcaacaccctggggaagagggccccagcctttgagggcaggatcctgctcaacccccaggacaaggatggctcattcagtgtggtgatcacaggcctgaggaaggaggatgcagggcgctacctgtgtggagcccattcggatggtcagctgcaggaaggctcgcctatccaggcctggcaactcttcgtcaatgaggagtccacgattccccgcagccccactgtggtgaagggggtggcaggaagctctgtggccgtgctctgcccctacaaccgtaaggaaagcaaaagcatcaagtactggtgtctctgggaaggggcccagaatggccgctgccccctgctggtggacagcgaggggtgggttaaggcccagtacgagggccgcctctccctgctggaggagccaggcaacggcaccttcactgtcatcctcaaccagctcaccagccgggacgccggcttctactggtgtctgaccaacggcgatactctctggaggaccaccgtggagatcaagattatcgaaggagaaccaaacctcaaggtaccagggaatgtcacggctgtgctgggagagactctcaaggtcccctgtcactttccatgcaaattctcctcgtacgagaaatactggtgcaagtggaataacacgggctgccaggccctgcccagccaagacgaaggccccagcaaggccttcgtgaactgtgacgagaacagccggcttgtctccctgaccctgaacctggtgaccagggctgatgagggctggtactggtgtggagtgaagcagggccacttctatggagagactgcagccgtctatgtggcagttgaagagaggaaggcagcggggtcccgcgatgtcagcctagcgaaggcagacgctgctcctgatgagaaggtgctagactctggttttcgggagattgagaacaaagccattcaggatcccaggctttttgcagaggaaaaggcggtggcagatacaagagatcaagccgatgggagcagagcatctgtggattccggcagctctgaggaacaaggtggaagctccagagcgctggtctccaccctggtgcccctgggcctggtgctggcagtgggagccgtggctgtgggggtggccagagcccggcacaggaagaacgtcgaccgagtttcaatcagaagctacaggacagacattagcatgtcagacttcgagaactccagggaatttggagccaatgacaacatgggagcctcttcgatcactcaggagacatccctcggaggaaaagaagagtttgttgccaccactgagagcaccacagagaccaaagaacccaagaaggcaaaaaggtcatccaaggaggaagccgagatggcctacaaagacttcctgctccagtccagcaccgtggccgccgaggcccaggacggcccccaggaagcctagacggtgtcgccgcctgctccctgcacccatgacaatcaccttcagaatcatgtcgatcctggggccctcagctcctggggaccccactccctgctctaacacctgcctaggtttttcctactgtcctcagaggcgtgctggtcccctcctcagtgacatcaaagcctggcctaattgttcctattggggatgagggtggcatgaggaggtcccacttgcaacttctttctgttgagagaacctcaggtacggagaagaatagaggtcctcatgggtcccttgaaggaagagggaccagggtgggagagctgattgcagaaaggagagacgtgcagcgcccctctgcacccttatcatgggatgtcaacagaatttttccctccactccatccctccctcccgtccttcccctcttcttctttccttccatcaaaagatgtatttgaattcatactagaattcaggtgctttgctagatgctgtgacaggtatgccaccaacactgctcacagcctttctgaggacaccagtgaaagaagccacagctcttcttggcgtatttatactcactgagtcttaacttttcaccaggggtgctcacctctgcccctattgggagaggtcataaaatgtctcgagtcctaaggccttaggggtcatgtatgatgagcatacacacaggtaattataaacccacattcttaccatttcacacataagaaaattgaggtttggaagagtgaagcgtttttctttttcttttttttttttgagacggagtctctcactgtcgcccaggctggagtgcagtggcgcaatctcggctcactgcaacctccgcctcccaggttgacaccattctcctgcctcaccctcccaagtagctgggactacaggcgcctgccagcacgcctggcatacatcagaatcaagcttatct

SEQ ID NO: 297231 - DNA, 4191 bp, Homo sapiens
tgtttggcctataggactctgtagggagagcctgggtcagccctgcacagcattgcacaggagaagtcggcctgagtggtgcggcgctcgggacccaccagcaatgctgctcttcgtgctcacctgcctgctggcggtcttcccagccatctccacgaagagtcccatatttggtcccgaggaggtgaatagtgtggaaggtaactcagtgtccatcacgtgctactacccacccacctctgtcaaccggcacacccggaagtactggtgccggcagggagctagaggtggctgcataaccctcatctcctcggagggctacgtctccagcaaatatgcaggcagggctaacctcaccaacttcccggagaacggcacatttgtggtgaacattgcccagctgagccaggatgactccgggcgctacaagtgtggcctgggcatcaatagccgaggcctgtcctttgatgtcagcctggaggtcagccagggtcctgggctcctaaatgacactaaagtctacacagtggacctgggcagaacggtgaccatcaactgccctttcaagactgagaatgctcaaaagaggaagtccttgtacaagcagataggcctgtaccctgtgctggtcatcgactccagtggttatgtgaatcccaactatacaggaagaatacgccttgatattcagggtactggccagttactgttcagcgttgtcatcaaccaactcaggctcagcgatgctgggcagtatctctgccaggctggggatgattccaatagtaataagaagaatgctgacctccaagtgctaaagcccgagcccgagctggtttatgaagacctgaggggctcagtgaccttccactgtgccctgggccctgaggtggcaaacgtggccaaatttctgtgccgacagagcagtggggaaaactgtgacgtggtcgtcaacaccctggggaagagggccccagcctttgagggcaggatcctgctcaacccccaggacaaggatggctcattcagtgtggtgatcacaggcctgaggaaggaggatgcagggcgctacctgtgtggagcccattcggatggtcagctgcaggaaggctcgcctatccaggcctggcaactcttcgtcaatgaggagtccacgattccccgcagccccactgtggtgaagggggtggcaggaagctctgtggccgtgctctgcccctacaaccgtaaggaaagcaaaagcatcaagtactggtgtctctgggaaggggcccagaatggccgctgccccctgctggtggacagcgaggggtgggttaaggcccagtacgagggccgcctctccctgctggaggagccaggcaacggcaccttcactgtcatcctcaaccagctcaccagccgggacgccggcttctactggtgtctgaccaacggcgatactctctggaggaccaccgtggagatcaagattatcgaaggagaaccaaacctcaaggtaccagggaatgtcacggctgtgctgggagagactctcaaggtcccctgtcactttccatgcaaattctcctcgtacgagaaatactggtgcaagtggaataacacgggctgccaggccctgcccagccaagacgaaggccccagcaaggccttcgtgaactgtgacgagaacagccggcttgtctccctgaccctgaacctggtgaccagggctgatgagggctggtactggtgtggagtgaagcagggccacttctatggagagactgcagccgtctatgtggcagttgaagagaggaaggcagcggggtcccgcgatgtcagcctagcgaaggcagacgctgctcctgatgagaaggtgctagactctggttttcgggagattgagaacaaagccattcaggatcccaggctttttgcagaggaaaaggcggtggcagatacaagagatcaagccgatgggagcagagcatctgtggattccggcagctctgaggaacaaggtggaagctccagagcgctggtctccaccctggtgcccctgggcctggtgctggcagtgggagccgtggctgtgggggtggccagagcccggcacaggaagaacgtcgaccgagtttcaatcagaagctacaggacagacattagcatgtcagacttcgagaactccagggaatttggagccaatgacaacatgggagcctcttcgatcactcaggagacatccctcggaggaaaagaagagtttgttgccaccactgagagcaccacagagaccaaagaacccaagaaggcaaaaaggtcatccaaggaggaagccgagatggcctacaaagacttcctgctccagtccagcaccgtggccgccgaggcccaggacggcccccaggaagcctagacggtgtcgccgcctgctccctgcacccatgacaatcaccttcagaatcatgtcgatcctggggccctcagctcctggggaccccactccctgctctaacacctgcctaggtttttcctactgtcctcagaggcgtgctggtcccctcctcagtgacatcaaagcctggcctaattgttcctattggggatgagggtggcatgaggaggtcccacttgcaacttctttctgttgagagaacctcaggtacggagaagaatagaggtcctcatgggtcccttgaaggaagagggaccagggtgggagagctgattgcagaaaggagagacgtgcagcgcccctctgcacccttatcatgggatgtcaacagaatttttccctccactccatccctccctcccgtccttcccctcttcttctttccttccatcaaaagatgtatttgaattcatactagaattcaggtgctttgctagatgctgtgacaggtatgccaccaacactgctcacagcctttctgaggacaccagtgaaagaagccacagctcttcttggcgtatttatactcactgagtcttaacttttcaccaggggtgctcacctctgcccctattgggagaggtcataaaatgtctcgagtcctaaggccttaggggtcatgtatgatgagcatacacacaggtaattataaacccacattcttaccatttcacacataagaaaattgaggtttggaagagtgaagcgtttttctttttcttttttttttttgagacggagtctctcactgtcgcccaggctggagtgcagtggcgcaatctcggctcactgcaacctccgcctcccaggttgacaccattctcctgcctcaccctcccaagtagctgggactacaggcgcctgccagcacgcctggctaattttttgtatttttagtagagacagggtttcaccgtgttagccaggatggtctcgatctcctgacctcgtgatccgcctgcctctgcctcccaaagtgctgggattacaggcgtgagccaccgcgtccggcctctttttttcttttcttttttttgagacaaagtctcactgtgtcacccagactggaatgcagtgacacaatctcggctcactgaaacctctgccttccaggttcaagctattctcatgcctcagcctctcaagtagctgggactacagatgtgggccaccatgtctggctaattttttttttttttttttttttgtagagacagggtttcgccatgttgacgagactggtctcgaactcctggcctcaagtgatctgccgcctcagcttctcaaagtactgggattatataggcatgagccactgagcctggcccagaagcgtttttctcaaaggccctcagtgagataaattagatttggcatctcctgtcctgggccagggatctctctacaagagcccctgcccctctgttggaggcacagttttagaataaggaggaggagggagaagagaaaatgtaaaggagggagatctttcccaggccgcaccatttctgtcactcacatggacccaagataaaagaatggccaaaccctcacaacccctgatgtttgaagagttccaagttgaagggaaacaaagaagtgtttgatggtgccagagaggggctgctctccagaaagctaaaatttaatttcttttttcctctgagttctgtacttcaaccagcctacaagctggcacttgctaacaaatcagaaatatgacaattaatgattaaagactgtgattgccacca

SEQ ID NO: 297232 - DNA, 3024 bp, Homo sapiens
agagtttcagttttggcagcagcgtccagtgccctgccagtagctcctagagaggcaggggttaccaactggccagcaggctgtgtccctgaagtcagatcaacgggagagaaggaagtggctaaaacattgcacaggagaagtcggcctgagtggtgcggcgctcgggacccaccagcaatgctgctcttcgtgctcacctgcctgctggcggtcttcccagccatctccacgaagagtcccatatttggtcccgaggaggtgaatagtgtggaaggtaactcagtgtccatcacgtgctactacccacccacctctgtcaaccggcacacccggaagtactggtgccggcagggagctagaggtggctgcataaccctcatctcctcggagggctacgtctccagcaaatatgcaggcagggctaacctcaccaacttcccggagaacggcacatttgtggtgaacattgcccagctgagccaggatgactccgggcgctacaagtgtggcctgggcatcaatagccgaggcctgtcctttgatgtcagcctggaggtcagccagggtcctgggctcctaaatgacactaaagtctacacagtggacctgggcagaacggtgaccatcaactgccctttcaagactgagaatgctcaaaagaggaagtccttgtacaagcagataggcctgtaccctgtgctggtcatcgactccagtggttatgtgaatcccaactatacaggaagaatacgccttgatattcagggtactggccagttactgttcagcgttgtcatcaaccaactcaggctcagcgatgctgggcagtatctctgccaggctggggatgattccaatagtaataagaagaatgctgacctccaagtgctaaagcccgagcccgagctggtttatgaagacctgaggggctcagtgaccttccactgtgccctgggccctgaggtggcaaacgtggccaaatttctgtgccgacagagcagtggggaaaactgtgacgtggtcgtcaacaccctggggaagagggccccagcctttgagggcaggatcctgctcaacccccaggacaaggatggctcattcagtgtggtgatcacaggcctgaggaaggaggatgcagggcgctacctgtgtggagcccattcggatggtcagctgcaggaaggctcgcctatccaggcctggcaactcttcgtcaatgaggagtccacgattccccgcagccccactgtggtgaagggggtggcaggaagctctgtggccgtgctctgcccctacaaccgtaaggaaagcaaaagcatcaagtactggtgtctctgggaaggggcccagaatggccgctgccccctgctggtggacagcgaggggtgggttaaggcccagtacgagggccgcctctccctgctggaggagccaggcaacggcaccttcactgtcatcctcaaccagctcaccagccgggacgccggcttctactggtgtctgaccaacggcgatactctctggaggaccaccgtggagatcaagattatcgaaggagaaccaaacctcaaggtaccagggaatgtcacggctgtgctgggagagactctcaaggtcccctgtcactttccatgcaaattctcctcgtacgagaaatactggtgcaagtggaataacacgggctgccaggccctgcccagccaagacgaaggccccagcaaggccttcgtgaactgtgacgagaacagccggcttgtctccctgaccctgaacctggtgaccagggctgatgagggctggtactggtgtggagtgaagcagggccacttctatggagagactgcagccgtctatgtggcagttgaagagaggaaggcagcggggtcccgcgatgtcagcctagcgaaggcagacgctgctcctgatgagaaggtgctagactctggttttcgggagattgagaacaaagccattcaggatcccaggctttttgcagaggaaaaggcggtggcagatacaagagatcaagccgatgggagcagagcatctgtggattccggcagctctgaggaacaaggtggaagctccagagcgctggtctccaccctggtgcccctgggcctggtgctggcagtgggagccgtggctgtgggggtggccagagcccggcacaggaagaacgtcgaccgagtttcaatcagaagctacaggacagacattagcatgtcagacttcgagaactccagggaatttggagccaatgacaacatgggagcctcttcgatcactcaggagacatccctcggaggaaaagaagagtttgttgccaccactgagagcaccacagagaccaaagaacccaagaaggcaaaaaggtcatccaaggaggaagccgagatggcctacaaagacttcctgctccagtccagcaccgtggccgccgaggcccaggacggcccccaggaagcctagacggtgtcgccgcctgctccctgcacccatgacaatcaccttcagaatcatgtcgatcctggggccctcagctcctggggaccccactccctgctctaacacctgcctaggtttttcctactgtcctcagaggcgtgctggtcccctcctcagtgacatcaaagcctggcctaattgttcctattggggatgagggtggcatgaggaggtcccacttgcaacttctttctgttgagagaacctcaggtacggagaagaatagaggtcctcatgggtcccttgaaggaagagggaccagggtgggagagctgattgcagaaaggagagacgtgcagcgcccctctgcacccttatcatgggatgtcaacagaatttttccctccactccatccctccctcccgtccttcccctcttcttctttccttccatcaaaagatgtatttgaattcatactagaattcaggtgctttgctagatgctgtgacaggtatgccaccaacactgctcacagcctcatgtagggggatcctttaaagttggccttcccg

SEQ ID NO: 297233 - DNA, 3080 bp, Homo sapiens
agagtttcagttttggcagcagcgtccagtgccctgccagtagctcctagagaggcaggggttaccaactggccagcaggctgtgtccctgaagtcagatcaacgggagagaaggaagtggctaaaacattgcacaggagaagtcggcctgagtggtgcggcgctcgggacccaccagcaatgctgctcttcgtgctcacctgcctgctggcggtcttcccagccatctccacgaagagtcccatatttggtcccgaggaggtgaatagtgtggaaggtaactcagtgtccatcacgtgctactacccacccacctctgtcaaccggcacacccggaagtactggtgccggcagggagctagaggtggctgcataaccctcatctcctcggagggctacgtctccagcaaatatgcaggcagggctaacctcaccaacttcccggagaacggcacatttgtggtgaacattgcccagctgagccaggatgactccgggcgctacaagtgtggcctgggcatcaatagccgaggcctgtcctttgatgtcagcctggaggtcagccagggtcctgggctcctaaatgacactaaagtctacacagtggacctgggcagaacggtgaccatcaactgccctttcaagactgagaatgctcaaaagaggaagtccttgtacaagcagataggcctgtaccctgtgctggtcatcgactccagtggttatgtgaatcccaactatacaggaagaatacgccttgatattcagggtactggccagttactgttcagcgttgtcatcaaccaactcaggctcagcgatgctgggcagtatctctgccaggctggggatgattccaatagtaataagaagaatgctgacctccaagtgctaaagcccgagcccgagctggtttatgaagacctgaggggctcagtgaccttccactgtgccctgggccctgaggtggcaaacgtggccaaatttctgtgccgacagagcagtggggaaaactgtgacgtggtcgtcaacaccctggggaagagggccccagcctttgagggcaggatcctgctcaacccccaggacaaggatggctcattcagtgtggtgatcacaggcctgaggaaggaggatgcagggcgctacctgtgtggagcccattcggatggtcagctgcaggaaggctcgcctatccaggcctggcaactcttcgtcaatgaggagtccacgattccccgcagccccactgtggtgaagggggtggcaggaagctctgtggccgtgctctgcccctacaaccgtaaggaaagcaaaagcatcaagtactggtgtctctgggaaggggcccagaatggccgctgccccctgctggtggacagcgaggggtgggttaaggcccagtacgagggccgcctctccctgctggaggagccaggcaacggcaccttcactgtcatcctcaaccagctcaccagccgggacgccggcttctactggtgtctgaccaacggcgatactctctggaggaccaccgtggagatcaagattatcgaaggagaaccaaacctcaaggtaccagggaatgtcacggctgtgctgggagagactctcaaggtcccctgtcactttccatgcaaattctcctcgtacgagaaatactggtgcaagtggaataacacgggctgccaggccctgcccagccaagacgaaggccccagcaaggccttcgtgaactgtgacgagaacagccggcttgtctccctgaccctgaacctggtgaccagggctgatgagggctggtactggtgtggagtgaagcagggccacttctatggagagactgcagccgtctatgtggcagttgaagagaggaaggcagcggggtcccgcgatgtcagcctagcgaaggcagacgctgctcctgatgagaaggtgctagactctggttttcgggagattgagaacaaagccattcaggatcccaggctttttgcagaggaaaaggcggtggcagatacaagagatcaagccgatgggagcagagcatctgtggattccggcagctctgaggaacaaggtggaagctccagagcgctggtctccaccctggtgcccctgggcctggtgctggcagtgggagccgtggctgtgggggtggccagagcccggcacaggaagaacgtcgaccgagtttcaatcagaagctacaggacagacattagcatgtcagacttcgagaactccagggaatttggagccaatgacaacatgggagcctcttcgatcactcaggagacatccctcggaggaaaagaagagtttgttgccaccactgagagcaccacagagaccaaagaacccaagaaggcaaaaaggtcatccaaggaggaagccgagatggcctacaaagacttcctgctccagtccagcaccgtggccgccgaggcccaggacggcccccaggaagcctagacggtgtcgccgcctgctccctgcacccatgacaatcaccttcagaatcatgtcgatcctggggccctcagctcctggggaccccactccctgctctaacacctgcctaggtttttcctactgtcctcagaggcgtgctggtcccctcctcagtgacatcaaagcctggcctaattgttcctattggggatgagggtggcatgaggaggtcccacttgcaacttctttctgttgagagaacctcaggtacggagaagaatagaggtcctcatgggtcccttgaaggaagagggaccagggtgggagagctgattgcagaaaggagagacgtgcagcgcccctctgcacccttatcatgggatgtcaacagaatttttccctccactccatccctccctcccgtccttcccctcttcttctttccttccatcaaaagatgtatttgaattcatactagaattcaggtgctttgctagatgctgtgacaggtatgccaccaacactgctcacagcctatgaccatgactttacccagtcagcgcctctcgactacacctgactggccgtatactctagccagctacagctctgcacgtatcgcatca

SEQ ID NO: 297234 - DNA, 3900 bp, Homo sapiens
tgtttggcctataggactctgtagggagagcctgggtcagccctgcacagcattgcacaggagaagtcggcctgagtggtgcggcgctcgggacccaccagcaatgctgctcttcgtgctcacctgcctgctggcggtcttcccagccatctccacgaagagtcccatatttggtcccgaggaggtgaatagtgtggaaggtcctgggctcctaaatgacactaaagtctacacagtggacctgggcagaacggtgaccatcaactgccctttcaagactgagaatgctcaaaagaggaagtccttgtacaagcagataggcctgtaccctgtgctggtcatcgactccagtggttatgtgaatcccaactatacaggaagaatacgccttgatattcagggtactggccagttactgttcagcgttgtcatcaaccaactcaggctcagcgatgctgggcagtatctctgccaggctggggatgattccaatagtaataagaagaatgctgacctccaagtgctaaagcccgagcccgagctggtttatgaagacctgaggggctcagtgaccttccactgtgccctgggccctgaggtggcaaacgtggccaaatttctgtgccgacagagcagtggggaaaactgtgacgtggtcgtcaacaccctggggaagagggccccagcctttgagggcaggatcctgctcaacccccaggacaaggatggctcattcagtgtggtgatcacaggcctgaggaaggaggatgcagggcgctacctgtgtggagcccattcggatggtcagctgcaggaaggctcgcctatccaggcctggcaactcttcgtcaatgaggagtccacgattccccgcagccccactgtggtgaagggggtggcaggaagctctgtggccgtgctctgcccctacaaccgtaaggaaagcaaaagcatcaagtactggtgtctctgggaaggggcccagaatggccgctgccccctgctggtggacagcgaggggtgggttaaggcccagtacgagggccgcctctccctgctggaggagccaggcaacggcaccttcactgtcatcctcaaccagctcaccagccgggacgccggcttctactggtgtctgaccaacggcgatactctctggaggaccaccgtggagatcaagattatcgaaggagaaccaaacctcaaggtaccagggaatgtcacggctgtgctgggagagactctcaaggtcccctgtcactttccatgcaaattctcctcgtacgagaaatactggtgcaagtggaataacacgggctgccaggccctgcccagccaagacgaaggccccagcaaggccttcgtgaactgtgacgagaacagccggcttgtctccctgaccctgaacctggtgaccagggctgatgagggctggtactggtgtggagtgaagcagggccacttctatggagagactgcagccgtctatgtggcagttgaagagaggaaggcagcggggtcccgcgatgtcagcctagcgaaggcagacgctgctcctgatgagaaggtgctagactctggttttcgggagattgagaacaaagccattcaggatcccaggctttttgcagaggaaaaggcggtggcagatacaagagatcaagccgatgggagcagagcatctgtggattccggcagctctgaggaacaaggtggaagctccagagcgctggtctccaccctggtgcccctgggcctggtgctggcagtgggagccgtggctgtgggggtggccagagcccggcacaggaagaacgtcgaccgagtttcaatcagaagctacaggacagacattagcatgtcagacttcgagaactccagggaatttggagccaatgacaacatgggagcctcttcgatcactcaggagacatccctcggaggaaaagaagagtttgttgccaccactgagagcaccacagagaccaaagaacccaagaaggcaaaaaggtcatccaaggaggaagccgagatggcctacaaagacttcctgctccagtccagcaccgtggccgccgaggcccaggacggcccccaggaagcctagacggtgtcgccgcctgctccctgcacccatgacaatcaccttcagaatcatgtcgatcctggggccctcagctcctggggaccccactccctgctctaacacctgcctaggtttttcctactgtcctcagaggcgtgctggtcccctcctcagtgacatcaaagcctggcctaattgttcctattggggatgagggtggcatgaggaggtcccacttgcaacttctttctgttgagagaacctcaggtacggagaagaatagaggtcctcatgggtcccttgaaggaagagggaccagggtgggagagctgattgcagaaaggagagacgtgcagcgcccctctgcacccttatcatgggatgtcaacagaatttttccctccactccatccctccctcccgtccttcccctcttcttctttccttccatcaaaagatgtatttgaattcatactagaattcaggtgctttgctagatgctgtgacaggtatgccaccaacactgctcacagcctttctgaggacaccagtgaaagaagccacagctcttcttggcgtatttatactcactgagtcttaacttttcaccaggggtgctcacctctgcccctattgggagaggtcataaaatgtctcgagtcctaaggccttaggggtcatgtatgatgagcatacacacaggtaattataaacccacattcttaccatttcacacataagaaaattgaggtttggaagagtgaagcgtttttctttttcttttttttttttgagacggagtctctcactgtcgcccaggctggagtgcagtggcgcaatctcggctcactgcaacctccgcctcccaggttgacaccattctcctgcctcaccctcccaagtagctgggactacaggcgcctgccagcacgcctggctaattttttgtatttttagtagagacagggtttcaccgtgttagccaggatggtctcgatctcctgacctcgtgatccgcctgcctctgcctcccaaagtgctgggattacaggcgtgagccaccgcgtccggcctctttttttcttttcttttttttgagacaaagtctcactgtgtcacccagactggaatgcagtgacacaatctcggctcactgaaacctctgccttccaggttcaagctattctcatgcctcagcctctcaagtagctgggactacagatgtgggccaccatgtctggctaattttttttttttttttttttttgtagagacagggtttcgccatgttgacgagactggtctcgaactcctggcctcaagtgatctgccgcctcagcttctcaaagtactgggattatataggcatgagccactgagcctggcccagaagcgtttttctcaaaggccctcagtgagataaattagatttggcatctcctgtcctgggccagggatctctctacaagagcccctgcccctctgttggaggcacagttttagaataaggaggaggagggagaagagaaaatgtaaaggagggagatctttcccaggccgcaccatttctgtcactcacatggacccaagataaaagaatggccaaaccctcacaacccctgatgtttgaagagttccaagttgaagggaaacaaagaagtgtttgatggtgccagagaggggctgctctccagaaagctaaaatttaatttcttttttcctctgagttctgtacttcaaccagcctacaagctggcacttgctaacaaatcagaaatatgacaattaatgattaaagactgtgattgccacca

SEQ ID NO: 297235 - DNA, 3761 bp, Homo sapiens
caccagcgtcggtggttgcgtatctcctgccactggctgccgactacagttcatttatctggtcctgggctcctaaatgacactaaagtctacacagtggacctgggcagaacggtgaccatcaactgccctttcaagactgagaatgctcaaaagaggaagtccttgtacaagcagataggcctgtaccctgtgctggtcatcgactccagtggttatgtgaatcccaactatacaggaagaatacgccttgatattcagggtactggccagttactgttcagcgttgtcatcaaccaactcaggctcagcgatgctgggcagtatctctgccaggctggggatgattccaatagtaataagaagaatgctgacctccaagtgctaaagcccgagcccgagctggtttatgaagacctgaggggctcagtgaccttccactgtgccctgggccctgaggtggcaaacgtggccaaatttctgtgccgacagagcagtggggaaaactgtgacgtggtcgtcaacaccctggggaagagggccccagcctttgagggcaggatcctgctcaacccccaggacaaggatggctcattcagtgtggtgatcacaggcctgaggaaggaggatgcagggcgctacctgtgtggagcccattcggatggtcagctgcaggaaggctcgcctatccaggcctggcaactcttcgtcaatgaggagtccacgattccccgcagccccactgtggtgaagggggtggcaggaagctctgtggccgtgctctgcccctacaaccgtaaggaaagcaaaagcatcaagtactggtgtctctgggaaggggcccagaatggccgctgccccctgctggtggacagcgaggggtgggttaaggcccagtacgagggccgcctctccctgctggaggagccaggcaacggcaccttcactgtcatcctcaaccagctcaccagccgggacgccggcttctactggtgtctgaccaacggcgatactctctggaggaccaccgtggagatcaagattatcgaaggagaaccaaacctcaaggtaccagggaatgtcacggctgtgctgggagagactctcaaggtcccctgtcactttccatgcaaattctcctcgtacgagaaatactggtgcaagtggaataacacgggctgccaggccctgcccagccaagacgaaggccccagcaaggccttcgtgaactgtgacgagaacagccggcttgtctccctgaccctgaacctggtgaccagggctgatgagggctggtactggtgtggagtgaagcagggccacttctatggagagactgcagccgtctatgtggcagttgaagagaggaaggcagcggggtcccgcgatgtcagcctagcgaaggcagacgctgctcctgatgagaaggtgctagactctggttttcgggagattgagaacaaagccattcaggatcccaggctttttgcagaggaaaaggcggtggcagatacaagagatcaagccgatgggagcagagcatctgtggattccggcagctctgaggaacaaggtggaagctccagagcgctggtctccaccctggtgcccctgggcctggtgctggcagtgggagccgtggctgtgggggtggccagagcccggcacaggaagaacgtcgaccgagtttcaatcagaagctacaggacagacattagcatgtcagacttcgagaactccagggaatttggagccaatgacaacatgggagcctcttcgatcactcaggagacatccctcggaggaaaagaagagtttgttgccaccactgagagcaccacagagaccaaagaacccaagaaggcaaaaaggtcatccaaggaggaagccgagatggcctacaaagacttcctgctccagtccagcaccgtggccgccgaggcccaggacggcccccaggaagcctagacggtgtcgccgcctgctccctgcacccatgacaatcaccttcagaatcatgtcgatcctggggccctcagctcctggggaccccactccctgctctaacacctgcctaggtttttcctactgtcctcagaggcgtgctggtcccctcctcagtgacatcaaagcctggcctaattgttcctattggggatgagggtggcatgaggaggtcccacttgcaacttctttctgttgagagaacctcaggtacggagaagaatagaggtcctcatgggtcccttgaaggaagagggaccagggtgggagagctgattgcagaaaggagagacgtgcagcgcccctctgcacccttatcatgggatgtcaacagaatttttccctccactccatccctccctcccgtccttcccctcttcttctttccttccatcaaaagatgtatttgaattcatactagaattcaggtgctttgctagatgctgtgacaggtatgccaccaacactgctcacagcctttctgaggacaccagtgaaagaagccacagctcttcttggcgtatttatactcactgagtcttaacttttcaccaggggtgctcacctctgcccctattgggagaggtcataaaatgtctcgagtcctaaggccttaggggtcatgtatgatgagcatacacacaggtaattataaacccacattcttaccatttcacacataagaaaattgaggtttggaagagtgaagcgtttttctttttcttttttttttttgagacggagtctctcactgtcgcccaggctggagtgcagtggcgcaatctcggctcactgcaacctccgcctcccaggttgacaccattctcctgcctcaccctcccaagtagctgggactacaggcgcctgccagcacgcctggctaattttttgtatttttagtagagacagggtttcaccgtgttagccaggatggtctcgatctcctgacctcgtgatccgcctgcctctgcctcccaaagtgctgggattacaggcgtgagccaccgcgtccggcctctttttttcttttcttttttttgagacaaagtctcactgtgtcacccagactggaatgcagtgacacaatctcggctcactgaaacctctgccttccaggttcaagctattctcatgcctcagcctctcaagtagctgggactacagatgtgggccaccatgtctggctaattttttttttttttttttttttgtagagacagggtttcgccatgttgacgagactggtctcgaactcctggcctcaagtgatctgccgcctcagcttctcaaagtactgggattatataggcatgagccactgagcctggcccagaagcgtttttctcaaaggccctcagtgagataaattagatttggcatctcctgtcctgggccagggatctctctacaagagcccctgcccctctgttggaggcacagttttagaataaggaggaggagggagaagagaaaatgtaaaggagggagatctttcccaggccgcaccatttctgtcactcacatggacccaagataaaagaatggccaaaccctcacaacccctgatgtttgaagagttccaagttgaagggaaacaaagaagtgtttgatggtgccagagaggggctgctctccagaaagctaaaatttaatttcttttttcctctgagttctgtacttcaaccagcctacaagctggcacttgctaacaaatcagaaatatgacaattaatgattaaagactgtgattgccacca

SEQ ID NO: 297236 - DNA, 3513 bp, Homo sapiens
ccaacaattaagctcacctttgctacatactttatagtttacatcataccatcctaaatatattttcttgatttgggcataatccattgggccacttttgtggaatacacttgttagtgtactaaatagacaaaaacctacacagagggagactttgtaagaagccaaagaagagctgatatcctctccttcaactccttccattctctgctcagaataagatgggggaaaagaacaacatgtgcaggctgatggggagactccaagcccttggagtctggccctgatggctccagctgcaggctctgtgacattaggaaagctccttttcattttctgaagagggtaaggtgatgcgtgtaaacttcactccccatcctggctgagaccccgggaagaaggcttctcaggccacgcaaggctcttcctgcgtggccatcctcccatcccatctctgtctgtgcttccagagtccacgattccccgcagccccactgtggtgaagggggtggcaggaagctctgtggccgtgctctgcccctacaaccgtaaggaaagcaaaagcatcaagtactggtgtctctgggaaggggcccagaatggccgctgccccctgctggtggacagcgaggggtgggttaaggcccagtacgagggccgcctctccctgctggaggagccaggcaacggcaccttcactgtcatcctcaaccagctcaccagccgggacgccggcttctactggtgtctgaccaacggcgatactctctggaggaccaccgtggagatcaagattatcgaaggagaaccaaacctcaaggtaccagggaatgtcacggctgtgctgggagagactctcaaggtcccctgtcactttccatgcaaattctcctcgtacgagaaatactggtgcaagtggaataacacgggctgccaggccctgcccagccaagacgaaggccccagcaaggccttcgtgaactgtgacgagaacagccggcttgtctccctgaccctgaacctggtgaccagggctgatgagggctggtactggtgtggagtgaagcagggccacttctatggagagactgcagccgtctatgtggcagttgaagagaggaaggcagcggggtcccgcgatgtcagcctagcgaaggcagacgctgctcctgatgagaaggtgctagactctggttttcgggagattgagaacaaagccattcaggatcccaggctttttgcagaggaaaaggcggtggcagatacaagagatcaagccgatgggagcagagcatctgtggattccggcagctctgaggaacaaggtggaagctccagagcgctggtctccaccctggtgcccctgggcctggtgctggcagtgggagccgtggctgtgggggtggccagagcccggcacaggaagaacgtcgaccgagtttcaatcagaagctacaggacagacattagcatgtcagacttcgagaactccagggaatttggagccaatgacaacatgggagcctcttcgatcactcaggagacatccctcggaggaaaagaagagtttgttgccaccactgagagcaccacagagaccaaagaacccaagaaggcaaaaaggtcatccaaggaggaagccgagatggcctacaaagacttcctgctccagtccagcaccgtggccgccgaggcccaggacggcccccaggaagcctagacggtgtcgccgcctgctccctgcacccatgacaatcaccttcagaatcatgtcgatcctggggccctcagctcctggggaccccactccctgctctaacacctgcctaggtttttcctactgtcctcagaggcgtgctggtcccctcctcagtgacatcaaagcctggcctaattgttcctattggggatgagggtggcatgaggaggtcccacttgcaacttctttctgttgagagaacctcaggtacggagaagaatagaggtcctcatgggtcccttgaaggaagagggaccagggtgggagagctgattgcagaaaggagagacgtgcagcgcccctctgcacccttatcatgggatgtcaacagaatttttccctccactccatccctccctcccgtccttcccctcttcttctttccttccatcaaaagatgtatttgaattcatactagaattcaggtgctttgctagatgctgtgacaggtatgccaccaacactgctcacagcctttctgaggacaccagtgaaagaagccacagctcttcttggcgtatttatactcactgagtcttaacttttcaccaggggtgctcacctctgcccctattgggagaggtcataaaatgtctcgagtcctaaggccttaggggtcatgtatgatgagcatacacacaggtaattataaacccacattcttaccatttcacacataagaaaattgaggtttggaagagtgaagcgtttttctttttcttttttttttttgagacggagtctctcactgtcgcccaggctggagtgcagtggcgcaatctcggctcactgcaacctccgcctcccaggttgacaccattctcctgcctcaccctcccaagtagctgggactacaggcgcctgccagcacgcctggctaattttttgtatttttagtagagacagggtttcaccgtgttagccaggatggtctcgatctcctgacctcgtgatccgcctgcctctgcctcccaaagtgctgggattacaggcgtgagccaccgcgtccggcctctttttttcttttcttttttttgagacaaagtctcactgtgtcacccagactggaatgcagtgacacaatctcggctcactgaaacctctgccttccaggttcaagctattctcatgcctcagcctctcaagtagctgggactacagatgtgggccaccatgtctggctaattttttttttttttttttttttgtagagacagggtttcgccatgttgacgagactggtctcgaactcctggcctcaagtgatctgccgcctcagcttctcaaagtactgggattatataggcatgagccactgagcctggcccagaagcgtttttctcaaaggccctcagtgagataaattagatttggcatctcctgtcctgggccagggatctctctacaagagcccctgcccctctgttggaggcacagttttagaataaggaggaggagggagaagagaaaatgtaaaggagggagatctttcccaggccgcaccatttctgtcactcacatggacccaagataaaagaatggccaaaccctcacaacccctgatgtttgaagagttccaagttgaagggaaacaaagaagtgtttgatggtgccagagaggggctgctctccagaaagctaaaatttaatttcttttttcctctgagttctgtacttcaaccagcctacaagctggcacttgctaacaaatcagaaatatgacaattaatgattaaagactgtgattgccacca

SEQ ID NO: 297237 - DNA, 2508 bp, Homo sapiens
tactctagaggatcttatcgacttctgctctgcgtcgaccttctgttctggttgaccttctgctctgcgtcgaccttctgctcctgcagccgtctatgtggcagttgaagagaggaaggcagcggggtcccgcgatgtcagcctagcgaaggcagacgctgctcctgatgagaaggtgctagactctggttttcgggagattgagaacaaagccattcaggatcccaggctttttgcagaggaaaaggcggtggcagatacaagagatcaagccgatgggagcagagcatctgtggattccggcagctctgaggaacaaggtggaagctccagagcgctggtctccaccctggtgcccctgggcctggtgctggcagtgggagccgtggctgtgggggtggccagagcccggcacaggaagaacgtcgaccgagtttcaatcagaagctacaggacagacattagcatgtcagacttcgagaactccagggaatttggagccaatgacaacatgggagcctcttcgatcactcaggagacatccctcggaggaaaagaagagtttgttgccaccactgagagcaccacagagaccaaagaacccaagaaggcaaaaaggtcatccaaggaggaagccgagatggcctacaaagacttcctgctccagtccagcaccgtggccgccgaggcccaggacggcccccaggaagcctagacggtgtcgccgcctgctccctgcacccatgacaatcaccttcagaatcatgtcgatcctggggccctcagctcctggggaccccactccctgctctaacacctgcctaggtttttcctactgtcctcagaggcgtgctggtcccctcctcagtgacatcaaagcctggcctaattgttcctattggggatgagggtggcatgaggaggtcccacttgcaacttctttctgttgagagaacctcaggtacggagaagaatagaggtcctcatgggtcccttgaaggaagagggaccagggtgggagagctgattgcagaaaggagagacgtgcagcgcccctctgcacccttatcatgggatgtcaacagaatttttccctccactccatccctccctcccgtccttcccctcttcttctttccttccatcaaaagatgtatttgaattcatactagaattcaggtgctttgctagatgctgtgacaggtatgccaccaacactgctcacagcctttctgaggacaccagtgaaagaagccacagctcttcttggcgtatttatactcactgagtcttaacttttcaccaggggtgctcacctctgcccctattgggagaggtcataaaatgtctcgagtcctaaggccttaggggtcatgtatgatgagcatacacacaggtaattataaacccacattcttaccatttcacacataagaaaattgaggtttggaagagtgaagcgtttttctttttcttttttttttttgagacggagtctctcactgtcgcccaggctggagtgcagtggcgcaatctcggctcactgcaacctccgcctcccaggttgacaccattctcctgcctcaccctcccaagtagctgggactacaggcgcctgccagcacgcctggctaattttttgtatttttagtagagacagggtttcaccgtgttagccaggatggtctcgatctcctgacctcgtgatccgcctgcctctgcctcccaaagtgctgggattacaggcgtgagccaccgcgtccggcctctttttttcttttcttttttttgagacaaagtctcactgtgtcacccagactggaatgcagtgacacaatctcggctcactgaaacctctgccttccaggttcaagctattctcatgcctcagcctctcaagtagctgggactacagatgtgggccaccatgtctggctaattttttttttttttttttttttgtagagacagggtttcgccatgttgacgagactggtctcgaactcctggcctcaagtgatctgccgcctcagcttctcaaagtactgggattatataggcatgagccactgagcctggcccagaagcgtttttctcaaaggccctcagtgagataaattagatttggcatctcctgtcctgggccagggatctctctacaagagcccctgcccctctgttggaggcacagttttagaataaggaggaggagggagaagagaaaatgtaaaggagggagatctttcccaggccgcaccatttctgtcactcacatggacccaagataaaagaatggccaaaccctcacaacccctgatgtttgaagagttccaagttgaagggaaacaaagaagtgtttgatggtgccagagaggggctgctctccagaaagctaaaatttaatttcttttttcctctgagttctgtacttcaaccagcctacaagctggcacttgctaacaaatcagaaatatgacaattaatgattaaagactgtgattgccacca

SEQ ID NO: 297238 - DNA, 1754 bp, Homo sapiens
atgcttcgccaacacggtgctgtcgggcggtaccaacatgtatccgggcattgccgacaggatgcagaaggagatcacctactgtcctcagaggcgtgctggtcccctcctcagtgacatcaaagcctggcctaattgttcctattggggatgagggtggcatgaggaggtcccacttgcaacttctttctgttgagagaacctcaggtacggagaagaatagaggtcctcatgggtcccttgaaggaagagggaccagggtgggagagctgattgcagaaaggagagacgtgcagcgcccctctgcacccttatcatgggatgtcaacagaatttttccctccactccatccctccctcccgtccttcccctcttcttctttccttccatcaaaagatgtatttgaattcatactagaattcaggtgctttgctagatgctgtgacaggtatgccaccaacactgctcacagcctttctgaggacaccagtgaaagaagccacagctcttcttggcgtatttatactcactgagtcttaacttttcaccaggggtgctcacctctgcccctattgggagaggtcataaaatgtctcgagtcctaaggccttaggggtcatgtatgatgagcatacacacaggtaattataaacccacattcttaccatttcacacataagaaaattgaggtttggaagagtgaagcgtttttctttttcttttttttttttgagacggagtctctcactgtcgcccaggctggagtgcagtggcgcaatctcggctcactgcaacctccgcctcccaggttgacaccattctcctgcctcaccctcccaagtagctgggactacaggcgcctgccagcacgcctggctaattttttgtatttttagtagagacagggtttcaccgtgttagccaggatggtctcgatctcctgacctcgtgatccgcctgcctctgcctcccaaagtgctgggattacaggcgtgagccaccgcgtccggcctctttttttcttttcttttttttgagacaaagtctcactgtgtcacccagactggaatgcagtgacacaatctcggctcactgaaacctctgccttccaggttcaagctattctcatgcctcagcctctcaagtagctgggactacagatgtgggccaccatgtctggctaattttttttttttttttttttttgtagagacagggtttcgccatgttgacgagactggtctcgaactcctggcctcaagtgatctgccgcctcagcttctcaaagtactgggattatataggcatgagccactgagcctggcccagaagcgtttttctcaaaggccctcagtgagataaattagatttggcatctcctgtcctgggccagggatctctctacaagagcccctgcccctctgttggaggcacagttttagaataaggaggaggagggagaagagaaaatgtaaaggagggagatctttcccaggccgcaccatttctgtcactcacatggacccaagataaaagaatggccaaaccctcacaacccctgatgtttgaagagttccaagttgaagggaaacaaagaagtgtttgatggtgccagagaggggctgctctccagaaagctaaaatttaatttcttttttcctctgagttctgtacttcaaccagcctacaagctggcacttgctaacaaatcagaaatatgacaattaatgattaaagactgtgattgccacca

SEQ ID NO: 297239 - DNA, 1633 bp, Homo sapiens
aaatttctcctttagataggaacataaccaaacaatactaatctgaagcatcatatgtcaacttctttctgttgagagaacctcaggtacggagaagaatagaggtcctcatgggtcccttgaaggaagagggaccagggtgggagagctgattgcagaaaggagagacgtgcagcgcccctctgcacccttatcatgggatgtcaacagaatttttccctccactccatccctccctcccgtccttcccctcttcttctttccttccatcaaaagatgtatttgaattcatactagaattcaggtgctttgctagatgctgtgacaggtatgccaccaacactgctcacagcctttctgaggacaccagtgaaagaagccacagctcttcttggcgtatttatactcactgagtcttaacttttcaccaggggtgctcacctctgcccctattgggagaggtcataaaatgtctcgagtcctaaggccttaggggtcatgtatgatgagcatacacacaggtaattataaacccacattcttaccatttcacacataagaaaattgaggtttggaagagtgaagcgtttttctttttcttttttttttttgagacggagtctctcactgtcgcccaggctggagtgcagtggcgcaatctcggctcactgcaacctccgcctcccaggttgacaccattctcctgcctcaccctcccaagtagctgggactacaggcgcctgccagcacgcctggctaattttttgtatttttagtagagacagggtttcaccgtgttagccaggatggtctcgatctcctgacctcgtgatccgcctgcctctgcctcccaaagtgctgggattacaggcgtgagccaccgcgtccggcctctttttttcttttcttttttttgagacaaagtctcactgtgtcacccagactggaatgcagtgacacaatctcggctcactgaaacctctgccttccaggttcaagctattctcatgcctcagcctctcaagtagctgggactacagatgtgggccaccatgtctggctaattttttttttttttttttttttgtagagacagggtttcgccatgttgacgagactggtctcgaactcctggcctcaagtgatctgccgcctcagcttctcaaagtactgggattatataggcatgagccactgagcctggcccagaagcgtttttctcaaaggccctcagtgagataaattagatttggcatctcctgtcctgggccagggatctctctacaagagcccctgcccctctgttggaggcacagttttagaataaggaggaggagggagaagagaaaatgtaaaggagggagatctttcccaggccgcaccatttctgtcactcacatggacccaagataaaagaatggccaaaccctcacaacccctgatgtttgaagagttccaagttgaagggaaacaaagaagtgtttgatggtgccagagaggggctgctctccagaaagctaaaatttaatttcttttttcctctgagttctgtacttcaaccagcctacaagctggcacttgctaacaaatcagaaatatgacaattaatgattaaagactgtgattgccacca

SEQ ID NO: 297240 - DNA, 2777 bp, Homo sapiens
  misc_feature (2767)..(2767): n is a, c, g, or t
agagtttcagttttggcagcagcgtccagtgccctgccagtagctcctagagaggcaggggttaccaactggccagcaggctgtgtccctgaagtcagatcaacgggagagaaggaagtggctaaaacattgcacaggagaagtcggcctgagtggtgcggcgctcgggacccaccagcaatgctgctcttcgtgctcacctgcctgctggcggtcttcccagccatctccacgaagagtcccatatttggtcccgaggaggtgaatagtgtggaaggtaactcagtgtccatcacgtgctactacccacccacctctgtcaaccggcacacccggaagtactggtgccggcagggagctagaggtggctgcataaccctcatctcctcggagggctacgtctccagcaaatatgcaggcagggctaacctcaccaacttcccggagaacggcacatttgtggtgaacattgcccagctgagccaggatgactccgggcgctacaagtgtggcctgggcatcaatagccgaggcctgtcctttgatgtcagcctggaggtcagccagggtcctgggctcctaaatgacactaaagtctacacagtggacctgggcagaacggtgaccatcaactgccctttcaagactgagaatgctcaaaagaggaagtccttgtacaagcagataggcctgtaccctgtgctggtcatcgactccagtggttatgtgaatcccaactatacaggaagaatacgccttgatattcagggtactggccagttactgttcagcgttgtcatcaaccaactcaggctcagcgatgctgggcagtatctctgccaggctggggatgattccaatagtaataagaagaatgctgacctccaagtgctaaagcccgagcccgagctggtttatgaagacctgaggggctcagtgaccttccactgtgccctgggccctgaggtggcaaacgtggccaaatttctgtgccgacagagcagtggggaaaactgtgacgtggtcgtcaacaccctggggaagagggccccagcctttgagggcaggatcctgctcaacccccaggacaaggatggctcattcagtgtggtgatcacaggcctgaggaaggaggatgcagggcgctacctgtgtggagcccattcggatggtcagctgcaggaaggctcgcctatccaggcctggcaactcttcgtcaatgaggagtccacgattccccgcagccccactgtggtgaagggggtggcaggaagctctgtggccgtgctctgcccctacaaccgtaaggaaagcaaaagcatcaagtactggtgtctctgggaaggggcccagaatggccgctgccccctgctggtggacagcgaggggtgggttaaggcccagtacgagggccgcctctccctgctggaggagccaggcaacggcaccttcactgtcatcctcaaccagctcaccagccgggacgccggcttctactggtgtctgaccaacggcgatactctctggaggaccaccgtggagatcaagattatcgaaggagaaccaaacctcaaggtaccagggaatgtcacggctgtgctgggagagactctcaaggtcccctgtcactttccatgcaaattctcctcgtacgagaaatactggtgcaagtggaataacacgggctgccaggccctgcccagccaagacgaaggccccagcaaggccttcgtgaactgtgacgagaacagccggcttgtctccctgaccctgaacctggtgaccagggctgatgagggctggtactggtgtggagtgaagcagggccacttctatggagagactgcagccgtctatgtggcagttgaagagaggaaggcagcggggtcccgcgatgtcagcctagcgaaggcagacgctgctcctgatgagaaggtgctagactctggttttcgggagattgagaacaaagccattcaggatcccaggctttttgcagaggaaaaggcggtggcagatacaagagatcaagccgatgggagcagagcatctgtggattccggcagctctgaggaacaaggtggaagctccagagcgctggtctccaccctggtgcccctgggcctggtgctggcagtgggagccgtggctgtgggggtggccagagcccggcacaggaagaacgtcgaccgagtttcaatcagaagctacaggacagacattagcatgtcagacttcgagaactccagggaatttggagccaatgacaacatgggagcctcttcgatcactcaggagacatccctcggaggaaaagaagagtttgttgccaccactgagagcaccacagagaccaaagaacccaagaaggcaaaaaggtcatccaaggaggaagccgagatggcctacaaagacttcctgctccagtccagcaccgtggccgccgaggcccaggacggcccccaggaagcctagacggtgtcgccgcctgctccctgcacccatgacaatcaccttcagaatcatgtcgatcctggggccctcagctcctggggaccccactccctgctctaacacctgcctaggtttttcctactgtcctcagaggcgtgctggtcccctcctcagtgacatcaaagcctggcctaattgttcctattggggatgagggtggcatgaggaggtcccacttgcaacttctttctgttgagagaacctcaggtacggagaagaatagaggtcaatggtcccgcctgtcaatggtccngcctggtacc

SEQ ID NO: 297241 - DNA, 2956 bp, Homo sapiens
agagtttcagttttggcagcagcgtccagtgccctgccagtagctcctagagaggcaggggttaccaactggccagcaggctgtgtccctgaagtcagatcaacgggagagaaggaagtggctaaaacattgcacaggagaagtcggcctgagtggtgcggcgctcgggacccaccagcaatgctgctcttcgtgctcacctgcctgctggcggtcttcccagccatctccacgaagagtcccatatttggtcccgaggaggtgaatagtgtggaaggtaactcagtgtccatcacgtgctactacccacccacctctgtcaaccggcacacccggaagtactggtgccggcagggagctagaggtggctgcataaccctcatctcctcggagggctacgtctccagcaaatatgcaggcagggctaacctcaccaacttcccggagaacggcacatttgtggtgaacattgcccagctgagccaggatgactccgggcgctacaagtgtggcctgggcatcaatagccgaggcctgtcctttgatgtcagcctggaggtcagccagggtcctgggctcctaaatgacactaaagtctacacagtggacctgggcagaacggtgaccatcaactgccctttcaagactgagaatgctcaaaagaggaagtccttgtacaagcagataggcctgtaccctgtgctggtcatcgactccagtggttatgtgaatcccaactatacaggaagaatacgccttgatattcagggtactggccagttactgttcagcgttgtcatcaaccaactcaggctcagcgatgctgggcagtatctctgccaggctggggatgattccaatagtaataagaagaatgctgacctccaagtgctaaagcccgagcccgagctggtttatgaagacctgaggggctcagtgaccttccactgtgccctgggccctgaggtggcaaacgtggccaaatttctgtgccgacagagcagtggggaaaactgtgacgtggtcgtcaacaccctggggaagagggccccagcctttgagggcaggatcctgctcaacccccaggacaaggatggctcattcagtgtggtgatcacaggcctgaggaaggaggatgcagggcgctacctgtgtggagcccattcggatggtcagctgcaggaaggctcgcctatccaggcctggcaactcttcgtcaatgaggagtccacgattccccgcagccccactgtggtgaagggggtggcaggaagctctgtggccgtgctctgcccctacaaccgtaaggaaagcaaaagcatcaagtactggtgtctctgggaaggggcccagaatggccgctgccccctgctggtggacagcgaggggtgggttaaggcccagtacgagggccgcctctccctgctggaggagccaggcaacggcaccttcactgtcatcctcaaccagctcaccagccgggacgccggcttctactggtgtctgaccaacggcgatactctctggaggaccaccgtggagatcaagattatcgaaggagaaccaaacctcaaggtaccagggaatgtcacggctgtgctgggagagactctcaaggtcccctgtcactttccatgcaaattctcctcgtacgagaaatactggtgcaagtggaataacacgggctgccaggccctgcccagccaagacgaaggccccagcaaggccttcgtgaactgtgacgagaacagccggcttgtctccctgaccctgaacctggtgaccagggctgatgagggctggtactggtgtggagtgaagcagggccacttctatggagagactgcagccgtctatgtggcagttgaagagaggaaggcagcggggtcccgcgatgtcagcctagcgaaggcagacgctgctcctgatgagaaggtgctagactctggttttcgggagattgagaacaaagccattcaggatcccaggctttttgcagaggaaaaggcggtggcagatacaagagatcaagccgatgggagcagagcatctgtggattccggcagctctgaggaacaaggtggaagctccagagcgctggtctccaccctggtgcccctgggcctggtgctggcagtgggagccgtggctgtgggggtggccagagcccggcacaggaagaacgtcgaccgagtttcaatcagaagctacaggacagacattagcatgtcagacttcgagaactccagggaatttggagccaatgacaacatgggagcctcttcgatcactcaggagacatccctcggaggaaaagaagagtttgttgccaccactgagagcaccacagagaccaaagaacccaagaaggcaaaaaggtcatccaaggaggaagccgagatggcctacaaagacttcctgctccagtccagcaccgtggccgccgaggcccaggacggcccccaggaagcctagacggtgtcgccgcctgctccctgcacccatgacaatcaccttcagaatcatgtcgatcctggggccctcagctcctggggaccccactccctgctctaacacctgcctaggtttttcctactgtcctcagaggcgtgctggtcccctcctcagtgacatcaaagcctggcctaattgttcctattggggatgagggtggcatgaggaggtcccacttgcaacttctttctgttgagagaacctcagatggacccaagataaaagaatggccaaaccctcacaacccctgatgtttgaagagttccaagttgaagggaaacaaagaagtgtttgatggtgccagagaggggctgctctccagaaagctaaaatttaatttcttttttcctctgagttctgtacttcaaccagcctacaagctggcacttgctaacaaatcagaaatatgacaattaatgattaaagactgtgattgccacca

SEQ ID NO: 297242 - DNA, 2375 bp, Homo sapiens
agagtttcagttttggcagcagcgtccagtgccctgccagtagctcctagagaggcaggggttaccaactggccagcaggctgtgtccctgaagtcagatcaacgggagagaaggaagtggctaaaacattgcacaggagaagtcggcctgagtggtgcggcgctcgggacccaccagcaatgctgctcttcgtgctcacctgcctgctggcggtcttcccagccatctccacgaagagtcccatatttggtcccgaggaggtgaatagtgtggaaggtaactcagtgtccatcacgtgctactacccacccacctctgtcaaccggcacacccggaagtactggtgccggcagggagctagaggtggctgcataaccctcatctcctcggagggctacgtctccagcaaatatgcaggcagggctaacctcaccaacttcccggagaacggcacatttgtggtgaacattgcccagctgagccaggatgactccgggcgctacaagtgtggcctgggcatcaatagccgaggcctgtcctttgatgtcagcctggaggtcagccagggtcctgggctcctaaatgacactaaagtctacacagtggacctgggcagaacggtgaccatcaactgccctttcaagactgagaatgctcaaaagaggaagtccttgtacaagcagataggcctgtaccctgtgctggtcatcgactccagtggttatgtgaatcccaactatacaggaagaatacgccttgatattcagggtactggccagttactgttcagcgttgtcatcaaccaactcaggctcagcgatgctgggcagtatctctgccaggctggggatgattccaatagtaataagaagaatgctgacctccaagtgctaaagcccgagcccgagctggtttatgaagacctgaggggctcagtgaccttccactgtgccctgggccctgaggtggcaaacgtggccaaatttctgtgccgacagagcagtggggaaaactgtgacgtggtcgtcaacaccctggggaagagggccccagcctttgagggcaggatcctgctcaacccccaggacaaggatggctcattcagtgtggtgatcacaggcctgaggaaggaggatgcagggcgctacctgtgtggagcccattcggatggtcagctgcaggaaggctcgcctatccaggcctggcaactcttcgtcaatgaggagtccacgattccccgcagccccactgtggtgaagggggtggcaggaagctctgtggccgtgctctgcccctacaaccgtaaggaaagcaaaagcatcaagtactggtgtctctgggaaggggcccagaatggccgctgccccctgctggtggacagcgaggggtgggttaaggcccagtacgagggccgcctctccctgctggaggagccaggcaacggcaccttcactgtcatcctcaaccagctcaccagccgggacgccggcttctactggtgtctgaccaacggcgatactctctggaggaccaccgtggagatcaagattatcgaaggagaaccaaacctcaaggtaccagggaatgtcacggctgtgctgggagagactctcaaggtcccctgtcactttccatgcaaattctcctcgtacgagaaatactggtgcaagtggaataacacgggctgccaggccctgcccagccaagacgaaggccccagcaaggccttcgtgaactgtgacgagaacagccggcttgtctccctgaccctgaacctggtgaccagggctgatgagggctggtactggtgtggagtgaagcagggccacttctatggagagactgcagccgtctatgtggcagttgaagagaggaaggcagcggggtcccgcgatgtcagcctagcgaaggcagacgctgctcctgatgagaaggtgctagactctggttttcgggagattgagaacaaagccattcaggatcccaggctttttgcagaggaaaaggcggtggcagatacaagagatcaagccgatgggagcagagcatctgtggattccggcagctctgaggaacaaggtggaagctccagagcgctggtctccaccctggtgcccctgggcctggtgctggcagtgggagccgtggctgtgggggtggccagagcccggcacaggaagaacgtcgaccgagtttcaatcagaagctacaggacagacattagcatgtcagacttcgagaactccagggaatttggagccaatgacaacatgggagcctcttcgatcactcaggagacatccctcggaggaaaagaagagtttgttgccaccactgagagcaccacagtcaccgtcgaaggagatcctctaga

SEQ ID NO: 297243 - DNA, 1588 bp, Homo sapiens
agagtttcagttttggcagcagcgtccagtgccctgccagtagctcctagagaggcaggggttaccaactggccagcaggctgtgtccctgaagtcagatcaacgggagagaaggaagtggctaaaacattgcacaggagaagtcggcctgagtggtgcggcgctcgggacccaccagcaatgctgctcttcgtgctcacctgcctgctggcggtcttcccagccatctccacgaagagtcccatatttggtcccgaggaggtgaatagtgtggaaggtaactcagtgtccatcacgtgctactacccacccacctctgtcaaccggcacacccggaagtactggtgccggcagggagctagaggtggctgcataaccctcatctcctcggagggctacgtctccagcaaatatgcaggcagggctaacctcaccaacttcccggagaacggcacatttgtggtgaacattgcccagctgagccaggatgactccgggcgctacaagtgtggcctgggcatcaatagccgaggcctgtcctttgatgtcagcctggaggtcagccagggtcctgggctcctaaatgacactaaagtctacacagtggacctgggcagaacggtgaccatcaactgccctttcaagactgagaatgctcaaaagaggaagtccttgtacaagcagataggcctgtaccctgtgctggtcatcgactccagtggttatgtgaatcccaactatacaggaagaatacgccttgatattcagggtactggccagttactgttcagcgttgtcatcaaccaactcaggctcagcgatgctgggcagtatctctgccaggctggggatgattccaatagtaataagaagaatgctgacctccaagtgctaaagcccgagcccgagctggtttatgaagacctgaggggctcagtgaccttccactgtgccctgggccctgaggtggcaaacgtggccaaatttctgtgccgacagagcagtggggaaaactgtgacgtggtcgtcaacaccctggggaagagggccccagcctttgagggcaggatcctgctcaacccccaggacaaggatggctcattcagtgtggtgatcacaggcctgaggaaggaggatgcagggcgctacctgtgtggagcccattcggatggtcagctgcaggaaggctcgcctatccaggcctggcaactcttcgtcaatgaggagtccacgattccccgcagccccactgtggtgaagggggtggcaggaagctctgtggccgtgctctgcccctacaaccgtaaggaaagcaaaagcatcaagtactggtgtctctgggaaggggcccagaatggccgctgccccctgctggtggacagcgaggggtgggttaaggcccagtacgagggccgcctctccctgctggaggagccaggcaacggcaccttcactgtcatcctcaaccagctcaccagccgggacgccggcttctactggtgtctgaccaacggcgatactctctggaggaccaccgtggagatcaagattatcgaaggtaggagttgacagggagggagaaagctct

SEQ ID NO: 297244 - DNA, 1506 bp, Homo sapiens
agagtttcagttttggcagcagcgtccagtgccctgccagtagctcctagagaggcaggggttaccaactggccagcaggctgtgtccctgaagtcagatcaacgggagagaaggaagtggctaaaacattgcacaggagaagtcggcctgagtggtgcggcgctcgggacccaccagcaatgctgctcttcgtgctcacctgcctgctggcggtcttcccagccatctccacgaagagtcccatatttggtcccgaggaggtgaatagtgtggaaggtaactcagtgtccatcacgtgctactacccacccacctctgtcaaccggcacacccggaagtactggtgccggcagggagctagaggtggctgcataaccctcatctcctcggagggctacgtctccagcaaatatgcaggcagggctaacctcaccaacttcccggagaacggcacatttgtggtgaacattgcccagctgagccaggatgactccgggcgctacaagtgtggcctgggcatcaatagccgaggcctgtcctttgatgtcagcctggaggtcagccagggtcctgggctcctaaatgacactaaagtctacacagtggacctgggcagaacggtgaccatcaactgccctttcaagactgagaatgctcaaaagaggaagtccttgtacaagcagataggcctgtaccctgtgctggtcatcgactccagtggttatgtgaatcccaactatacaggaagaatacgccttgatattcagggtactggccagttactgttcagcgttgtcatcaaccaactcaggctcagcgatgctgggcagtatctctgccaggctggggatgattccaatagtaataagaagaatgctgacctccaagtgctaaagcccgagcccgagctggtttatgaagacctgaggggctcagtgaccttccactgtgccctgggccctgaggtggcaaacgtggccaaatttctgtgccgacagagcagtggggaaaactgtgacgtggtcgtcaacaccctggggaagagggccccagcctttgagggcaggatcctgctcaacccccaggacaaggatggctcattcagtgtggtgatcacaggcctgaggaaggaggatgcagggcgctacctgtgtggagcccattcggatggtcagctgcaggaaggctcgcctatccaggcctggcaactcttcgtcaatgaggagtccacgattccccgcagccccactgtggtgaagggggtggcaggaagctctgtggccgtgctctgcccctacaaccgtaaggaaagcaaaagcatcaagtactggtgtctctgggaaggggcccagaatggccgctgccccctgctggtggacagcgaggggtgggttaaggcccagtacgagggccgcctctccctgctggaggagctgtgcggccgtggcacgagtgcgggcggccagtgatggacagtatgagaagctgtgcagccggcccagtat

SEQ ID NO: 297245 - DNA, 1007 bp, Homo sapiens
agagtttcagttttggcagcagcgtccagtgccctgccagtagctcctagagaggcaggggttaccaactggccagcaggctgtgtccctgaagtcagatcaacgggagagaaggaagtggctaaaacattgcacaggagaagtcggcctgagtggtgcggcgctcgggacccaccagcaatgctgctcttcgtgctcacctgcctgctggcggtcttcccagccatctccacgaagagtcccatatttggtcccgaggaggtgaatagtgtggaaggtaactcagtgtccatcacgtgctactacccacccacctctgtcaaccggcacacccggaagtactggtgccggcagggagctagaggtggctgcataaccctcatctcctcggagggctacgtctccagcaaatatgcaggcagggctaacctcaccaacttcccggagaacggcacatttgtggtgaacattgcccagctgagccaggatgactccgggcgctacaagtgtggcctgggcatcaatagccgaggcctgtcctttgatgtcagcctggaggtcagccagggtcctgggctcctaaatgacactaaagtctacacagtggacctgggcagaacggtgaccatcaactgccctttcaagactgagaatgctcaaaagaggaagtccttgtacaagcagataggcctgtaccctgtgctggtcatcgactccagtggttatgtgaatcaacaacttcccacagcagcccaggttcaactgacacagcactgtcccctggcagtaccacagccttatcctttgctcaagaatctacaaccttccacagcagcccaggctccactcacacaacactcttccctgacagcaccacaagctcaggcatcgttgaagcatctacacgcgtccacagcagcagggctcaccacgcacgacactgtccaccgccagctcacacaagacctggaattcaggaagaatcgaccgcgttccagaccacccga

SEQ ID NO: 297246 - DNA, 328 bp, Homo sapiens
cattcaacaggatttatgtcagttgctggagatacaaagccaaatagatgtcacagaaactctaaggtcaactagtcttggaagacaaggggcgcttcatctccttgtgattattgtttttcagcattgcacaggagaagtcggcctgagtggtgcggcgctcgggacccaccagcaatgctgctcttcgtgctcacctgcctgctggcggtcttcccaggtgtgtctgccaggccccaactctccaagctccaccccttcagcctgcccgactccagggttcacctccctggggacactaaaatcagactcatccccagggatgtcc

SEQ ID NO: 297247 - DNA, 453 bp, Homo sapiens
agcagcccagcctggccttctaggtcccagcccctgtccttacaccaactcctcttcctcccggacagaccgagtttcaatcagaagctacaggacagacattagcatgtcagacttcgagaactccagggaatttggagccaatgacaacatgggagcctcttcgatcactcaggagacatccctcggaggaaaagaaggtatgaccctcactcaagggaatgctcagcccctggggagagtaagaattggtctcacatctgggttgggaaaaggaggctagtaagggctaacctaccctctttcttcacacagagtttgttgccaccactgagagcaccacagagaccaaagaacccaagaaggcaaaaagggtgaggaggaagaaggaagccccactacatgacaaagaaatgcagcatgaggggatgcagttagacttcagaaagaact

SEQ ID NO: 297248 - DNA, 3988 bp, Homo sapiens
aactatcgggctaggtacgaggcctgggtttggtggccggtgcggcgtgttcggtggcggctctggccgctcaggcgcctgcggctgggtgagcgcacgcgaggcggcgaggcggcagcgtgtttctaggtcgtggcgtcgggcttccggagctttggcggcagctaggggaggatggcggagtcttcggataagctctatcgagtcgagtacgccaagagcgggcgcgcctcttgcaagaaatgcagcgagagcatccccaaggactcgctccggatggccatcatggtgcagtcgcccatgtttgatggaaaagtcccacactggtaccacttctcctgcttctggaaggtgggccactccatccggcaccctgacgttgaggtggatgggttctctgagcttcggtgggatgaccagcagaaagtcaagaagacagcggaagctggaggagtgacaggcaaaggccaggatggaattggtagcaaggcagagaagactctgggtgactttgcagcagagtatgccaagtccaacagaagtacgtgcaaggggtgtatggagaagatagaaaagggccaggtgcgcctgtccaagaagatggtggacccggagaagccacagctaggcatgattgaccgctggtaccatccaggctgctttgtcaagaacagggaggagctgggtttccggcccgagtacagtgcgagtcagctcaagggcttcagcctccttgctacagaggataaagaagccctgaagaagcagctcccaggagtcaagagtgaaggaaagagaaaaggcgatgaggtggatggagtggatgaagtggcgaagaagaaatctaaaaaagaaaaagacaaggatagtaagcttgaaaaagccctaaaggctcagaacgacctgatctggaacatcaaggacgagctaaagaaagtgtgttcaactaatgacctgaaggagctactcatcttcaacaagcagcaagtgccttctggggagtcggcgatcttggaccgagtagctgatggcatggtgttcggtgccctccttccctgcgaggaatgctcgggtcagctggtcttcaagagcgatgcctattactgcactggggacgtcactgcctggaccaagtgtatggtcaagacacagacacccaaccggaaggagtgggtaaccccaaaggaattccgagaaatctcttacctcaagaaattgaaggttaaaaagcaggaccgtatattccccccagaaaccagcgcctccgtggcggccacgcctccgccctccacagcctcggctcctgctgctgtgaactcctctgcttcagcagataagccattatccaacatgaagatcctgactctcgggaagctgtcccggaacaaggatgaagtgaaggccatgattgagaaactcggggggaagttgacggggacggccaacaaggcttccctgtgcatcagcaccaaaaaggaggtggaaaagatgaataagaagatggaggaagtaaaggaagccaacatccgagttgtgtctgaggacttcctccaggacgtctccgcctccaccaagagccttcaggagttgttcttagcgcacatcttgtccccttggggggcagaggtgaaggcagagcctgttgaagttgtggccccaagagggaagtcaggggctgcgctctccaaaaaaagcaagggccaggtcaaggaggaaggtatcaacaaatctgaaaagagaatgaaattaactcttaaaggaggagcagctgtggatcctgattctggactggaacactctgcgcatgtcctggagaaaggtgggaaggtcttcagtgccacccttggcctggtggacatcgttaaaggaaccaactcctactacaagctgcagcttctggaggacgacaaggaaaacaggtattggatattcaggtcctggggccgtgtgggtacggtgatcggtagcaacaaactggaacagatgccgtccaaggaggatgccattgagcacttcatgaaattatatgaagaaaaaaccgggaacgcttggcactccaaaaatttcacgaagtatcccaaaaagttctaccccctggagattgactatggccaggatgaagaggcagtgaagaagctgacagtaaatcctggcaccaagtccaagctccccaagccagttcaggacctcatcaagatgatctttgatgtggaaagtatgaagaaagccatggtggagtatgagatcgaccttcagaagatgcccttggggaagctgagcaaaaggcagatccaggccgcatactccatcctcagtgaggtccagcaggcggtgtctcagggcagcagcgactctcagatcctggatctctcaaatcgcttttacaccctgatcccccacgactttgggatgaagaagcctccgctcctgaacaatgcagacagtgtgcaggccaaggtggaaatgcttgacaacctgctggacatcgaggtggcctacagtctgctcaggggagggtctgatgatagcagcaaggatcccatcgatgtcaactatgagaagctcaaaactgacattaaggtggttgacagagattctgaagaagccgagatcatcaggaagtatgttaagaacactcatgcaaccacacacaatgcgtatgacttggaagtcatcgatatctttaagatagagcgtgaaggcgaatgccagcgttacaagccctttaagcagcttcataaccgaagattgctgtggcacgggtccaggaccaccaactttgctgggatcctgtcccagggtcttcggatagccccgcctgaagcgcccgtgacaggctacatgtttggtaaagggatctatttcgctgacatggtctccaagagtgccaactactgccatacgtctcagggagacccaataggcttaatcctgttgggagaagttgcccttggaaacatgtatgaactgaagcacgcttcacatatcagcaagttacccaagggcaagcacagtgtcaaaggtttgggcaaaactacccctgatccttcagctaacattagtctggatggtgtagacgttcctcttgggaccgggatttcatctggtgtgaatgacacctctctactatataacgagtacattgtctatgatattgctcaggtaaatctgaagtatctgctgaaactgaaattcaattttaagacctccctgtggtaattgggagaggtagccgagtcacacccggtggctctggtatgaattcacccgaagcgcttctgcaccaactcacctggccgctaagttgctgatgggtagtacctgtactaaaccacctcagaaaggattttacagaaacgtgttaaaggttttctctaacttctcaagtcccttgttttgtgttgtgtctgtggggaggggttgttttggggttgtttttgttttttcttgccaggtagataaaactgacatagagaaaaggctggagagagattctgttgcatagactagtcctatggaaaaaaccaagcttcgttagaatgtctgccttactggtttccccagggaaggaaaaatacacttccacccttttttctaagtgttcgtctttagttttgattttggaaagatgttaagcatttatttttagttaaaaataaaaactaatttcatactatttagattttcttttttatcttgcacttattgtcccctttttagttttttttgtttgcctcttgtggtgaggggtgtgggaagaccaaaggaaggaacgctaacaatttctcatacttagaaacaaaaagagctttccttctccaggaatactgaacatgggagctcttgaaatatgtagtattaaaagttgcatttgaaattcttgactttcttatgggcacttttgtcttccaaattaaaactctaccacaaatatacttacccaagggctaatagtaatactcgattaaaaatgcagatgccttctcta

SEQ ID NO: 297249 - DNA, 3986 bp, Homo sapiens
aggcatcagcaatctatcagggaacggcgggtggccggtgcggcgtgttcggtggcggctctggccgctcaggcgcctgcggctgggtgagcgcacgcgaggcggcgaggcggcagcgtgtttctaggtcgtggcgtcgggcttccggagctttggcggcagctaggggaggatggcggagtcttcggataagctctatcgagtcgagtacgccaagagcgggcgcgcctcttgcaagaaatgcagcgagagcatccccaaggactcgctccggatggccatcatggtgcagtcgcccatgtttgatggaaaagtcccacactggtaccacttctcctgcttctggaaggtgggccactccatccggcaccctgacgttgaggtggatgggttctctgagcttcggtgggatgaccagcagaaagtcaagaagacagcggaagctggaggagtgacaggcaaaggccaggatggaattggtagcaaggcagagaagactctgggtgactttgcagcagagtatgccaagtccaacagaagtacgtgcaaggggtgtatggagaagatagaaaagggccaggtgcgcctgtccaagaagatggtggacccggagaagccacagctaggcatgattgaccgctggtaccatccaggctgctttgtcaagaacagggaggagctgggtttccggcccgagtacagtgcgagtcagctcaagggcttcagcctccttgctacagaggataaagaagccctgaagaagcagctcccaggagtcaagagtgaaggaaagagaaaaggcgatgaggtggatggagtggatgaagtggcgaagaagaaatctaaaaaagaaaaagacaaggatagtaagcttgaaaaagccctaaaggctcagaacgacctgatctggaacatcaaggacgagctaaagaaagtgtgttcaactaatgacctgaaggagctactcatcttcaacaagcagcaagtgccttctggggagtcggcgatcttggaccgagtagctgatggcatggtgttcggtgccctccttccctgcgaggaatgctcgggtcagctggtcttcaagagcgatgcctattactgcactggggacgtcactgcctggaccaagtgtatggtcaagacacagacacccaaccggaaggagtgggtaaccccaaaggaattccgagaaatctcttacctcaagaaattgaaggttaaaaagcaggaccgtatattccccccagaaaccagcgcctccgtggcggccacgcctccgccctccacagcctcggctcctgctgctgtgaactcctctgcttcagcagataagccattatccaacatgaagatcctgactctcgggaagctgtcccggaacaaggatgaagtgaaggccatgattgagaaactcggggggaagttgacggggacggccaacaaggcttccctgtgcatcagcaccaaaaaggaggtggaaaagatgaataagaagatggaggaagtaaaggaagccaacatccgagttgtgtctgaggacttcctccaggacgtctccgcctccaccaagagccttcaggagttgttcttagcgcacatcttgtccccttggggggcagaggtgaaggcagagcctgttgaagttgtggccccaagagggaagtcaggggctgcgctctccaaaaaaagcaagggccaggtcaaggaggaaggtatcaacaaatctgaaaagagaatgaaattaactcttaaaggaggagcagctgtggatcctgattctggactggaacactctgcgcatgtcctggagaaaggtgggaaggtcttcagtgccacccttggcctggtggacatcgttaaaggaaccaactcctactacaagctgcagcttctggaggacgacaaggaaaacaggtattggatattcaggtcctggggccgtgtgggtacggtgatcggtagcaacaaactggaacagatgccgtccaaggaggatgccattgagcacttcatgaaattatatgaagaaaaaaccgggaacgcttggcactccaaaaatttcacgaagtatcccaaaaagttctaccccctggagattgactatggccaggatgaagaggcagtgaagaagctgacagtaaatcctggcaccaagtccaagctccccaagccagttcaggacctcatcaagatgatctttgatgtggaaagtatgaagaaagccatggtggagtatgagatcgaccttcagaagatgcccttggggaagctgagcaaaaggcagatccaggccgcatactccatcctcagtgaggtccagcaggcggtgtctcagggcagcagcgactctcagatcctggatctctcaaatcgcttttacaccctgatcccccacgactttgggatgaagaagcctccgctcctgaacaatgcagacagtgtgcaggccaaggtggaaatgcttgacaacctgctggacatcgaggtggcctacagtctgctcaggggagggtctgatgatagcagcaaggatcccatcgatgtcaactatgagaagctcaaaactgacattaaggtggttgacagagattctgaagaagccgagatcatcaggaagtatgttaagaacactcatgcaaccacacacaatgcgtatgacttggaagtcatcgatatctttaagatagagcgtgaaggcgaatgccagcgttacaagccctttaagcagcttcataaccgaagattgctgtggcacgggtccaggaccaccaactttgctgggatcctgtcccagggtcttcggatagccccgcctgaagcgcccgtgacaggctacatgtttggtaaagggatctatttcgctgacatggtctccaagagtgccaactactgccatacgtctcagggagacccaataggcttaatcctgttgggagaagttgcccttggaaacatgtatgaactgaagcacgcttcacatatcagcaagttacccaagggcaagcacagtgtcaaaggtttgggcaaaactacccctgatccttcagctaacattagtctggatggtgtagacgttcctcttgggaccgggatttcatctggtgtgaatgacacctctctactatataacgagtacattgtctatgatattgctcaggtaaatctgaagtatctgctgaaactgaaattcaattttaagacctccctgtggtaattgggagaggtagccgagtcacacccggtggctctggtatgaattcacccgaagcgcttctgcaccaactcacctggccgctaagttgctgatgggtagtacctgtactaaaccacctcagaaaggattttacagaaacgtgttaaaggttttctctaacttctcaagtcccttgttttgtgttgtgtctgtggggaggggttgttttggggttgtttttgttttttcttgccaggtagataaaactgacatagagaaaaggctggagagagattctgttgcatagactagtcctatggaaaaaaccaagcttcgttagaatgtctgccttactggtttccccagggaaggaaaaatacacttccacccttttttctaagtgttcgtctttagttttgattttggaaagatgttaagcatttatttttagttaaaaataaaaactaatttcatactatttagattttcttttttatcttgcacttattgtcccctttttagttttttttgtttgcctcttgtggtgaggggtgtgggaagaccaaaggaaggaacgctaacaatttctcatacttagaaacaaaaagagctttccttctccaggaatactgaacatgggagctcttgaaatatgtagtattaaaagttgcatttgaaattcttgactttcttatgggcacttttgtcttccaaattaaaactctaccacaaatatacttacccaagggctaatagtaatactcgattaaaaatgcagatgccttctcta

SEQ ID NO: 297250 - DNA, 3856 bp, Homo sapiens
ccgtaaactcggctaggtacgaggcctgggtgtaaggggaggatggcggagtcttcggataagctctatcgagtcgagtacgccaagagcgggcgcgcctcttgcaagaaatgcagcgagagcatccccaaggactcgctccggatggccatcatggtgcagtcgcccatgtttgatggaaaagtcccacactggtaccacttctcctgcttctggaaggtgggccactccatccggcaccctgacgttgaggtggatgggttctctgagcttcggtgggatgaccagcagaaagtcaagaagacagcggaagctggaggagtgacaggcaaaggccaggatggaattggtagcaaggcagagaagactctgggtgactttgcagcagagtatgccaagtccaacagaagtacgtgcaaggggtgtatggagaagatagaaaagggccaggtgcgcctgtccaagaagatggtggacccggagaagccacagctaggcatgattgaccgctggtaccatccaggctgctttgtcaagaacagggaggagctgggtttccggcccgagtacagtgcgagtcagctcaagggcttcagcctccttgctacagaggataaagaagccctgaagaagcagctcccaggagtcaagagtgaaggaaagagaaaaggcgatgaggtggatggagtggatgaagtggcgaagaagaaatctaaaaaagaaaaagacaaggatagtaagcttgaaaaagccctaaaggctcagaacgacctgatctggaacatcaaggacgagctaaagaaagtgtgttcaactaatgacctgaaggagctactcatcttcaacaagcagcaagtgccttctggggagtcggcgatcttggaccgagtagctgatggcatggtgttcggtgccctccttccctgcgaggaatgctcgggtcagctggtcttcaagagcgatgcctattactgcactggggacgtcactgcctggaccaagtgtatggtcaagacacagacacccaaccggaaggagtgggtaaccccaaaggaattccgagaaatctcttacctcaagaaattgaaggttaaaaagcaggaccgtatattccccccagaaaccagcgcctccgtggcggccacgcctccgccctccacagcctcggctcctgctgctgtgaactcctctgcttcagcagataagccattatccaacatgaagatcctgactctcgggaagctgtcccggaacaaggatgaagtgaaggccatgattgagaaactcggggggaagttgacggggacggccaacaaggcttccctgtgcatcagcaccaaaaaggaggtggaaaagatgaataagaagatggaggaagtaaaggaagccaacatccgagttgtgtctgaggacttcctccaggacgtctccgcctccaccaagagccttcaggagttgttcttagcgcacatcttgtccccttggggggcagaggtgaaggcagagcctgttgaagttgtggccccaagagggaagtcaggggctgcgctctccaaaaaaagcaagggccaggtcaaggaggaaggtatcaacaaatctgaaaagagaatgaaattaactcttaaaggaggagcagctgtggatcctgattctggactggaacactctgcgcatgtcctggagaaaggtgggaaggtcttcagtgccacccttggcctggtggacatcgttaaaggaaccaactcctactacaagctgcagcttctggaggacgacaaggaaaacaggtattggatattcaggtcctggggccgtgtgggtacggtgatcggtagcaacaaactggaacagatgccgtccaaggaggatgccattgagcacttcatgaaattatatgaagaaaaaaccgggaacgcttggcactccaaaaatttcacgaagtatcccaaaaagttctaccccctggagattgactatggccaggatgaagaggcagtgaagaagctgacagtaaatcctggcaccaagtccaagctccccaagccagttcaggacctcatcaagatgatctttgatgtggaaagtatgaagaaagccatggtggagtatgagatcgaccttcagaagatgcccttggggaagctgagcaaaaggcagatccaggccgcatactccatcctcagtgaggtccagcaggcggtgtctcagggcagcagcgactctcagatcctggatctctcaaatcgcttttacaccctgatcccccacgactttgggatgaagaagcctccgctcctgaacaatgcagacagtgtgcaggccaaggtggaaatgcttgacaacctgctggacatcgaggtggcctacagtctgctcaggggagggtctgatgatagcagcaaggatcccatcgatgtcaactatgagaagctcaaaactgacattaaggtggttgacagagattctgaagaagccgagatcatcaggaagtatgttaagaacactcatgcaaccacacacaatgcgtatgacttggaagtcatcgatatctttaagatagagcgtgaaggcgaatgccagcgttacaagccctttaagcagcttcataaccgaagattgctgtggcacgggtccaggaccaccaactttgctgggatcctgtcccagggtcttcggatagccccgcctgaagcgcccgtgacaggctacatgtttggtaaagggatctatttcgctgacatggtctccaagagtgccaactactgccatacgtctcagggagacccaataggcttaatcctgttgggagaagttgcccttggaaacatgtatgaactgaagcacgcttcacatatcagcaagttacccaagggcaagcacagtgtcaaaggtttgggcaaaactacccctgatccttcagctaacattagtctggatggtgtagacgttcctcttgggaccgggatttcatctggtgtgaatgacacctctctactatataacgagtacattgtctatgatattgctcaggtaaatctgaagtatctgctgaaactgaaattcaattttaagacctccctgtggtaattgggagaggtagccgagtcacacccggtggctctggtatgaattcacccgaagcgcttctgcaccaactcacctggccgctaagttgctgatgggtagtacctgtactaaaccacctcagaaaggattttacagaaacgtgttaaaggttttctctaacttctcaagtcccttgttttgtgttgtgtctgtggggaggggttgttttggggttgtttttgttttttcttgccaggtagataaaactgacatagagaaaaggctggagagagattctgttgcatagactagtcctatggaaaaaaccaagcttcgttagaatgtctgccttactggtttccccagggaaggaaaaatacacttccacccttttttctaagtgttcgtctttagttttgattttggaaagatgttaagcatttatttttagttaaaaataaaaactaatttcatactatttagattttcttttttatcttgcacttattgtcccctttttagttttttttgtttgcctcttgtggtgaggggtgtgggaagaccaaaggaaggaacgctaacaatttctcatacttagaaacaaaaagagctttccttctccaggaatactgaacatgggagctcttgaaatatgtagtattaaaagttgcatttgaaattcttgactttcttatgggcacttttgtcttccaaattaaaactctaccacaaatatacttacccaagggctaatagtaatactcgattaaaaatgcagatgccttctcta

SEQ ID NO: 297251 - DNA, 3934 bp, Homo sapiens
cgattctcgccacgtcgtgccgtcgctttcttcgctttgccctcagcctcgctggtgagccaccaagcgcgagcgcacttttttagtctgctcggttccggacttgccgcacaggggaggatggcggagtcttcggataagctctatcgagtcgagtacgccaagagcgggcgcgcctcttgcaagaaatgcagcgagagcatccccaaggactcgctccggatggccatcatggtgcagtcgcccatgtttgatggaaaagtcccacactggtaccacttctcctgcttctggaaggtgggccactccatccggcaccctgacgttgaggtggatgggttctctgagcttcggtgggatgaccagcagaaagtcaagaagacagcggaagctggaggagtgacaggcaaaggccaggatggaattggtagcaaggcagagaagactctgggtgactttgcagcagagtatgccaagtccaacagaagtacgtgcaaggggtgtatggagaagatagaaaagggccaggtgcgcctgtccaagaagatggtggacccggagaagccacagctaggcatgattgaccgctggtaccatccaggctgctttgtcaagaacagggaggagctgggtttccggcccgagtacagtgcgagtcagctcaagggcttcagcctccttgctacagaggataaagaagccctgaagaagcagctcccaggagtcaagagtgaaggaaagagaaaaggcgatgaggtggatggagtggatgaagtggcgaagaagaaatctaaaaaagaaaaagacaaggatagtaagcttgaaaaagccctaaaggctcagaacgacctgatctggaacatcaaggacgagctaaagaaagtgtgttcaactaatgacctgaaggagctactcatcttcaacaagcagcaagtgccttctggggagtcggcgatcttggaccgagtagctgatggcatggtgttcggtgccctccttccctgcgaggaatgctcgggtcagctggtcttcaagagcgatgcctattactgcactggggacgtcactgcctggaccaagtgtatggtcaagacacagacacccaaccggaaggagtgggtaaccccaaaggaattccgagaaatctcttacctcaagaaattgaaggttaaaaagcaggaccgtatattccccccagaaaccagcgcctccgtggcggccacgcctccgccctccacagcctcggctcctgctgctgtgaactcctctgcttcagcagataagccattatccaacatgaagatcctgactctcgggaagctgtcccggaacaaggatgaagtgaaggccatgattgagaaactcggggggaagttgacggggacggccaacaaggcttccctgtgcatcagcaccaaaaaggaggtggaaaagatgaataagaagatggaggaagtaaaggaagccaacatccgagttgtgtctgaggacttcctccaggacgtctccgcctccaccaagagccttcaggagttgttcttagcgcacatcttgtccccttggggggcagaggtgaaggcagagcctgttgaagttgtggccccaagagggaagtcaggggctgcgctctccaaaaaaagcaagggccaggtcaaggaggaaggtatcaacaaatctgaaaagagaatgaaattaactcttaaaggaggagcagctgtggatcctgattctggactggaacactctgcgcatgtcctggagaaaggtgggaaggtcttcagtgccacccttggcctggtggacatcgttaaaggaaccaactcctactacaagctgcagcttctggaggacgacaaggaaaacaggtattggatattcaggtcctggggccgtgtgggtacggtgatcggtagcaacaaactggaacagatgccgtccaaggaggatgccattgagcacttcatgaaattatatgaagaaaaaaccgggaacgcttggcactccaaaaatttcacgaagtatcccaaaaagttctaccccctggagattgactatggccaggatgaagaggcagtgaagaagctgacagtaaatcctggcaccaagtccaagctccccaagccagttcaggacctcatcaagatgatctttgatgtggaaagtatgaagaaagccatggtggagtatgagatcgaccttcagaagatgcccttggggaagctgagcaaaaggcagatccaggccgcatactccatcctcagtgaggtccagcaggcggtgtctcagggcagcagcgactctcagatcctggatctctcaaatcgcttttacaccctgatcccccacgactttgggatgaagaagcctccgctcctgaacaatgcagacagtgtgcaggccaaggtggaaatgcttgacaacctgctggacatcgaggtggcctacagtctgctcaggggagggtctgatgatagcagcaaggatcccatcgatgtcaactatgagaagctcaaaactgacattaaggtggttgacagagattctgaagaagccgagatcatcaggaagtatgttaagaacactcatgcaaccacacacaatgcgtatgacttggaagtcatcgatatctttaagatagagcgtgaaggcgaatgccagcgttacaagccctttaagcagcttcataaccgaagattgctgtggcacgggtccaggaccaccaactttgctgggatcctgtcccagggtcttcggatagccccgcctgaagcgcccgtgacaggctacatgtttggtaaagggatctatttcgctgacatggtctccaagagtgccaactactgccatacgtctcagggagacccaataggcttaatcctgttgggagaagttgcccttggaaacatgtatgaactgaagcacgcttcacatatcagcaagttacccaagggcaagcacagtgtcaaaggtttgggcaaaactacccctgatccttcagctaacattagtctggatggtgtagacgttcctcttgggaccgggatttcatctggtgtgaatgacacctctctactatataacgagtacattgtctatgatattgctcaggtaaatctgaagtatctgctgaaactgaaattcaattttaagacctccctgtggtaattgggagaggtagccgagtcacacccggtggctctggtatgaattcacccgaagcgcttctgcaccaactcacctggccgctaagttgctgatgggtagtacctgtactaaaccacctcagaaaggattttacagaaacgtgttaaaggttttctctaacttctcaagtcccttgttttgtgttgtgtctgtggggaggggttgttttggggttgtttttgttttttcttgccaggtagataaaactgacatagagaaaaggctggagagagattctgttgcatagactagtcctatggaaaaaaccaagcttcgttagaatgtctgccttactggtttccccagggaaggaaaaatacacttccacccttttttctaagtgttcgtctttagttttgattttggaaagatgttaagcatttatttttagttaaaaataaaaactaatttcatactatttagattttcttttttatcttgcacttattgtcccctttttagttttttttgtttgcctcttgtggtgaggggtgtgggaagaccaaaggaaggaacgctaacaatttctcatacttagaaacaaaaagagctttccttctccaggaatactgaacatgggagctcttgaaatatgtagtattaaaagttgcatttgaaattcttgactttcttatgggcacttttgtcttccaaattaaaactctaccacaaatatacttacccaagggctaatagtaatactcgattaaaaatgcagatgccttctcta

SEQ ID NO: 297252 - DNA, 3946 bp, Homo sapiens
aactatcgggctaggtacgaggcctgggtttggtggccggtgcggcgtgttcggtggcggctctggccgctcaggcgcctgcggctgggtgagcgcacgcgaggcggcgaggcggcagcgtgtttctaggtcgtggcgtcgggcttccggagctttggcggcagctaggggaggatggcggagtcttcggataagctctatcgagtcgagtacgccaagagcgggcgcgcctcttgcaagaaatgcagcgagagcatccccaaggactcgctccggatggccatcatggtgcagtcgcccatgtttgatggaaaagtcccacactggtaccacttctcctgcttctggaaggtgggccactccatccggcaccctgacgttgaggtggatgggttctctgagcttcggtgggatgaccagcagaaagtcaagaagacagcggaagctggaggagtgacaggcaaaggccaggatggaattggtagcaaggcagagaagactctgggtgactttgcagcagagtatgccaagtccaacagaagtacgtgcaaggggtgtatggagaagatagaaaagggccaggtgcgcctgtccaagaagatggtggacccggagaagccacagctaggcatgattgaccgctggtaccatccaggctgctttgtcaagaacagggaggagctgggtttccggcccgagtacagtgcgagtcagctcaagggcttcagcctccttgctacagaggataaagaagccctgaagaagcagctcccaggagtcaagagtgaaggaaagagaaaaggcgatgaggtggatggagtggatgaagtggcgaagaagaaatctaaaaaagaaaaagacaaggatagtaagcttgaaaaagccctaaaggctcagaacgacctgatctggaacatcaaggacgagctaaagaaagtgtgttcaactaatgacctgaaggagctactcatcttcaacaagcagcaagtgccttctggggagtcggcgatcttggaccgagtagctgatggcatggtgttcggtgccctccttccctgcgaggaatgctcgggtcagctggtcttcaagagcgatgcctattactgcactggggacgtcactgcctggaccaagtgtatggtcaagacacagacacccaaccggaaggagtgggtaaccccaaaggaattccgagaaatctcttacctcaagaaattgaaggttaaaaagcaggaccgtatattccccccagaaaccagcgcctccgtggcggccacgcctccgccctccacagcctcggctcctgctgctgtgaactcctctgcttcagcagataagccattatccaacatgaagatcctgactctcgggaagctgtcccggaacaaggatgaagtgaaggccatgattgagaaactcggggggaagttgacggggacggccaacaaggcttccctgtgcatcagcaccaaaaaggaggtggaaaagatgaataagaagatggaggaagtaaaggaagccaacatccgagttgtgtctgaggacttcctccaggacgtctccgcctccaccaagagccttcaggagttgttcttagcgcacatcttgtccccttggggggcagaggtgaaggcagagcctgttgaagttgtggccccaagagggaagtcaggggctgcgctctccaaaaaaagcaagggccaggtcaaggaggaaggtatcaacaaatctgaaaagagaatgaaattaactcttaaaggaggagcagctgtggatcctgattctggactggaacactctgcgcatgtcctggagaaaggtgggaaggtcttcagtgccacccttggcctggtggacatcgttaaaggaaccaactcctactacaagctgcagcttctggaggacgacaaggaaaacaggtattggatattcaggtcctggggccgtgtgggtacggtgatcggtagcaacaaactggaacagatgccgtccaaggaggatgccattgagcacttcatgaaattatatgaagaaaaaaccgggaacgcttggcactccaaaaatttcacgaagtatcccaaaaagttctaccccctggagattgactatggccaggatgaagaggcagtgaagaagctgacagtaaatcctggcaccaagtccaagctccccaagccagttcaggacctcatcaagatgatctttgatgtggaaagtatgaagaaagccatggtggagtatgagatcgaccttcagaagatgcccttggggaagctgagcaaaaggcagatccaggccgcatactccatcctcagtgaggtccagcaggcggtgtctcagggcagcagcgactctcagatcctggatctctcaaatcgcttttacaccctgatcccccacgactttgggatgaagaagcctccgctcctgaacaatgcagacagtgtgcaggccaaggtggaaatgcttgacaacctgctggacatcgaggtggcctacagtctgctcaggggagggtctgatgatagcagcaaggatcccatcgatgtcaactatgagaagctcaaaactgacattaagtatgttaagaacactcatgcaaccacacacaatgcgtatgacttggaagtcatcgatatctttaagatagagcgtgaaggcgaatgccagcgttacaagccctttaagcagcttcataaccgaagattgctgtggcacgggtccaggaccaccaactttgctgggatcctgtcccagggtcttcggatagccccgcctgaagcgcccgtgacaggctacatgtttggtaaagggatctatttcgctgacatggtctccaagagtgccaactactgccatacgtctcagggagacccaataggcttaatcctgttgggagaagttgcccttggaaacatgtatgaactgaagcacgcttcacatatcagcaagttacccaagggcaagcacagtgtcaaaggtttgggcaaaactacccctgatccttcagctaacattagtctggatggtgtagacgttcctcttgggaccgggatttcatctggtgtgaatgacacctctctactatataacgagtacattgtctatgatattgctcaggtaaatctgaagtatctgctgaaactgaaattcaattttaagacctccctgtggtaattgggagaggtagccgagtcacacccggtggctctggtatgaattcacccgaagcgcttctgcaccaactcacctggccgctaagttgctgatgggtagtacctgtactaaaccacctcagaaaggattttacagaaacgtgttaaaggttttctctaacttctcaagtcccttgttttgtgttgtgtctgtggggaggggttgttttggggttgtttttgttttttcttgccaggtagataaaactgacatagagaaaaggctggagagagattctgttgcatagactagtcctatggaaaaaaccaagcttcgttagaatgtctgccttactggtttccccagggaaggaaaaatacacttccacccttttttctaagtgttcgtctttagttttgattttggaaagatgttaagcatttatttttagttaaaaataaaaactaatttcatactatttagattttcttttttatcttgcacttattgtcccctttttagttttttttgtttgcctcttgtggtgaggggtgtgggaagaccaaaggaaggaacgctaacaatttctcatacttagaaacaaaaagagctttccttctccaggaatactgaacatgggagctcttgaaatatgtagtattaaaagttgcatttgaaattcttgactttcttatgggcacttttgtcttccaaattaaaactctaccacaaatatacttacccaagggctaatagtaatactcgattaaaaatgcagatgccttctcta

SEQ ID NO: 297253 - DNA, 3771 bp, Homo sapiens
aactatcgggctaggtacgaggcctgggtttggtggccggtgcggcgtgttcggtggcggctctggccgctcaggcgcctgcggctgggtgagcgcacgcgaggcggcgaggcggcagcgtgtttctaggtcgtggcgtcgggcttccggagctttggcggcagctaggggaggatggcggagtcttcggataagctctatcgagtcgagtacgccaagagcgggcgcgcctcttgcaagaaatgcagcgagagcatccccaaggactcgctccggatggccatcatggtgcagtcgcccatgtttgatggaaaagtcccacactggtaccacttctcctgcttctggaaggtgggccactccatccggcaccctgacgttgaggtggatgggttctctgagcttcggtgggatgaccagcagaaagtcaagaagacagcggaagctggaggagtgacaggcaaaggccaggatggaattggtagcaaggcagagaagactctgggtgactttgcagcagagtatgccaagtccaacagaagtacgtgcaaggggtgtatggagaagatagaaaagggccaggtgcgcctgtccaagaagatggtggacccggagaagccacagctaggcatgattgaccgctggtaccatccaggctgctttgtcaagaacagggaggagctgggtttccggcccgagtacagtgcgagtcagctcaagggcttcagcctccttgctacagaggataaagaagccctgaagaagcagctcccaggagtcaagagtgaaggaaagagaaaaggcgatgaggtggatggagtggatgaagtggcgaagaagaaatctaaaaaagaaaaagacaaggatagtaagcttgaaaaagccctaaaggctcagaacgacctgatctggaacatcaaggacgagctaaagaaagtgtgttcaactaatgacctgaaggagctactcatcttcaacaagcagcaagtgccttctggggagtcggcgatcttggaccgagtagctgatggcatggtgttcggtgccctccttccctgcgaggaatgctcgggtcagctggtcttcaagagcgatgcctattactgcactggggacgtcactgcctggaccaagtgtatggtcaagacacagacacccaaccggaaggagtgggtaaccccaaaggaattccgagaaatctcttacctcaagaaattgaaggttaaaaagcaggaccgtatattccccccagaaaccagcgcctccgtggcggccacgcctccgccctccacagcctcggctcctgctgctgtgaactcctctgcttcagcagataagccattatccaacatgaagatcctgactctcgggaagctgtcccggaacaaggatgaagtgaaggccatgattgagaaactcggggggaagttgacggggacggccaacaaggcttccctgtgcatcagcaccaaaaaggaggtggaaaagatgaataagaagatggaggaagtaaaggaagccaacatccgagttgtgtctgaggacttcctccaggacgtctccgcctccaccaagagccttcaggagttgttcttagcgcacatcttgtccccttggggggcagaggtgaaggcagagcctgttgaagttgtggccccaagagggaagtcaggggctgcgctctccaaaaaaagcaagggccaggtcaaggaggaaggtatcaacaaatctgaaaagagaatgaaattaactcttaaaggaggagcagctgtggatcctgattctggactggaacactctgcgcatgtcctggagaaaggtgggaaggtcttcagtgccacccttggcctggtggacatcgttaaaggaaccaactcctactacaagctgcagcttctggaggacgacaaggaaaacaggtattggatattcaggtcctggggccgtgtgggtacggtgatcggtagcaacaaactggaacagatgccgtccaaggaggatgccattgagcacttcatgaaattatatgaagaaaaaaccgggaacgcttggcactccaaaaatttcacgaagtatcccaaaaagttctaccccctggagattgactatggccaggatgaagaggcagtgaagaagctgacagtaaatcctggcaccaagtccaagctccccaagccagttcaggacctcatcaagatgatctttgatgtggaaagtatgaagaaagccatggtggagtatgagatcgaccttcagaagatgcccttggggaagctgagcaaaaggcagatccaggccgcatactccatcctcagtgaggtccagcaggcggtgtctcagggcagcagcgactctcagatcctggatctctcaaatcgcttttacaccctgatcccccacgactttgggatgaagaagcctccgctcctgaacaatgcagacagtgtgcaggccaaggtggaaatgcttgacaacctgctggacatcgaggtggcctacagtctgctcaggggagggtctgatgatagcagcaaggatcccatcgatgtcaactatgagaagctcaaaactgacattaaggtggttgacagagattctgaagaagccgagatcatcaggaagtatgttaagaacactcatgcaaccacacacaatgcgtatgacttggaagtcatcgatatctttaagatagagcgtgaaggcgaatgccagcgttacaagccctttaagcagcttcataaccgaagattgctgtggcacgggtccaggaccaccaactttgctgggatcctgtcccagggtcttcggatagccccgcctgaagcgcccgtgacaggctacatgtttggtaaagggatctatttcgctgacatggtctccaagagtgccaactactgccatacgtctcagggagacccaataggcttaatcctgttgggagaagttgcccttggaaacatgtatgaactgaagcacgcttcacatatcagcaagttacccaagggcaagcacagtgtcaaaggtttgggcaaaactacccctgatccttcagctaacattagtctggatggtgtagacgttcctcttgggaccgggatttcatctggtgtgaatgacacctctctactatataacgagtacattgtctatgatattgctcaggtaaatctgaagtatctgctgaaactgaaattcaattttaagacctccctgtggtaattgggagaggtagccgagtcacacccggtggctctggtatgaattcacccgaagcgcttctgcaccaactcacctggccgctaagttgctgatgggtagtacctgtactaaaccacctcagaaaggattttacagaaacgtgttaaaggttttctctaacttctcaagtcccttgttttgtgttgtgtctgtggggaggggttgttttggggttgtttttgttttttcttgccaggtagataaaactgacatagagaaaaggctggagagagattctgttgcatagactagtcctatggaaaaaaccaagcttcgttagaatgtctgccttactggtttccccagggaaggaaaaatacacttccacccttttttctaagtgttcgtctttagttttgattttggaaagatgttaagcatttatttttagttaaaaataaaaactaattctaactaaaaaaaaaaaatcgggcttttttggggggaaaaggatgatggctggtacttgtttgcctttgtcaaggggaatgcggcccaaaggggtatgaacga

SEQ ID NO: 297254 - DNA, 3681 bp, Homo sapiens
tgaaatgatacctttagtacatatttaattcttacatatacttgtgtctgacttatatcaaaatatttcctttaattcaacactttggtaaatagaagtataatggaaattagaagccttagtgagacgtcagtatgcttccaggcttttaaggcaaaggccaggatggaattggtagcaaggcagagaagactctgggtgactttgcagcagagtatgccaagtccaacagaagtacgtgcaaggggtgtatggagaagatagaaaagggccaggtgcgcctgtccaagaagatggtggacccggagaagccacagctaggcatgattgaccgctggtaccatccaggctgctttgtcaagaacagggaggagctgggtttccggcccgagtacagtgcgagtcagctcaagggcttcagcctccttgctacagaggataaagaagccctgaagaagcagctcccaggagtcaagagtgaaggaaagagaaaaggcgatgaggtggatggagtggatgaagtggcgaagaagaaatctaaaaaagaaaaagacaaggatagtaagcttgaaaaagccctaaaggctcagaacgacctgatctggaacatcaaggacgagctaaagaaagtgtgttcaactaatgacctgaaggagctactcatcttcaacaagcagcaagtgccttctggggagtcggcgatcttggaccgagtagctgatggcatggtgttcggtgccctccttccctgcgaggaatgctcgggtcagctggtcttcaagagcgatgcctattactgcactggggacgtcactgcctggaccaagtgtatggtcaagacacagacacccaaccggaaggagtgggtaaccccaaaggaattccgagaaatctcttacctcaagaaattgaaggttaaaaagcaggaccgtatattccccccagaaaccagcgcctccgtggcggccacgcctccgccctccacagcctcggctcctgctgctgtgaactcctctgcttcagcagataagccattatccaacatgaagatcctgactctcgggaagctgtcccggaacaaggatgaagtgaaggccatgattgagaaactcggggggaagttgacggggacggccaacaaggcttccctgtgcatcagcaccaaaaaggaggtggaaaagatgaataagaagatggaggaagtaaaggaagccaacatccgagttgtgtctgaggacttcctccaggacgtctccgcctccaccaagagccttcaggagttgttcttagcgcacatcttgtccccttggggggcagaggtgaaggcagagcctgttgaagttgtggccccaagagggaagtcaggggctgcgctctccaaaaaaagcaagggccaggtcaaggaggaaggtatcaacaaatctgaaaagagaatgaaattaactcttaaaggaggagcagctgtggatcctgattctggactggaacactctgcgcatgtcctggagaaaggtgggaaggtcttcagtgccacccttggcctggtggacatcgttaaaggaaccaactcctactacaagctgcagcttctggaggacgacaaggaaaacaggtattggatattcaggtcctggggccgtgtgggtacggtgatcggtagcaacaaactggaacagatgccgtccaaggaggatgccattgagcacttcatgaaattatatgaagaaaaaaccgggaacgcttggcactccaaaaatttcacgaagtatcccaaaaagttctaccccctggagattgactatggccaggatgaagaggcagtgaagaagctgacagtaaatcctggcaccaagtccaagctccccaagccagttcaggacctcatcaagatgatctttgatgtggaaagtatgaagaaagccatggtggagtatgagatcgaccttcagaagatgcccttggggaagctgagcaaaaggcagatccaggccgcatactccatcctcagtgaggtccagcaggcggtgtctcagggcagcagcgactctcagatcctggatctctcaaatcgcttttacaccctgatcccccacgactttgggatgaagaagcctccgctcctgaacaatgcagacagtgtgcaggccaaggtggaaatgcttgacaacctgctggacatcgaggtggcctacagtctgctcaggggagggtctgatgatagcagcaaggatcccatcgatgtcaactatgagaagctcaaaactgacattaaggtggttgacagagattctgaagaagccgagatcatcaggaagtatgttaagaacactcatgcaaccacacacaatgcgtatgacttggaagtcatcgatatctttaagatagagcgtgaaggcgaatgccagcgttacaagccctttaagcagcttcataaccgaagattgctgtggcacgggtccaggaccaccaactttgctgggatcctgtcccagggtcttcggatagccccgcctgaagcgcccgtgacaggctacatgtttggtaaagggatctatttcgctgacatggtctccaagagtgccaactactgccatacgtctcagggagacccaataggcttaatcctgttgggagaagttgcccttggaaacatgtatgaactgaagcacgcttcacatatcagcaagttacccaagggcaagcacagtgtcaaaggtttgggcaaaactacccctgatccttcagctaacattagtctggatggtgtagacgttcctcttgggaccgggatttcatctggtgtgaatgacacctctctactatataacgagtacattgtctatgatattgctcaggtaaatctgaagtatctgctgaaactgaaattcaattttaagacctccctgtggtaattgggagaggtagccgagtcacacccggtggctctggtatgaattcacccgaagcgcttctgcaccaactcacctggccgctaagttgctgatgggtagtacctgtactaaaccacctcagaaaggattttacagaaacgtgttaaaggttttctctaacttctcaagtcccttgttttgtgttgtgtctgtggggaggggttgttttggggttgtttttgttttttcttgccaggtagataaaactgacatagagaaaaggctggagagagattctgttgcatagactagtcctatggaaaaaaccaagcttcgttagaatgtctgccttactggtttccccagggaaggaaaaatacacttccacccttttttctaagtgttcgtctttagttttgattttggaaagatgttaagcatttatttttagttaaaaataaaaactaatttcatactatttagattttcttttttatcttgcacttattgtcccctttttagttttttttgtttgcctcttgtggtgaggggtgtgggaagaccaaaggaaggaacgctaacaatttctcatacttagaaacaaaaagagctttccttctccaggaatactgaacatgggagctcttgaaatatgtagtattaaaagttgcatttgaaattcttgactttcttatgggcacttttgtcttccaaattaaaactctaccacaaatatacttacccaagggctaatagtaatactcgattaaaaatgcagatgccttctcta

SEQ ID NO: 297255 - DNA, 3592 bp, Homo sapiens
acctggccagtaggtgtatttttatagaattgctgcattcactaatttgtaacttttggatacctgacaataactcatagcatcctttggttcatcaaatattcatcttattatttttaatggctacttagctttccattgcatcattttttgtttgtttgtatttttgagatagaaaagggccaggtgcgcctgtccaagaagatggtggacccggagaagccacagctaggcatgattgaccgctggtaccatccaggctgctttgtcaagaacagggaggagctgggtttccggcccgagtacagtgcgagtcagctcaagggcttcagcctccttgctacagaggataaagaagccctgaagaagcagctcccaggagtcaagagtgaaggaaagagaaaaggcgatgaggtggatggagtggatgaagtggcgaagaagaaatctaaaaaagaaaaagacaaggatagtaagcttgaaaaagccctaaaggctcagaacgacctgatctggaacatcaaggacgagctaaagaaagtgtgttcaactaatgacctgaaggagctactcatcttcaacaagcagcaagtgccttctggggagtcggcgatcttggaccgagtagctgatggcatggtgttcggtgccctccttccctgcgaggaatgctcgggtcagctggtcttcaagagcgatgcctattactgcactggggacgtcactgcctggaccaagtgtatggtcaagacacagacacccaaccggaaggagtgggtaaccccaaaggaattccgagaaatctcttacctcaagaaattgaaggttaaaaagcaggaccgtatattccccccagaaaccagcgcctccgtggcggccacgcctccgccctccacagcctcggctcctgctgctgtgaactcctctgcttcagcagataagccattatccaacatgaagatcctgactctcgggaagctgtcccggaacaaggatgaagtgaaggccatgattgagaaactcggggggaagttgacggggacggccaacaaggcttccctgtgcatcagcaccaaaaaggaggtggaaaagatgaataagaagatggaggaagtaaaggaagccaacatccgagttgtgtctgaggacttcctccaggacgtctccgcctccaccaagagccttcaggagttgttcttagcgcacatcttgtccccttggggggcagaggtgaaggcagagcctgttgaagttgtggccccaagagggaagtcaggggctgcgctctccaaaaaaagcaagggccaggtcaaggaggaaggtatcaacaaatctgaaaagagaatgaaattaactcttaaaggaggagcagctgtggatcctgattctggactggaacactctgcgcatgtcctggagaaaggtgggaaggtcttcagtgccacccttggcctggtggacatcgttaaaggaaccaactcctactacaagctgcagcttctggaggacgacaaggaaaacaggtattggatattcaggtcctggggccgtgtgggtacggtgatcggtagcaacaaactggaacagatgccgtccaaggaggatgccattgagcacttcatgaaattatatgaagaaaaaaccgggaacgcttggcactccaaaaatttcacgaagtatcccaaaaagttctaccccctggagattgactatggccaggatgaagaggcagtgaagaagctgacagtaaatcctggcaccaagtccaagctccccaagccagttcaggacctcatcaagatgatctttgatgtggaaagtatgaagaaagccatggtggagtatgagatcgaccttcagaagatgcccttggggaagctgagcaaaaggcagatccaggccgcatactccatcctcagtgaggtccagcaggcggtgtctcagggcagcagcgactctcagatcctggatctctcaaatcgcttttacaccctgatcccccacgactttgggatgaagaagcctccgctcctgaacaatgcagacagtgtgcaggccaaggtggaaatgcttgacaacctgctggacatcgaggtggcctacagtctgctcaggggagggtctgatgatagcagcaaggatcccatcgatgtcaactatgagaagctcaaaactgacattaaggtggttgacagagattctgaagaagccgagatcatcaggaagtatgttaagaacactcatgcaaccacacacaatgcgtatgacttggaagtcatcgatatctttaagatagagcgtgaaggcgaatgccagcgttacaagccctttaagcagcttcataaccgaagattgctgtggcacgggtccaggaccaccaactttgctgggatcctgtcccagggtcttcggatagccccgcctgaagcgcccgtgacaggctacatgtttggtaaagggatctatttcgctgacatggtctccaagagtgccaactactgccatacgtctcagggagacccaataggcttaatcctgttgggagaagttgcccttggaaacatgtatgaactgaagcacgcttcacatatcagcaagttacccaagggcaagcacagtgtcaaaggtttgggcaaaactacccctgatccttcagctaacattagtctggatggtgtagacgttcctcttgggaccgggatttcatctggtgtgaatgacacctctctactatataacgagtacattgtctatgatattgctcaggtaaatctgaagtatctgctgaaactgaaattcaattttaagacctccctgtggtaattgggagaggtagccgagtcacacccggtggctctggtatgaattcacccgaagcgcttctgcaccaactcacctggccgctaagttgctgatgggtagtacctgtactaaaccacctcagaaaggattttacagaaacgtgttaaaggttttctctaacttctcaagtcccttgttttgtgttgtgtctgtggggaggggttgttttggggttgtttttgttttttcttgccaggtagataaaactgacatagagaaaaggctggagagagattctgttgcatagactagtcctatggaaaaaaccaagcttcgttagaatgtctgccttactggtttccccagggaaggaaaaatacacttccacccttttttctaagtgttcgtctttagttttgattttggaaagatgttaagcatttatttttagttaaaaataaaaactaatttcatactatttagattttcttttttatcttgcacttattgtcccctttttagttttttttgtttgcctcttgtggtgaggggtgtgggaagaccaaaggaaggaacgctaacaatttctcatacttagaaacaaaaagagctttccttctccaggaatactgaacatgggagctcttgaaatatgtagtattaaaagttgcatttgaaattcttgactttcttatgggcacttttgtcttccaaattaaaactctaccacaaatatacttacccaagggctaatagtaatactcgattaaaaatgcagatgccttctcta

SEQ ID NO: 297256 - DNA, 3373 bp, Homo sapiens
aggcatcagcaatctatcagggaacggcgggtggccggtgcggcgtgttcggtggcggctctggccgctcaggcgcctgcggctgggtgagcgcacgcgaggcggcgaggcggcagcgtgtttctaggtcgtggcgtcgggcttccggagctttggcggcagctaggggaggatggcggagtcttcggataagctctatcgagtcgagtacgccaagagcgggcgcgcctcttgcaagaaaaagacaaggatagtaagcttgaaaaagccctaaaggctcagaacgacctgatctggaacatcaaggacgagctaaagaaagtgtgttcaactaatgacctgaaggagctactcatcttcaacaagcagcaagtgccttctggggagtcggcgatcttggaccgagtagctgatggcatggtgttcggtgccctccttccctgcgaggaatgctcgggtcagctggtcttcaagagcgatgcctattactgcactggggacgtcactgcctggaccaagtgtatggtcaagacacagacacccaaccggaaggagtgggtaaccccaaaggaattccgagaaatctcttacctcaagaaattgaaggttaaaaagcaggaccgtatattccccccagaaaccagcgcctccgtggcggccacgcctccgccctccacagcctcggctcctgctgctgtgaactcctctgcttcagcagataagccattatccaacatgaagatcctgactctcgggaagctgtcccggaacaaggatgaagtgaaggccatgattgagaaactcggggggaagttgacggggacggccaacaaggcttccctgtgcatcagcaccaaaaaggaggtggaaaagatgaataagaagatggaggaagtaaaggaagccaacatccgagttgtgtctgaggacttcctccaggacgtctccgcctccaccaagagccttcaggagttgttcttagcgcacatcttgtccccttggggggcagaggtgaaggcagagcctgttgaagttgtggccccaagagggaagtcaggggctgcgctctccaaaaaaagcaagggccaggtcaaggaggaaggtatcaacaaatctgaaaagagaatgaaattaactcttaaaggaggagcagctgtggatcctgattctggactggaacactctgcgcatgtcctggagaaaggtgggaaggtcttcagtgccacccttggcctggtggacatcgttaaaggaaccaactcctactacaagctgcagcttctggaggacgacaaggaaaacaggtattggatattcaggtcctggggccgtgtgggtacggtgatcggtagcaacaaactggaacagatgccgtccaaggaggatgccattgagcacttcatgaaattatatgaagaaaaaaccgggaacgcttggcactccaaaaatttcacgaagtatcccaaaaagttctaccccctggagattgactatggccaggatgaagaggcagtgaagaagctgacagtaaatcctggcaccaagtccaagctccccaagccagttcaggacctcatcaagatgatctttgatgtggaaagtatgaagaaagccatggtggagtatgagatcgaccttcagaagatgcccttggggaagctgagcaaaaggcagatccaggccgcatactccatcctcagtgaggtccagcaggcggtgtctcagggcagcagcgactctcagatcctggatctctcaaatcgcttttacaccctgatcccccacgactttgggatgaagaagcctccgctcctgaacaatgcagacagtgtgcaggccaaggtggaaatgcttgacaacctgctggacatcgaggtggcctacagtctgctcaggggagggtctgatgatagcagcaaggatcccatcgatgtcaactatgagaagctcaaaactgacattaaggtggttgacagagattctgaagaagccgagatcatcaggaagtatgttaagaacactcatgcaaccacacacaatgcgtatgacttggaagtcatcgatatctttaagatagagcgtgaaggcgaatgccagcgttacaagccctttaagcagcttcataaccgaagattgctgtggcacgggtccaggaccaccaactttgctgggatcctgtcccagggtcttcggatagccccgcctgaagcgcccgtgacaggctacatgtttggtaaagggatctatttcgctgacatggtctccaagagtgccaactactgccatacgtctcagggagacccaataggcttaatcctgttgggagaagttgcccttggaaacatgtatgaactgaagcacgcttcacatatcagcaagttacccaagggcaagcacagtgtcaaaggtttgggcaaaactacccctgatccttcagctaacattagtctggatggtgtagacgttcctcttgggaccgggatttcatctggtgtgaatgacacctctctactatataacgagtacattgtctatgatattgctcaggtaaatctgaagtatctgctgaaactgaaattcaattttaagacctccctgtggtaattgggagaggtagccgagtcacacccggtggctctggtatgaattcacccgaagcgcttctgcaccaactcacctggccgctaagttgctgatgggtagtacctgtactaaaccacctcagaaaggattttacagaaacgtgttaaaggttttctctaacttctcaagtcccttgttttgtgttgtgtctgtggggaggggttgttttggggttgtttttgttttttcttgccaggtagataaaactgacatagagaaaaggctggagagagattctgttgcatagactagtcctatggaaaaaaccaagcttcgttagaatgtctgccttactggtttccccagggaaggaaaaatacacttccacccttttttctaagtgttcgtctttagttttgattttggaaagatgttaagcatttatttttagttaaaaataaaaactaatttcatactatttagattttcttttttatcttgcacttattgtcccctttttagttttttttgtttgcctcttgtggtgaggggtgtgggaagaccaaaggaaggaacgctaacaatttctcatacttagaaacaaaaagagctttccttctccaggaatactgaacatgggagctcttgaaatatgtagtattaaaagttgcatttgaaattcttgactttcttatgggcacttttgtcttccaaattaaaactctaccacaaatatacttacccaagggctaatagtaatactcgattaaaaatgcagatgccttctcta

SEQ ID NO: 297257 - DNA, 3932 bp, Homo sapiens
aactatcgggctaggtacgaggcctgggtttggtggccggtgcggcgtgttcggtggcggctctggccgctcaggcgcctgcggctgggtgagcgcacgcgaggcggcgaggcggcagcgtgtttctaggtcgtggcgtcgggcttccggagctttggcggcagctaggggaggatggcggagtcttcggataagctctatcgagtcgagtacgccaagagcgggcgcgcctcttgcaagaaatgcagcgagagcatccccaaggactcgctccggatggccatcatggtgcagtcgcccatgtttgatggaaaagtcccacactggtaccacttctcctgcttctggaaggtgggccactccatccggcaccctgacgttgaggtggatgggttctctgagcttcggtgggatgaccagcagaaagtcaagaagacagcggaagctggaggagtgacaggcaaaggccaggatggaattggtagcaaggcagagaagactctgggtgactttgcagcagagtatgccaagtccaacagaagtacgtgcaaggggtgtatggagaagatagaaaagggccaggtgcgcctgtccaagaagatggtggacccggagaagccacagctaggcatgattgaccgctggtaccatccaggctgctttgtcaagaacagggaggagctgggtttccggcccgagtacagtgcgagtcagctcaagggcttcagcctccttgctacagaggataaagaagccctgaagaagcagctcccaggagtcaagagtgaaggaaagagaaaaggcgatgaggtggatggagtggatgaagtggcgaagaagaaatctaaaaaagaaaaagacaaggatagtaagcttgaaaaagccctaaaggctcagaacgacctgatctggaacatcaaggacgagctaaagaaagtgtgttcaactaatgacctgaaggagctactcatcttcaacaagcagcaagtgccttctggggagtcggcgatcttggaccgagtagctgatggcatggtgttcggtgccctccttccctgcgaggaatgctcgggtcagctggtcttcaagagcgatgcctattactgcactggggacgtcactgcctggaccaagtgtatggtcaagacacagacacccaaccggaaggagtgggtaaccccaaaggaattccgagaaatctcttacctcaagaaattgaaggttaaaaagcaggaccgtatattccccccagaaaccagcgcctccgtggcggccacgcctccgccctccacagcctcggctcctgctgctgtgaactcctctgcttcagcagataagccattatccaacatgaagatcctgactctcgggaagctgtcccggaacaaggatgaagtgaaggccatgattgagaaactcggggggaagttgacggggacggccaacaaggcttccctgtgcatcagcaccaaaaaggaggtggaaaagatgaataagaagatggaggaagtaaaggaagccaacatccgagttgtgtctgaggacttcctccaggacgtctccgcctccaccaagagccttcaggagttgttcttagcgcacatcttgtccccttggggggcagaggtgaaggcagagcctgttgaagttgtggccccaagagggaagtcaggggctgcgctctccaaaaaaagcaagggccaggtcaaggaggaaggtatcaacaaatctgaaaagagaatgaaattaactcttaaaggaggagcagctgtggatcctgattctggactggaacactctgcgcatgtcctggagaaaggtgggaaggtcttcagtgccacccttggcctggtggacatcgttaaaggaaccaactcctactacaagctgcagcttctggaggacgacaaggaaaacaggtattggatattcaggtcctggggccgtgtgggtacggtgatcggtagcaacaaactggaacagatgccgtccaaggaggatgccattgagcacttcatgaaattatatgaagaaaaaaccgggaacgcttggcactccaaaaatttcacgaagtatcccaaaaagttctaccccctggagattgactatggccaggatgaagaggcagtgaagaagctgacagtaaatcctggcaccaagtccaagctccccaagccagttcaggacctcatcaagatgatctttgatgtggaaagtatgaagaaagccatggtggagtatgagatcgaccttcagaagatgcccttggggaagctgagcaaaaggcagatccaggccgcatactccatcctcagtgaggtccagcaggcggtgtctcagggcagcagcgactctcagatcctggatctctcaaatcgcttttacaccctgatcccccacgactttgggatgaagaagcctccgctcctgaacaatgcagacagtgtgcaggccaaggtggaaatgcttgacaacctgctggacatcgaggtggcctacagtctgctcaggggagggtctgatgatagcagcaaggatcccatcgatgtcaactatgagaagctcaaaactgacattaaggtggttgacagagattctgaagaagccgagatcatcaggaagtatgttaagaacactcatgcaaccacacacaatgcgtatgacttggaagtcatcgatatctttaagatagagcgtgaaggcgaatgccagcgttacaagccctttaagcagcttcataaccgaagattgctgtggcacgggtccaggaccaccaactttgctgggatcctgtcccagggtcttcggatagccccgcctgaagcgcccgtgacaggctacatgtttggtaaagggatctatttcgctgacatggtctccaagagtgccaactactgccatacgtctcagggagacccaataggcttaatcctgttgggagaagttgcccttggaaacatgtatgaactgaagcacgcttcacatatcagcaagttacccaagggcaagcacagtgtcaaaggttcctcttgggaccgggatttcatctggtgtgaatgacacctctctactatataacgagtacattgtctatgatattgctcaggtaaatctgaagtatctgctgaaactgaaattcaattttaagacctccctgtggtaattgggagaggtagccgagtcacacccggtggctctggtatgaattcacccgaagcgcttctgcaccaactcacctggccgctaagttgctgatgggtagtacctgtactaaaccacctcagaaaggattttacagaaacgtgttaaaggttttctctaacttctcaagtcccttgttttgtgttgtgtctgtggggaggggttgttttggggttgtttttgttttttcttgccaggtagataaaactgacatagagaaaaggctggagagagattctgttgcatagactagtcctatggaaaaaaccaagcttcgttagaatgtctgccttactggtttccccagggaaggaaaaatacacttccacccttttttctaagtgttcgtctttagttttgattttggaaagatgttaagcatttatttttagttaaaaataaaaactaatttcatactatttagattttcttttttatcttgcacttattgtcccctttttagttttttttgtttgcctcttgtggtgaggggtgtgggaagaccaaaggaaggaacgctaacaatttctcatacttagaaacaaaaagagctttccttctccaggaatactgaacatgggagctcttgaaatatgtagtattaaaagttgcatttgaaattcttgactttcttatgggcacttttgtcttccaaattaaaactctaccacaaatatacttacccaagggctaatagtaatactcgattaaaaatgcagatgccttctcta

SEQ ID NO: 297258 - DNA, 4415 bp, Homo sapiens
aactatcgggctaggtacgaggcctgggtttggtggccggtgcggcgtgttcggtggcggctctggccgctcaggcgcctgcggctgggtgagcgcacgcgaggcggcgaggcggcagcgtgtttctaggtcgtggcgtcgggcttccggagctttggcggcagctaggggaggatggcggagtcttcggataagctctatcgagtcgagtacgccaagagcgggcgcgcctcttgcaagaaatgcagcgagagcatccccaaggactcgctccggatggccatcatggtgcagtcgcccatgtttgatggaaaagtcccacactggtaccacttctcctgcttctggaaggtgggccactccatccggcaccctgacgttgaggtggatgggttctctgagcttcggtgggatgaccagcagaaagtcaagaagacagcggaagctggaggagtgacaggcaaaggccaggatggaattggtagcaaggcagagaagactctgggtgactttgcagcagagtatgccaagtccaacagaagtacgtgcaaggggtgtatggagaagatagaaaagggccaggtgcgcctgtccaagaagatggtggacccggagaagccacagctaggcatgattgaccgctggtaccatccaggctgctttgtcaagaacagggaggagctgggtttccggcccgagtacagtgcgagtcagctcaagggcttcagcctccttgctacagaggataaagaagccctgaagaagcagctcccaggagtcaagagtgaaggaaagagaaaaggcgatgaggtggatggagtggatgaagtggcgaagaagaaatctaaaaaagaaaaagacaaggatagtaagcttgaaaaagccctaaaggctcagaacgacctgatctggaacatcaaggacgagctaaagaaagtgtgttcaactaatgacctgaaggagctactcatcttcaacaagcagcaagtgccttctggggagtcggcgatcttggaccgagtagctgatggcatggtgttcggtgccctccttccctgcgaggaatgctcgggtcagctggtcttcaagagcgatgcctattactgcactggggacgtcactgcctggaccaagtgtatggtcaagacacagacacccaaccggaaggagtgggtaaccccaaaggaattccgagaaatctcttacctcaagaaattgaaggttaaaaagcaggaccgtatattccccccagaaaccagcgcctccgtggcggccacgcctccgccctccacagcctcggctcctgctgctgtgaactcctctgcttcagcagataagccattatccaacatgaagatcctgactctcgggaagctgtcccggaacaaggatgaagtgaaggccatgattgagaaactcggggggaagttgacggggacggccaacaaggcttccctgtgcatcagcaccaaaaaggaggtggaaaagatgaataagaagatggaggaagtaaaggaagccaacatccgagttgtgtctgaggacttcctccaggacgtctccgcctccaccaagagccttcaggagttgttcttagcgcacatcttgtccccttggggggcagaggtgaaggcagagcctgttgaagttgtggccccaagagggaagtcaggggctgcgctctccaaaaaaagcaagggccaggtcaaggaggaaggtatcaacaaatctgaaaagagaatgaaattaactcttaaaggaggagcagctgtggatcctgattctggactggaacactctgcgcatgtcctggagaaaggtgggaaggtcttcagtgccacccttggcctggtggacatcgttaaaggaaccaactcctactacaagctgcagcttctggaggacgacaaggaaaacaggtattggatattcaggtcctggggccgtgtgggtacggtgatcggtagcaacaaactggaacagatgccgtccaaggaggatgccattgagcacttcatgaaattatatgaagaaaaaaccgggaacgcttggcactccaaaaatttcacgaagtatcccaaaaagttctaccccctggagattgactatggccaggatgaagaggcagtgaagaagctgacagtaaatcctggcaccaagtccaagctccccaagccagttcaggacctcatcaagatgatctttgatgtggaaagtatgaagaaagccatggtggagtatgagatcgaccttcagaagatgcccttggggaagctgagcaaaaggcagatccaggccgcatactccatcctcagtgaggtccagcaggcggtgtctcagggcagcagcgactctcagatcctggatctctcaaatcgcttttacaccctgatcccccacgactttgggatgaagaagcctccgctcctgaacaatgcagacagtgtgcaggccaaggtggaaatgcttgacaacctgctggacatcgaggtggcctacagtctgctcaggggagggtctgatgatagcagcaaggatcccatcgatgtcaactatgagaagctcaaaactgacattaaggtggttgacagagattctgaagaagccgagatcatcaggaagtatgttaagaacactcatgcaaccacacacaatgcgtatgacttggaagtcatcgatatctttaagatagagcgtgaaggcgaatgccagcgttacaagccctttaagcagcttcataaccgaagattgctgtggcacgggtccaggaccaccaactttgctgggatcctgtcccagggtcttcggatagccccgcctgaagcgcccgtgacaggctacatgtttggtaaagggatctatttcgctgacatggtctccaagagtgccaactactgccatacgtctcagggagacccaataggcttaatcctgttgggagaagttgcccttggaaacatgtatgaactgaagcacgcttcacatatcagcaagttacccaagggcaagcacagtgtcaaaggtttgggcaaaactacccctgatccttcagctaacattagtctggatggtgtagacgttcctcttgggaccgggatttcatctggtgtgaatgacacctctctactatataacgagtatcctttcttgagtatgctgtgtgagcacaaagggatgttctcgagctacagagtcacttatgtgctgtcagattacctggggcagacaaggattagaggctgtcctgtagtgtgtcccatggtgactgtttcccttctgtggtccctccctgtgcatagcctggcttacagggtatgagccttcccccagtttccagaggatgatctcctctcctcagtctgcctgaagaagacttagagtaactttcaggctggcattgagcatcctgccagccccggggagatgaggcaacccagccccatgaagaggccttagagtgactttcaggctggcactgagcgtcctgccagcctgggggagatgaggcacatgtacataccctctgttgtatggctgttggctccttaacaagcttcccctcaggtacattgtctatgatattgctcaggtaaatctgaagtatctgctgaaactgaaattcaattttaagacctccctgtggtaattgggagaggtagccgagtcacacccggtggctctggtatgaattcacccgaagcgcttctgcaccaactcacctggccgctaagttgctgatgggtagtacctgtactaaaccacctcagaaaggattttacagaaacgtgttaaaggttttctctaacttctcaagtcccttgttttgtgttgtgtctgtggggaggggttgttttggggttgtttttgttttttcttgccaggtagataaaactgacatagagaaaaggctggagagagattctgttgcatagactagtcctatggaaaaaaccaagcttcgttagaatgtctgccttactggtttccccagggaaggaaaaatacacttccacccttttttctaagtgttcgtctttagttttgattttggaaagatgttaagcatttatttttagttaaaaataaaaactaatttcatactatttagattttcttttttatcttgcacttattgtcccctttttagttttttttgtttgcctcttgtggtgaggggtgtgggaagaccaaaggaaggaacgctaacaatttctcatacttagaaacaaaaagagctttccttctccaggaatactgaacatgggagctcttgaaatatgtagtattaaaagttgcatttgaaattcttgactttcttatgggcacttttgtcttccaaattaaaactctaccacaaatatacttacccaagggctaatagtaatactcgattaaaaatgcagatgccttctcta

SEQ ID NO: 297259 - DNA, 3959 bp, Homo sapiens
aactatcgggctaggtacgaggcctgggtttggtggccggtgcggcgtgttcggtggcggctctggccgctcaggcgcctgcggctgggtgagcgcacgcgaggcggcgaggcggcagcgtgtttctaggtcgtggcgtcgggcttccggagctttggcggcagctaggggaggatggcggagtcttcggataagctctatcgagtcgagtacgccaagagcgggcgcgcctcttgcaagaaatgcagcgagagcatccccaaggactcgctccggatggccatcatggtgcagtcgcccatgtttgatggaaaagtcccacactggtaccacttctcctgcttctggaaggtgggccactccatccggcaccctgacgttgaggtggatgggttctctgagcttcggtgggatgaccagcagaaagtcaagaagacagcggaagctggaggagtgacaggcaaaggccaggatggaattggtagcaaggcagagaagactctgggtgactttgcagcagagtatgccaagtccaacagaagtacgtgcaaggggtgtatggagaagatagaaaagggccaggtgcgcctgtccaagaagatggtggacccggagaagccacagctaggcatgattgaccgctggtaccatccaggctgctttgtcaagaacagggaggagctgggtttccggcccgagtacagtgcgagtcagctcaagggcttcagcctccttgctacagaggataaagaagccctgaagaagcagctcccaggagtcaagagtgaaggaaagagaaaaggcgatgaggtggatggagtggatgaagtggcgaagaagaaatctaaaaaagaaaaagacaaggatagtaagcttgaaaaagccctaaaggctcagaacgacctgatctggaacatcaaggacgagctaaagaaagtgtgttcaactaatgacctgaaggagctactcatcttcaacaagcagcaagtgccttctggggagtcggcgatcttggaccgagtagctgatggcatggtgttcggtgccctccttccctgcgaggaatgctcgggtcagctggtcttcaagagcgatgcctattactgcactggggacgtcactgcctggaccaagtgtatggtcaagacacagacacccaaccggaaggagtgggtaaccccaaaggaattccgagaaatctcttacctcaagaaattgaaggttaaaaagcaggaccgtatattccccccagaaaccagcgcctccgtggcggccacgcctccgccctccacagcctcggctcctgctgctgtgaactcctctgcttcagcagataagccattatccaacatgaagatcctgactctcgggaagctgtcccggaacaaggatgaagtgaaggccatgattgagaaactcggggggaagttgacggggacggccaacaaggcttccctgtgcatcagcaccaaaaaggaggtggaaaagatgaataagaagatggaggaagtaaaggaagccaacatccgagttgtgtctgaggacttcctccaggacgtctccgcctccaccaagagccttcaggagttgttcttagcgcacatcttgtccccttggggggcagaggtgaaggcagagcctgttgaagttgtggccccaagagggaagtcaggggctgcgctctccaaaaaaagcaagggccaggtcaaggaggaaggtatcaacaaatctgaaaagagaatgaaattaactcttaaaggaggagcagctgtggatcctgattctggactggaacactctgcgcatgtcctggagaaaggtgggaaggtcttcagtgccacccttggcctggtggacatcgttaaaggaaccaactcctactacaagctgcagcttctggaggacgacaaggaaaacaggtattggatattcaggtcctggggccgtgtgggtacggtgatcggtagcaacaaactggaacagatgccgtccaaggaggatgccattgagcacttcatgaaattatatgaagaaaaaaccgggaacgcttggcactccaaaaatttcacgaagtatcccaaaaagttctaccccctggagattgactatggccaggatgaagaggcagtgaagaagctgacagtaaatcctggcaccaagtccaagctccccaagccagttcaggacctcatcaagatgatctttgatgtggaaagtatgaagaaagccatggtggagtatgagatcgaccttcagaagatgcccttggggaagctgagcaaaaggcagatccaggccgcatactccatcctcagtgaggtccagcaggcggtgtctcagggcagcagcgactctcagatcctggatctctcaaatcgcttttacaccctgatcccccacgactttgggatgaagaagcctccgctcctgaacaatgcagacagtgtgcaggccaaggtggaaatgcttgacaacctgctggacatcgaggtggcctacagtctgctcaggggagggtctgatgatagcagcaaggatcccatcgatgtcaactatgagaagctcaaaactgacattaaggtggttgacagagattctgaagaagccgagatcatcaggaagtatgttaagaacactcatgcaaccacacacaatgcgtatgacttggaagtcatcgatatctttaagatagagcgtgaaggcgaatgccagcgttacaagccctttaagcagcttcataaccgaagattgctgtggcacgggtccaggaccaccaactttgctgggatcctgtcccagggtcttcggatagccccgcctgaagcgcccgtgacaggctacatgtttggtaaagggatctatttcgctgacatggtctccaagagtgccaactactgccatacgtctcagggagacccaataggcttaatcctgttgggagaagttgcccttggaaacatgtatgaactgaagcacgcttcacatatcagcaagttacccaagggcaagcacagtgtcaaaggtttgggcaaaactacccctgatccttcagctaacattagtctggatggtgtagacgttcctcttgggaccgggatttcatctggtgtgaatgacacctctctactatataacgagtacattgtctatgatattgctcaggtaaatctgaagtatctgctgaaactgaaattcaattttaagacctccctgtggtaattgggagaggtagccgagtcacacccggtggctctggtatgaattcacccgaagcgcttctgcaccaactcacctggccgctaagttgctgatgggtagtacctgtactaaaccacctcagaaaggattttacagaaacgtgttaaaggttttctctaacttctcaagtcccttgttttggggttgtttttgttttttcttgccaggtagataaaactgacatagagaaaaggctggagagagattctgttgcatagactagtcctatggaaaaaaccaagcttcgttagaatgtctgccttactggtttccccagggaaggaaaaatacacttccacccttttttctaagtgttcgtctttagttttgattttggaaagatgttaagcatttatttttagttaaaaataaaaactaatttcatactatttagattttcttttttatcttgcacttattgtcccctttttagttttttttgtttgcctcttgtggtgaggggtgtgggaagaccaaaggaaggaacgctaacaatttctcatacttagaaacaaaaagagctttccttctccaggaatactgaacatgggagctcttgaaatatgtagtattaaaagttgcatttgaaattcttgactttcttatgggcacttttgtcttccaaattaaaactctaccacaaatatacttacccaagggctaatagtaatactcgattaaaaatgcagatgccttctcta

SEQ ID NO: 297260 - DNA, 1878 bp, Homo sapiens
ggtgtcctcaggaaatcccagcaggctcctgactgctcctgttgggggcctgagggtgggctgcccggtccagctctcctgcgatcacactgcacagtgcccagctttcagagcgaaatcccctgtctcctcagatcgaccttcagaagatgcccttggggaagctgagcaaaaggcagatccaggccgcatactccatcctcagtgaggtccagcaggcggtgtctcagggcagcagcgactctcagatcctggatctctcaaatcgcttttacaccctgatcccccacgactttgggatgaagaagcctccgctcctgaacaatgcagacagtgtgcaggccaaggtggaaatgcttgacaacctgctggacatcgaggtggcctacagtctgctcaggggagggtctgatgatagcagcaaggatcccatcgatgtcaactatgagaagctcaaaactgacattaaggtggttgacagagattctgaagaagccgagatcatcaggaagtatgttaagaacactcatgcaaccacacacaatgcgtatgacttggaagtcatcgatatctttaagatagagcgtgaaggcgaatgccagcgttacaagccctttaagcagcttcataaccgaagattgctgtggcacgggtccaggaccaccaactttgctgggatcctgtcccagggtcttcggatagccccgcctgaagcgcccgtgacaggctacatgtttggtaaagggatctatttcgctgacatggtctccaagagtgccaactactgccatacgtctcagggagacccaataggcttaatcctgttgggagaagttgcccttggaaacatgtatgaactgaagcacgcttcacatatcagcaagttacccaagggcaagcacagtgtcaaaggtttgggcaaaactacccctgatccttcagctaacattagtctggatggtgtagacgttcctcttgggaccgggatttcatctggtgtgaatgacacctctctactatataacgagtacattgtctatgatattgctcaggtaaatctgaagtatctgctgaaactgaaattcaattttaagacctccctgtggtaattgggagaggtagccgagtcacacccggtggctctggtatgaattcacccgaagcgcttctgcaccaactcacctggccgctaagttgctgatgggtagtacctgtactaaaccacctcagaaaggattttacagaaacgtgttaaaggttttctctaacttctcaagtcccttgttttgtgttgtgtctgtggggaggggttgttttggggttgtttttgttttttcttgccaggtagataaaactgacatagagaaaaggctggagagagattctgttgcatagactagtcctatggaaaaaaccaagcttcgttagaatgtctgccttactggtttccccagggaaggaaaaatacacttccacccttttttctaagtgttcgtctttagttttgattttggaaagatgttaagcatttatttttagttaaaaataaaaactaatttcatactatttagattttcttttttatcttgcacttattgtcccctttttagttttttttgtttgcctcttgtggtgaggggtgtgggaagaccaaaggaaggaacgctaacaatttctcatacttagaaacaaaaagagctttccttctccaggaatactgaacatgggagctcttgaaatatgtagtattaaaagttgcatttgaaattcttgactttcttatgggcacttttgtcttccaaattaaaactctaccacaaatatacttacccaagggctaatagtaatactcgattaaaaatgcagatgccttctcta

SEQ ID NO: 297261 - DNA, 3136 bp, Homo sapiens
aactatcgggctaggtacgaggcctgggtttggtggccggtgcggcgtgttcggtggcggctctggccgctcaggcgcctgcggctgggtgagcgcacgcgaggcggcgaggcggcagcgtgtttctaggtcgtggcgtcgggcttccggagctttggcggcagctaggggaggatggcggagtcttcggataagctctatcgagtcgagtacgccaagagcgggcgcgcctcttgcaagaaatgcagcgagagcatccccaaggactcgctccggatggccatcatggtgcagtcgcccatgtttgatggaaaagtcccacactggtaccacttctcctgcttctggaaggtgggccactccatccggcaccctgacgttgaggtggatgggttctctgagcttcggtgggatgaccagcagaaagtcaagaagacagcggaagctggaggagtgacaggcaaaggccaggatggaattggtagcaaggcagagaagactctgggtgactttgcagcagagtatgccaagtccaacagaagtacgtgcaaggggtgtatggagaagatagaaaagggccaggtgcgcctgtccaagaagatggtggacccggagaagccacagctaggcatgattgaccgctggtaccatccaggctgctttgtcaagaacagggaggagctgggtttccggcccgagtacagtgcgagtcagctcaagggcttcagcctccttgctacagaggataaagaagccctgaagaagcagctcccaggagtcaagagtgaaggaaagagaaaaggcgatgaggtggatggagtggatgaagtggcgaagaagaaatctaaaaaagaaaaagacaaggatagtaagcttgaaaaagccctaaaggctcagaacgacctgatctggaacatcaaggacgagctaaagaaagtgtgttcaactaatgacctgaaggagctactcatcttcaacaagcagcaagtgccttctggggagtcggcgatcttggaccgagtagctgatggcatggtgttcggtgccctccttccctgcgaggaatgctcgggtcagctggtcttcaagagcgatgcctattactgcactggggacgtcactgcctggaccaagtgtatggtcaagacacagacacccaaccggaaggagtgggtaaccccaaaggaattccgagaaatctcttacctcaagaaattgaaggttaaaaagcaggaccgtatattccccccagaaaccagcgcctccgtggcggccacgcctccgccctccacagcctcggctcctgctgctgtgaactcctctgcttcagcagataagccattatccaacatgaagatcctgactctcgggaagctgtcccggaacaaggatgaagtgaaggccatgattgagaaactcggggggaagttgacggggacggccaacaaggcttccctgtgcatcagcaccaaaaaggaggtggaaaagatgaataagaagatggaggaagtaaaggaagccaacatccgagttgtgtctgaggacttcctccaggacgtctccgcctccaccaagagccttcaggagttgttcttagcgcacatcttgtccccttggggggcagaggtgaaggcagagcctgttgaagttgtggccccaagagggaagtcaggggctgcgctctccaaaaaaagcaagggccaggtcaaggaggaaggtatcaacaaatctgaaaagagaatgaaattaactcttaaaggaggagcagctgtggatcctgattctggactggaacactctgcgcatgtcctggagaaaggtgggaaggtcttcagtgccacccttggcctggtggacatcgttaaaggaaccaactcctactacaagctgcagcttctggaggacgacaaggaaaacaggtattggatattcaggtcctggggccgtgtgggtacggtgatcggtagcaacaaactggaacagatgccgtccaaggaggatgccattgagcacttcatgaaattatatgaagaaaaaaccgggaacgcttggcactccaaaaatttcacgaagtatcccaaaaagttctaccccctggagattgactatggccaggatgaagaggcagtgaagaagctgacagtaaatcctggcaccaagtccaagctccccaagccagttcaggacctcatcaagatgatctttgatgtggaaagtatgaagaaagccatggtggagtatgagatcgaccttcagaagatgcccttggggaagctgagcaaaaggcagatccaggccgcatactccatcctcagtgaggtccagcaggcggtgtctcagggcagcagcgactctcagatcctggatctctcaaatcgcttttacaccctgatcccccacgactttgggatgaagaagcctccgctcctgaacaatgcagacagtgtgcaggccaaggtggaaatgcttgacaacctgctggacatcgaggtggcctacagtctgctcaggggagggtctgatgatagcagcaaggatcccatcgatgtcaactatgagaagctcaaaactgacattaaggtggttgacagagattctgaagaagccgagatcatcaggaagtatgttaagaacactcatgcaaccacacacaatgcgtatgacttggaagtcatcgatatctttaagatagagcgtgaaggcgaatgccagcgttacaagccctttaagcagcttcataaccgaagattgctgtggcacgggtccaggaccaccaactttgctgggatcctgtcccagggtcttcggatagccccgcctgaagcgcccgtgacaggctacatgtttggtaaagggatctatttcgctgacatggtctccaagagtgccaactactgccatacgtctcagggagacccaataggcttaatcctgttgggagaagttgcccttggaaacatgtatgacttgaagcagcttcaatatcagaagttacaggcagaacgtgtcaagtgggcaatacctgatctcagtacataatcggatgggtaaataccctgaacggatactggtggatgaacgtatattaaagaatggagaatgacgaattggagatgggaagaaattagagacggga

SEQ ID NO: 297262 - DNA, 1850 bp, Homo sapiens
  misc_feature (204)..(204): n is a, c, g, or t
actatgatctttgatgtggaacgcgtgaccaatgccgattggtgaactttgacatcgatcttctacaagatgcactcttggtcatgattagtgcttggcttatcacgcgacactaaataatcgactcgcgtcgagtagccgtcccgtacgtgcaagcagatactccaaggatcggacgattcgtagatcgttcagtatcctggnatctaactcaaaatcgacgttctctaacagccacgtgatctcaccctcacagattatcgcgcgccgaaccgagaagcctccgctcctgaacaatgcagacagtgtgcaggccaaggtggaaatgcttgacaacctgctggacatcgaggtggcctacagtctgctcaggggagggtctgatgatagcagcaaggatcccatcgatgtcaactatgagaagctcaaaactgacattaaggtggttgacagagattctgaagaagccgagatcatcaggaagtatgttaagaacactcatgcaaccacacacaatgcgtatgacttggaagtcatcgatatctttaagatagagcgtgaaggcgaatgccagcgttacaagccctttaagcagcttcataaccgaagattgctgtggcacgggtccaggaccaccaactttgctgggatcctgtcccagggtcttcggatagccccgcctgaagcgcccgtgacaggctacatgtttggtaaagggatctatttcgctgacatggtctccaagagtgccaactactgccatacgtctcagggagacccaataggcttaatcctgttgggagaagttgcccttggaaacatgtatgaactgaagcacgcttcacatatcagcaagttacccaagggcaagcacagtgtcaaaggtttgggcaaaactacccctgatccttcagctaacattagtctggatggtgtagacgttcctcttgggaccgggatttcatctggtgtgaatgacacctctctactatataacgagtacattgtctatgatattgctcaggtaaatctgaagtatctgctgaaactgaaattcaattttaagacctccctgtggtaattgggagaggtagccgagtcacacccggtggctctggtatgaattcacccgaagcgcttctgcaccaactcacctggccgctaagttgctgatgggtagtacctgtactaaaccacctcagaaaggattttacagaaacgtgttaaaggttttctctaacttctcaagtcccttgttttgtgttgtgtctgtggggaggggttgttttggggttgtttttgttttttcttgccaggtagataaaactgacatagagaaaaggctggagagagattctgttgcatagactagtcctatggaaaaaaccaagcttcgttagaatgtctgccttactggtttccccagggaaggaaaaatacacttccacccttttttctaagtgttcgtctttagttttgattttggaaagatgttaagcatttatttttagttaaaaataaaaactaatttcatactatttagattttcttttttatcttgcacttattgtcccctttttagttttttttgtttgcctcttgtggtgaggggtgtgggaagaccaaaggaaggaacgctaacaatttctcatacttagaaacaaaaagagctttccttctccaggaatactgaacatgggagctcttgaaatatgtagtattaaaagttgcatttgaaattcttgactttcttatgggcacttttgtcttccaaattaaaactctaccacaaatatacttacccaagggctaatagtaatactcgattaaaaatgcagatgccttctcta

SEQ ID NO: 297263 - DNA, 3126 bp, Homo sapiens
aactatcgggctaggtacgaggcctgggtttggtggccggtgcggcgtgttcggtggcggctctggccgctcaggcgcctgcggctgggtgagcgcacgcgaggcggcgaggcggcagcgtgtttctaggtcgtggcgtcgggcttccggagctttggcggcagctaggggaggatggcggagtcttcggataagctctatcgagtcgagtacgccaagagcgggcgcgcctcttgcaagaaatgcagcgagagcatccccaaggactcgctccggatggccatcatggtgcagtcgcccatgtttgatggaaaagtcccacactggtaccacttctcctgcttctggaaggtgggccactccatccggcaccctgacgttgaggtggatgggttctctgagcttcggtgggatgaccagcagaaagtcaagaagacagcggaagctggaggagtgacaggcaaaggccaggatggaattggtagcaaggcagagaagactctgggtgactttgcagcagagtatgccaagtccaacagaagtacgtgcaaggggtgtatggagaagatagaaaagggccaggtgcgcctgtccaagaagatggtggacccggagaagccacagctaggcatgattgaccgctggtaccatccaggctgctttgtcaagaacagggaggagctgggtttccggcccgagtacagtgcgagtcagctcaagggcttcagcctccttgctacagaggataaagaagccctgaagaagcagctcccaggagtcaagagtgaaggaaagagaaaaggcgatgaggtggatggagtggatgaagtggcgaagaagaaatctaaaaaagaaaaagacaaggatagtaagcttgaaaaagccctaaaggctcagaacgacctgatctggaacatcaaggacgagctaaagaaagtgtgttcaactaatgacctgaaggagctactcatcttcaacaagcagcaagtgccttctggggagtcggcgatcttggaccgagtagctgatggcatggtgttcggtgccctccttccctgcgaggaatgctcgggtcagctggtcttcaagagcgatgcctattactgcactggggacgtcactgcctggaccaagtgtatggtcaagacacagacacccaaccggaaggagtgggtaaccccaaaggaattccgagaaatctcttacctcaagaaattgaaggttaaaaagcaggaccgtatattccccccagaaaccagcgcctccgtggcggccacgcctccgccctccacagcctcggctcctgctgctgtgaactcctctgcttcagcagataagccattatccaacatgaagatcctgactctcgggaagctgtcccggaacaaggatgaagtgaaggccatgattgagaaactcggggggaagttgacggggacggccaacaaggcttccctgtgcatcagcaccaaaaaggaggtggaaaagatgaataagaagatggaggaagtaaaggaagccaacatccgagttgtgtctgaggacttcctccaggacgtctccgcctccaccaagagccttcaggagttgttcttagcgcacatcttgtccccttggggggcagaggtgaaggcagagcctgttgaagttgtggccccaagagggaagtcaggggctgcgctctccaaaaaaagcaagggccaggtcaaggaggaaggtatcaacaaatctgaaaagagaatgaaattaactcttaaaggaggagcagctgtggatcctgattctggactggaacactctgcgcatgtcctggagaaaggtgggaaggtcttcagtgccacccttggcctggtggacatcgttaaaggaaccaactcctactacaagctgcagcttctggaggacgacaaggaaaacaggtattggatattcaggtcctggggccgtgtgggtacggtgatcggtagcaacaaactggaacagatgccgtccaaggaggatgccattgagcacttcatgaaattatatgaagaaaaaaccgggaacgcttggcactccaaaaatttcacgaagtatcccaaaaagttctaccccctggagattgactatggccaggatgaagaggcagtgaagaagctgacagtaaatcctggcaccaagtccaagctccccaagccagttcaggacctcatcaagatgatctttgatgtggaaagtatgaagaaagccatggtggagtatgagatcgaccttcagaagatgcccttggggaagctgagcaaaaggcagatccaggccgcatactccatcctcagtgaggtccagcaggcggtgtctcagggcagcagcgactctcagatcctggatctctcaaatcgcttttacaccctgatcccccacgactttgggatgaagaagcctccgctcctgaacaatgcagacagtgtgcaggccaaggtggaaatgcttgacaacctgctggacatcgaggtggcctacagtctgctcaggggagggtctgatgatagcagcaaggatcccatcgatgtcaactatgagaagctcaaaactgacattaaggtggttgacagagattctgaagaagccgagatcatcaggaagtatgttaagaacactcatgcaaccacacacaatgcgtatgacttggaagtcatcgatatctttaagatagagcgtgaaggcgaatgccagcgttacaagccctttaagcagcttcataaccgaagattgctgtggcacgggtccaggaccaccaactttgctgggtgactttgcagcagagtatgccaagtccaacagaagtacgtgcaaggggtgtatggagaagatagaaaagggccaggtgcgcctgtccaagaagatggtggacccggagaagccacagctaggcatgattgaccgctggtaccatccaggctgctttgtcaagaacagggaggagctgggtttccggcccgagtacagtgcgagtcagctcaagggcttcagcctccttgctacagaggataaagaagccctgaagaagcagctcccaggagtcaagagtgaaggaaagagaaaaggcgatgaggtggatggagtggatgaagtggcgaagaagaaatc

SEQ ID NO: 297264 - DNA, 1459 bp, Homo sapiens
tgagctcattccgtcctcatggcagctccatgagactgtgttccccatttgagaaaagaggcaagtagagtccagagaggttacgtagcttcttgcagctccttggcacctggcagagctaggatctgacagcctggcttgtgagctaaaactttggtatttcctcaccatgggcattgtgagaattagaagtgatggattgcagcacttagctgggtggcttgctcaagttggcactcagtgaacagctgctcctaatttcccatcagaagattctcagctctcccttttccgaccttccagacaggctacatgtttggtaaagggatctatttcgctgacatggtctccaagagtgccaactactgccatacgtctcagggagacccaataggcttaatcctgttgggagaagttgcccttggaaacatgtatgaactgaagcacgcttcacatatcagcaagttacccaagggcaagcacagtgtcaaaggtttgggcaaaactacccctgatccttcagctaacattagtctggatggtgtagacgttcctcttgggaccgggatttcatctggtgtgaatgacacctctctactatataacgagtacattgtctatgatattgctcaggtaaatctgaagtatctgctgaaactgaaattcaattttaagacctccctgtggtaattgggagaggtagccgagtcacacccggtggctctggtatgaattcacccgaagcgcttctgcaccaactcacctggccgctaagttgctgatgggtagtacctgtactaaaccacctcagaaaggattttacagaaacgtgttaaaggttttctctaacttctcaagtcccttgttttgtgttgtgtctgtggggaggggttgttttggggttgtttttgttttttcttgccaggtagataaaactgacatagagaaaaggctggagagagattctgttgcatagactagtcctatggaaaaaaccaagcttcgttagaatgtctgccttactggtttccccagggaaggaaaaatacacttccacccttttttctaagtgttcgtctttagttttgattttggaaagatgttaagcatttatttttagttaaaaataaaaactaatttcatactatttagattttcttttttatcttgcacttattgtcccctttttagttttttttgtttgcctcttgtggtgaggggtgtgggaagaccaaaggaaggaacgctaacaatttctcatacttagaaacaaaaagagctttccttctccaggaatactgaacatgggagctcttgaaatatgtagtattaaaagttgcatttgaaattcttgactttcttatgggcacttttgtcttccaaattaaaactctaccacaaatatacttacccaagggctaatagtaatactcgattaaaaatgcagatgccttctcta

SEQ ID NO: 297265 - DNA, 1234 bp, Homo sapiens
cagctgcagaggctgcaggcccggtccccagtcggctagaatggacccccgcagctcggggagggggaggccgctccggctccagtcgtctctgtcgccctcaggtattccgttgacatggtctccaagagtgccaactactgccatacgtctcagggagacccaataggcttaatcctgttgggagaagttgcccttggaaacatgtatgaactgaagcacgcttcacatatcagcaagttacccaagggcaagcacagtgtcaaaggtttgggcaaaactacccctgatccttcagctaacattagtctggatggtgtagacgttcctcttgggaccgggatttcatctggtgtgaatgacacctctctactatataacgagtacattgtctatgatattgctcaggtaaatctgaagtatctgctgaaactgaaattcaattttaagacctccctgtggtaattgggagaggtagccgagtcacacccggtggctctggtatgaattcacccgaagcgcttctgcaccaactcacctggccgctaagttgctgatgggtagtacctgtactaaaccacctcagaaaggattttacagaaacgtgttaaaggttttctctaacttctcaagtcccttgttttgtgttgtgtctgtggggaggggttgttttggggttgtttttgttttttcttgccaggtagataaaactgacatagagaaaaggctggagagagattctgttgcatagactagtcctatggaaaaaaccaagcttcgttagaatgtctgccttactggtttccccagggaaggaaaaatacacttccacccttttttctaagtgttcgtctttagttttgattttggaaagatgttaagcatttatttttagttaaaaataaaaactaatttcatactatttagattttcttttttatcttgcacttattgtcccctttttagttttttttgtttgcctcttgtggtgaggggtgtgggaagaccaaaggaaggaacgctaacaatttctcatacttagaaacaaaaagagctttccttctccaggaatactgaacatgggagctcttgaaatatgtagtattaaaagttgcatttgaaattcttgactttcttatgggcacttttgtcttccaaattaaaactctaccacaaatatacttacccaagggctaatagtaatactcgattaaaaatgcagatgccttctcta

SEQ ID NO: 297266 - DNA, 1135 bp, Homo sapiens
agtcacaccattgcactccggcctgggcgacagtgagactccatctcaaaaaggaaaaaaaaaaaaaagaaagaccacatggacccaacatcaaatagagctcatctccctggaagctttgccacatctgtactcacagttcatgtcacttgtgacttctgtttttcaggtttgggcaaaactacccctgatccttcagctaacattagtctggatggtgtagacgttcctcttgggaccgggatttcatctggtgtgaatgacacctctctactatataacgagtacattgtctatgatattgctcaggtaaatctgaagtatctgctgaaactgaaattcaattttaagacctccctgtggtaattgggagaggtagccgagtcacacccggtggctctggtatgaattcacccgaagcgcttctgcaccaactcacctggccgctaagttgctgatgggtagtacctgtactaaaccacctcagaaaggattttacagaaacgtgttaaaggttttctctaacttctcaagtcccttgttttgtgttgtgtctgtggggaggggttgttttggggttgtttttgttttttcttgccaggtagataaaactgacatagagaaaaggctggagagagattctgttgcatagactagtcctatggaaaaaaccaagcttcgttagaatgtctgccttactggtttccccagggaaggaaaaatacacttccacccttttttctaagtgttcgtctttagttttgattttggaaagatgttaagcatttatttttagttaaaaataaaaactaatttcatactatttagattttcttttttatcttgcacttattgtcccctttttagttttttttgtttgcctcttgtggtgaggggtgtgggaagaccaaaggaaggaacgctaacaatttctcatacttagaaacaaaaagagctttccttctccaggaatactgaacatgggagctcttgaaatatgtagtattaaaagttgcatttgaaattcttgactttcttatgggcacttttgtcttccaaattaaaactctaccacaaatatacttacccaagggctaatagtaatactcgattaaaaatgcagatgccttctcta

SEQ ID NO: 297267 - DNA, 1449 bp, Homo sapiens
  misc_feature (1429)..(1429): n is a, c, g, or t
  misc_feature (1445)..(1445): n is a, c, g, or t
aactatcgggctaggtacgaggcctgggtttggtggccggtgcggcgtgttcggtggcggctctggccgctcaggcgcctgcggctgggtgagcgcacgcgaggcggcgaggcggcagcgtgtttctaggtcgtggcgtcgggcttccggagctttggcggcagctaggggaggatggcggagtcttcggataagctctatcgagtcgagtacgccaagagcgggcgcgcctcttgcaagaaatgcagcgagagcatccccaaggactcgctccggatggccatcatggtgcagtcgcccatgtttgatggaaaagtcccacactggtaccacttctcctgcttctggaaggtgggccactccatccggcaccctgacgttgaggtggatgggttctctgagcttcggtgggatgaccagcagaaagtcaagaagacagcggaagctggaggagtgacaggcaaaggccaggatggaattggtagcaaggcagagaagactctgggtgactttgcagcagagtatgccaagtccaacagaagtacgtgcaaggggtgtatggagaagatagaaaagggccaggtgcgcctgtccaagaagatggtggacccggagaagccacagctaggcatgattgaccgctggtaccatccaggctgctttgtcaagaacagggaggagctgggtttccggcccgagtacagtgcgagtcagctcaagggcttcagcctccttgctacagaggataaagaagccctgaagaagcagctcccaggagtcaagagtgaaggaaagagaaaaggcgatgaggtggatggagtggatgaagtggcgaagaagaaatctaaaaaagaaaaagacaaggatagtaagcttgaaaaagccctaaaggctcagaacgacctgatctggaacatcaaggacgagctaaagaaagtgtgttcaactaatgacctgaaggagctactcatcttcaacaagcagcaagtgccttctggggagtcggcgatcttggaccgagtagctgatggcatggtgttcggtgccctccttccctgcgaggaatgctcgggtcagctggtcttcaagagcgatgcctattactgcactggggacgtcactgcctggaccaagtgtatggtcaagacacagacacccaaccggaaggagtgggtaaccccaaaggaattccgagaaatctcttacctcaagaaattgaaggttaaaaagcaggaccgtatattccccccagaaaccagcgcctccgtggcggccacgcctccgccctccacagcctcggctcctgctgctgtgaactcctctgcttcagcagataagccattatccaacatgaagatcctgactctcgggaagctgtcccggaacaaggatgaagtgaaggccatgatcttgactcgggggatcctgngggtaccgagctcganttcg

SEQ ID NO: 297268 - DNA, 1562 bp, Homo sapiens
agtcacaccattgcactccggcctgggcgacagtgagactccatctcaaaaaggaaaaaaaaaaaaaagaaagaccacatggacccaacatcaaatagagctcatctccctggaagctttgccacatctgtactcacagttcatgtcacttgtgacttctgtttttcaggtttgggcaaaactacccctgatccttcagctaacattagtctggatggtgtagacgttcctcttgggaccgggatttcatctggtgtgaatgacacctctctactatataacgagtatcctttcttgagtatgctgtgtgagcacaaagggatgttctcgagctacagagtcacttatgtgctgtcagattacctggggcagacaaggattagaggctgtcctgtagtgtgtcccatggtgactgtttcccttctgtggtccctccctgtgcatagcctggcttacagggtatgagccttcccccagtttccagaggatgatctcctctcctcagtctgcctgaagaagacttagagtaactttcaggctggcattgagcatcctgccagccccggggagatgaggcaacccagccccatgaagaggccttagagtgactttcaggctggcactgagcgtcctgccagcctgggggagatgaggcacatgtacataccctctgttgtatggctgttggctccttaacaagcttcccctcaggtacattgtctatgatattgctcaggtaaatctgaagtatctgctgaaactgaaattcaattttaagacctccctgtggtaattgggagaggtagccgagtcacacccggtggctctggtatgaattcacccgaagcgcttctgcaccaactcacctggccgctaagttgctgatgggtagtacctgtactaaaccacctcagaaaggattttacagaaacgtgttaaaggttttctctaacttctcaagtcccttgttttgtgttgtgtctgtggggaggggttgttttggggttgtttttgttttttcttgccaggtagataaaactgacatagagaaaaggctggagagagattctgttgcatagactagtcctatggaaaaaaccaagcttcgttagaatgtctgccttactggtttccccagggaaggaaaaatacacttccacccttttttctaagtgttcgtctttagttttgattttggaaagatgttaagcatttatttttagttaaaaataaaaactaatttcatactatttagattttcttttttatcttgcacttattgtcccctttttagttttttttgtttgcctcttgtggtgaggggtgtgggaagaccaaaggaaggaacgctaacaatttctcatacttagaaacaaaaagagctttccttctccaggaatactgaacatgggagctcttgaaatatgtagtattaaaagttgcatttgaaattcttgactttcttatgggcacttttgtcttccaaattaaaactctaccacaaatatacttacccaagggctaatagtaatactcgattaaaaatgcagatgccttctcta

SEQ ID NO: 297269 - DNA, 922 bp, Homo sapiens
ccaccacttcgtccactatgatctgacacaagtcatggtggacgaagttgttgcgcgaccacttcgtccattcagacctgccaccacttcgtccaccaggatatgacttgaagaagtgtatggtggctcggcgtgtgcatgcacacgccgagtgcccatacacgccgagaatcacacccggtggctctggtatgaattcacccgaagcgcttctgcaccaactcacctggccgctaagttgctgatgggtagtacctgtactaaaccacctcagaaaggattttacagaaacgtgttaaaggttttctctaacttctcaagtcccttgttttgtgttgtgtctgtggggaggggttgttttggggttgtttttgttttttcttgccaggtagataaaactgacatagagaaaaggctggagagagattctgttgcatagactagtcctatggaaaaaaccaagcttcgttagaatgtctgccttactggtttccccagggaaggaaaaatacacttccacccttttttctaagtgttcgtctttagttttgattttggaaagatgttaagcatttatttttagttaaaaataaaaactaatttcatactatttagattttcttttttatcttgcacttattgtcccctttttagttttttttgtttgcctcttgtggtgaggggtgtgggaagaccaaaggaaggaacgctaacaatttctcatacttagaaacaaaaagagctttccttctccaggaatactgaacatgggagctcttgaaatatgtagtattaaaagttgcatttgaaattcttgactttcttatgggcacttttgtcttccaaattaaaactctaccacaaatatacttacccaagggctaatagtaatactcgattaaaaatgcagatgccttctcta

SEQ ID NO: 297270 - DNA, 692 bp, Homo sapiens
aactatcgggctaggtacgaggcctgggtttggtggccggtgcggcgtgttcggtggcggctctggccgctcaggcgcctgcggctgggtgagcgcacgcgaggcggcgaggcggcagcgtgtttctaggtcgtggcgtcgggcttccggagctttggcggcagctaggggaggatggcggagtcttcggataagctctatcgagtcgagtacgccaagagcgggcgcgcctcttgcaagaaatgcagcgagagcatccccaaggactcgctccggatggccatcatggtgcagtcgcccatgtttgatggaaaagtcccacactggtaccacttctcctgcttctggaaggtgggccactccatccggcaccctgacgttgaggtggatgggttctctgagcttcggtgggatgaccagcagaaagtcaagaagacagcggaagctggaggagtgacaggtgtgtacatactggggcagcatgggcattcagcccccaccctgaagctcccaggagggcctcgtctcagagagcaaagcagacctcccccagcttgccctctcccacatgtgcagatcaagcgtatggtgcccatgttatttcagcaacacctcctggactcagcatcatctgttgcatgatatttggtattttgtttttccagatgcttggaatgtagcctttaaagtta

SEQ ID NO: 297271 - DNA, 940 bp, Homo sapiens
ccattgtcctcagcccattccctgcagtgttgcaggggtttgggtgggcgagagtatgttgagtctggtaccaggtgtttacatcgctaaagaaagagccttggcttctttcctaggacaaagtatagacctatgggtccaagcagggtaagacaccacatgtcatttgttttgcccctagagcaccttcctgatgggaaaactgtaggtgtggttcttcgtgaagggattcttattctctttttacaattctgaagccttttaattaaaagacagggaggtagaccagcattctaggttttctgaagtttgaatataaatatgaaaataaaacataactagtctcctccgtaatactcaggcttactgagcatagattacatcagctatttgacagatgcttgttaggcctgtgctctgagccagggataattttcattgcacatcatagctgtgacttcctctggcccattgtgttttaactcatgctgagctggactctcttccaggagccaattgcttgttctggagatgccctgttcactgacagtgaatcccacattctagcttccctgatatcccaaaacatagaattttaagacaaaaaggaaccctgagattctctagcagcccaagtagatgaagaggtggaggcttaggtaagtggagccactggcccaggatctgcccagcccacaggcctgggacacaggctctcggtcatgcccggcttcctttgaggagtgtggtgttgagctatgcattgactgagcctgagcattcctcctctgtagctctcctgggtctcttttgtgctaatcccaagattctgtttatccaggtggttgacagagattctgaagaagccgagatcatcaggaagtatgttaagaacactcatgcaaccacacacaatgcgtatgacttggaagtcatcgat

SEQ ID NO: 297272 - DNA, 745 bp, Homo sapiens
ccgtttagtttgacaaaggaggcagcgaggccgtctcattggtagccctctcctggcttgcccagccaccacctcacctcgattcctcccaggcctgggtccagcaccagcctaggaagagggtgccccatgctgtctagctcttcttcgggatggggggctccaggttccttggtattttgctttggcctttggagcctcagtcaaaactgaggaaaggtgtcattttcacatctcgtcacacgtacagtgactgcaactaaaagcacaggctttgtagaaacagacatgggttcaggccccagctccaccattcacaaggtgtgtggcttcctgcaaggtaccttcatctctgagttacctgactccatctgagtttccttcttgtaaaactggcatccatgaaagtggctacctcgaagggcgtgaagatgaaatgaggtggaaagtaggtagcccccgaatgagggaagcattgagtgagagctggccctctgacccttctaaaagaacacagccaactttttaaactgtctttccagaaagagatggaaaacttcgaagcccctttccactgccttgccaagcagttccaccagctgtaccgggagaaggtggaggttttccgggccctggcatgacgagctggagcagatcgtgctgcacaaccggagaagacagaattacctctgctcttttaatatataatgatggctttaaataaaattaggagaaaatgtcaaaa

SEQ ID NO: 297273 - DNA, 1314 bp, Homo sapiens
gcttctttatctcgggactctcaggcgcagcgggggcgggatataaagctggttgacgtcaattacaaccactcgtcaagcagactgaacttgaagaactgataactctacgaattgcatctcaagaaaaggctgttatcccagctctctactcccattggatttttgtgagaccttgagggtgggagcttttggcggcaaccaatcgagggtcagcgaggaggaggaggaggcggggcaggtgggctatggttgcttggagagtgcatccggcccggtacttgtgatcggaggagagccggatcgtccttccttgaaccctctgggtagggctgtgctgaggggctgggcggggagcacaggccgtgtccgctcgcttgcaccttttcagactgccgtgtcaggcctcgagccgggcccacctggagccctcccctgcccacccgcccccagcgcccgatatccgcccccggcccagaagggccgggctcggtcatccccagtcccgtcgcggccactgacccttgagatcagccctcccctccccaccttcccgtcccaggccagcccagggcccgaagcccacccactcgcgtctctagcagccgctcttgtcctctgggtacggctcgcgggagtgttggttaccatggtgaagctggcagccaaatgcatcctggcaggagacccagcagtgggcaagaccgccctggcacagatcttccgcagtgatggagcccatttccagaaaagctacaccctgacaacaggaatggatttggtggtgaagacagtgccagttcctgacacgggagacagtgtggaactcttcatttttgactctgctggcaaggagctgttttcggaaatgctggataaattgtgggagagtcccaatgtcttatgtctcgtctatgatgtgaccaatgaagaatccttcaacaactgcagcaagtggctggagaaggctcggtcacaggctccaggcatctctctcccaggtgttttagttgggaacaagacagacctggccggcagacgagcagtggactcagctgaggcccgggcatgggcgctgggccagggcctggaatgttttgaaacatccgtgaaagagatggaaaacttcgaagcccctttccactgccttgccaagcagttccaccagctgtaccgggagaaggtggaggttttccgggccctggcatgacgagctggagcagatcgtgctgcacaaccggagaagacagaattacctctgctcttttaatatataatgatggctttaaataaaattaggagaaaatgtcaaaa

SEQ ID NO: 297274 - DNA, 912 bp, Homo sapiens
tactcagtgacctcctttagaaagaattgttctaagatttgaaaatcaatttggttaacaaagtgcagaatgaccttttggaaaccagagcactcaccggcctgtttagcattctgttctgccaggtgggaagtcagcttgttcctggtatttttgcactcagggttacaagaggtgagactccacacagaaagtgctggttggtgcgagaacccgtcgtactgcctctctaagactctggagttcgctcctttccccttcatcttctctcgtgcctgggagaaaagacagagcatgtgtgaagatgtgggtgcctgtatttcacccctaagacaagtccagtgtgagttgagagtgataccagtgactcgtagcttgtggtttttccacgtggagacttttcttgcttttctgattgtaggaactcttcatttttgactctgctggcaaggagctgttttcggaaatgctggataaattgtgggagagtcccaatgtcttatgtctcgtctatgatgtgaccaatgaagaatccttcaacaactgcagcaagtggctggagaaggctcggtcacaggctccaggcatctctctcccaggtgttttagttgggaacaagacagacctggccggcagacgagcagtggactcagctgaggcccgggcatgggcgctgggccagggcctggaatgttttgaaacatccgtgaaagagatggaaaacttcgaagcccctttccactgccttgccaagcagttccaccagctgtaccgggagaaggtggaggttttccgggccctggcatgacgagctggagcagatcgtgctgcacaaccggagaagacagaattacctctgctcttttaatatataatgatggctttaaataaaattaggagaaaatgtcaaaa

SEQ ID NO: 297275 - DNA, 774 bp, Homo sapiens
gcttctttatctcgggactctcaggcgcagcgggggcgggatataaagctggttgacgtcaattacaaccactcgtcaagcagactgaacttgaagaactgataactctacgaattgcatctcaagaaaaggctgttatcccagctctctactcccattggatttttgtgagaccttgagggtgggagcttttggcggcaaccaatcgagggtcagcgaggaggaggaggaggcggggcaggtgggctatggttgcttggagagtgcatccggcccggtacttgtgatcggaggagagccggatcgtccttccttgaaccctctgggtagggctgtgctgaggggctgggcggggagcacaggccgtgtccgctcgcttgcaccttttcagactgccgtgtcaggcctcgagccgggcccacctggagccctcccctgcccacccgcccccagcgcccgatatccgcccccggcccagaagggccgggctcggtcatccccagtcccgtcgcggccactgacccttgagatcagccctcccctccccaccttcccgtcccaggccagcccagggcccgaagcccacccactcgcgtctctagcagccgctcttgtcctctgggtacggctcgcgggagtgttggttaccatggtgaagctggcagccaaatgcatcctggcagttcctgtggataaaaggcttagccgtgcagaagtgtgctctggctgttgtgaggtttgcagatcagtctcatggacctgtgccctgcccgc

SEQ ID NO: 297276 - DNA, 467 bp, Homo sapiens
cacgaggacagagtctggcgcctggtaaacactcagtagatgttagctttcttaaagtataaatattgcccctagaatcttgtttatagtgttattacttactaaatccttgtattcatggcttgtgcagagataaatatcacccttgcctctggtccaattatcacaaatgctaaattaatgaagcccaaatcagcttttcctgtatagagggtttgccatcttttctgcagcacacctttgtgcaaagcagtaggcggtagtgccctagcaaacaggatttcagtattctcccttcctccattcatttgtgaaattgtccctgcaccccaatattccatattccctagaacgcttgatagaactcagaaattaaaacccaccccaacctccaaaacatgagtcaccaaaggccagtgggctacgggttaaactctgttgaggtgttgaagtgggtgggtgggtgt

SEQ ID NO: 297277 - DNA, 481 bp, Homo sapiens
aacatgctctccctttgggggccctcagtgctaacattcttggtgttcctcggcagacaacaggaatggatttggtggtgaagacagtgccagttcctgacacgggagacagtgtggtgagtgatgcctttacccaggggaactcagggctcccccagctgggcccagggtctctgtggtcacaccatcctccctaggagagatgcagtgcaaggctgtggtctagacttggctgagcatttcggaatagaatcgggaagcattcaagggagggactgaggaggtggaggaggaaggaaggaaggaggactaggagatgggcctggcccttgaggaacttgttctctactatcaaggttcttgagtctctttatgggaacctggggctcttgaaagtgaattgcaagacgttatgtttgtgtgtgcttttctagagagagggtttgtagctttcaccagattcctaaagaggtctgcgaga

SEQ ID NO: 297278 - DNA, 462 bp, Homo sapiens
agcacttgctattatctgtgcaagttaactagtcccccctgagttgaggctcacagaagcaccgctggcagctcggttaagaaagctgtaattaaaaaggaaatataagcaaacgcagcttgagacgcagccaagggctggcgccaagctcatctcctcctctcttctgcctaaacaccgcagtgaccatcctgcctacccaaaggaggtccctacaaacaagtgcaagaacaatccgcgctgatcactgccctcccagaaagagatggaaaacttcgaagcccctttccactgccttgccaagcagttccaccagctgtaccgggagaaggtggaggttttccgggccctggcatgacgagctggagcagatcgtgctgcacaaccggagaagacagaattacctctgctcttttaatatataatgatggctttaaataaaattaggagaaaatgtcaaaa

SEQ ID NO: 297279 - DNA, 560 bp, Homo sapiens
agcacttgctattatctgtgcaagttaactagtcccccctgagttgaggctcacagaagcaccgctggcagctcggttaagaaagctgtaattaaaaaggaaatataagcaaacgcagcttgagacgcagccaagggctggcgccaagctcatctcctcctctcttctgcctaaacaccgcagtgaccatcctgcctacccaaaggaggtccctacaaacaagtgcaagaacaatccgcgctgatcactgccctcccaggcaagcgaggagtggggaagtaacgtttgatgagggcctactgtgtgctaggtgttttgcacacattatttgtttaggcttcataacagccctacaagaaagagatggaaaacttcgaagcccctttccactgccttgccaagcagttccaccagctgtaccgggagaaggtggaggttttccgggccctggcatgacgagctggagcagatcgtgctgcacaaccggagaagacagaattacctctgctcttttaatatataatgatggctttaaataaaattaggagaaaatgtcaaaa

SEQ ID NO: 297280 - DNA, 546 bp, Homo sapiens
cacgaggacagagtctggcgcctggtaaacactcagtagatgttagctttcttaaagtataaatattgcccctagaatcttgtttatagtgttattacttactaaatccttgtattcatggcttgtgcagagataaatatcacccttgcctctggtccaattatcacaaatgctaaattaatgaagcccaaatcagcttttcctgtatagagggtttgccatcttttctgcagcacacctttgtgcaaagcagtaggcggtagtgccctagcaaacaggatttcagtattctcccttcttccattcttaactctactttcgacggaagcagtgttttaccccgacactggcttgcctaggaccttgtgctctgcacaactagcagggcccggcaggatgtactgaattcttgctctcgtgtccagctggacggtgatggctttcaagtccttggctgttgggagcttactataaatgttcgtcttggctacaaactctccactctttcctcggcactctctcagcattgccaccactgtctttcct

SEQ ID NO: 297281 - DNA, 220 bp, Homo sapiens
gtgttgaaggattcttcatgggtcacatcatagacgagacataagacactgggactctcccacaatttatccagcatttccgggagaaggtggaggttttccgggccctggcatgacgagctggagcagatcgtgctgcacaaccggagaagacagaattacctctgctcttttaatatataatgatggctttaaataaaattaggagaaaatgtcaaaa

SEQ ID NO: 297282 - DNA, 1078 bp, Homo sapiens
gcttctttatctcgggactctcaggcgcagcgggggcgggatataaagctggttgacgtcaattacaaccactcgtcaagcagactgaacttgaagaactgataactctacgaattgcatctcaagaaaaggctgttatcccagctctctactcccattggatttttgtgagaccttgagggtgggagcttttggcggcaaccaatcgagggtcagcgaggaggaggaggaggcggggcaggtgggctatggttgcttggagagtgcatccggcccggtacttgtgatcggaggagagccggatcgtccttccttgaaccctctgggccagcccagggcccgaagcccacccactcgcgtctctagcagccgctcttgtcctctgggtacggctcgcgggagtgttggttaccatggtgaagctggcagccaaatgcatcctggcaggagacccagcagtgggcaagaccgccctggcacagatcttccgcagtgatggagcccatttccagaaaagctacaccctgacaacaggaatggatttggtggtgaagacagtgccagttcctgacacgggagacagtgtggaactcttcatttttgactctgctggcaaggagctgttttcggaaatgctggataaattgtgggagagtcccaatgtcttatgtctcgtctatgatgtgaccaatgaagaatccttcaacaactgcagcaagtggctggagaaggctcggtcacaggctccaggcatctctctcccaggtgttttagttgggaacaagacagacctggccggcagacgagcagtggactcagctgaggcccgggcatgggcgctgggccagggcctggaatgttttgaaacatccgtgaaagagatggaaaacttcgaagcccctttccactgccttgccaagcagttccaccagctgtaccgggagaaggtggaggttttccgggccctggcatgacgagctggagcagatcgtgctgcacaaccggagaagacagaattacctctgctcttttaatatataatgatggctttaaataaaattaggagaaaatgtcaaaa

SEQ ID NO: 297283 - DNA, 1204 bp, Homo sapiens
gcttctttatctcgggactctcaggcgcagcgggggcgggatataaagctggttgacgtcaattacaaccactcgtcaagcagactgaacttgaagaactgataactctacgaattgcatctcaagaaaaggctgttatcccagctctctactcccattggatttttgtgagaccttgagggtgggagcttttggcggcaaccaatcgagggtcagcgaggaggaggaggaggcggggcaggtgggctatggttgcttggagagtgcatccggcccggtacttgtgatcggaggagagccggatcgtccttccttgaaccctctgggtagggctgtgctgaggggctgggcggggagcacaggccgtgtccgctcgcttgcaccttttcagactgccgtgtcaggcctcgagccgggcccacctggagccctcccctgcccacccgcccccagcgcccgatatccgcccccggcccagaagggccgggctcggtcatccccagtcccgtcgcggccactgacccttgagatcagccctcccctccccaccttcccgtcccaggccagcccagggcccgaagcccacccactcgcgtctctagcagccgctcttgtcctctgggtacggctcgcgggagtgttggttaccatggtgaagctggcagccaaatgcatcctggcaggagacccagcagtgggcaagaccgccctggcacagatcttccgcagtgatggagcccatttccagaaaagctacaccctgacaacaggaatggatttggtggtgaagacagtgccagttcctgacacgggagacagtgtggaactcttcatttttgactctgctggcaaggagctgttttcggaaatgctggataaattgtgggagagtcccaatgtcttatgtctcgtctatgatgtgaccaatgaagaatccttcaacaactgcagcaagtggctggagaaggctcggtcacaggctccaggcatctctctcccagaaagagatggaaaacttcgaagcccctttccactgccttgccaagcagttccaccagctgtaccgggagaaggtggaggttttccgggccctggcatgacgagctggagcagatcgtgctgcacaaccggagaagacagaattacctctgctcttttaatatataatgatggctttaaataaaattaggagaaaatgtcaaaa

SEQ ID NO: 297284 - DNA, 1188 bp, Homo sapiens
gcttctttatctcgggactctcaggcgcagcgggggcgggatataaagctggttgacgtcaattacaaccactcgtcaagcagactgaacttgaagaactgataactctacgaattgcatctcaagaaaaggctgttatcccagctctctactcccattggatttttgtgagaccttgagggtgggagcttttggcggcaaccaatcgagggtcagcgaggaggaggaggaggcggggcaggtgggctatggttgcttggagagtgcatccggcccggtacttgtgatcggaggagagccggatcgtccttccttgaaccctctgggtagggctgtgctgaggggctgggcggggagcacaggccgtgtccgctcgcttgcaccttttcagactgccgtgtcaggcctcgagccgggcccacctggagccctcccctgcccacccgcccccagcgcccgatatccgcccccggcccagaagggccgggctcggtcatccccagtcccgtcgcggccactgacccttgagatcagccctcccctccccaccttcccgtcccaggccagcccagggcccgaagcccacccactcgcgtctctagcagccgctcttgtcctctgggtacggctcgcgggagtgttggttaccatggtgaagctggcagccaaatgcatcctggcaggagacccagcagtgggcaagaccgccctggcacagatcttccgcagtgatggagcccatttccagaaaagctacaccctgacaacaggaatggatttggtggtgaagacagtgccagttcctgacacgggagacagtgtggtgagtgatgcctttacccaggggaactcagggctcccccagctgggcccagggtctctgtggtcacaccatcctccctaggagagatgcagtgcaaggctgtggtctagacttggctgagcatttcggaatagaatcgggaagcattcaagggagggactgaggaggtggaggaggaaggaaggaaggaggactaggagatgggcctggcccttgaggaacttgttctctactatcaaggttcttgagtctctttatgggaacctggggctcttgaaagtgaattgcaagacgttatgtttgtgtgtgcttttctagagagagggtttgtagctttcaccagattcctaaagaggtctgcgaga

SEQ ID NO: 297285 - DNA, 1005 bp, Homo sapiens
gcttctttatctcgggactctcaggcgcagcgggggcgggatataaagctggttgacgtcaattacaaccactcgtcaagcagactgaacttgaagaactgataactctacgaattgcatctcaagaaaaggctgttatcccagctctctactcccattggatttttgtgagaccttgagggtgggagcttttggcggcaaccaatcgagggtcagcgaggaggaggaggaggcggggcaggtgggctatggttgcttggagagtgcatccggcccggtacttgtgatcggaggagagccggatcgtccttccttgaaccctctgggtagggctgtgctgaggggctgggcggggagcacaggccgtgtccgctcgcttgcaccttttcagactgccgtgtcaggcctcgagccgggcccacctggagccctcccctgcccacccgcccccagcgcccgatatccgcccccggcccagaagggccgggctcggtcatccccagtcccgtcgcggccactgacccttgagatcagccctcccctccccaccttcccgtcccaggccagcccagggcccgaagcccacccactcgcgtctctagcagccgctcttgtcctctgggtacggctcgcgggagtgttggttaccatggtgaagctggcagccaaatgcatcctggcagatactcgctgagcacctactacgtcagagtcaccgtgcaaggtgcagtgggcctgcaagcatgagtcagttgcactcaaggaagaactaagatgcgtgtgatacgttctaacacagcgaacacaaagtgaatgccctttgtgtgccagatgcggggaaatgcctccaggcacagctgctacttgttctggttctggagaagaaagaaaacaacatttgacattgatctgtattttgtttacttttaaaaaaacacttaaatagtacttatatatgccaggcactgtgcatattaactcattaaatcctcataacaattctgt

SEQ ID NO: 297286 - DNA, 689 bp, Homo sapiens
tgctaggtgttttgcacacattatttgtttaggcttcataacagccctacaaggtaacactcctgtgttgtatagatgacagactcagaaaggttgtgtagcttgccctggttgcatagttaaacgagggctagaaacaggactaggagtcaggcctgtccagctggaaaacttgggttttctagaaggggtaccctggcctcctgcggagcctgctgtgggactctgcagaacacaattcaaggccagactgaacactagcctgaacctgccctgagaatccctctaagccgacctactccacagctgtcctgactgtgtaagcgagatgatgattagtgatcagacgaaaggattcctgtcattggtaaccctctcaaagtatttggaaaacagttcaattttcatctatttcagaagcacgccgtggtgtctattgaggctcacctgcattgaattccttcctttttatgttgcgatctcccaagattgcattgtggagtgttttcgaatccattttgaaatccccgtgcgtgcgctatgcaggcctcagtctttttccattccattcttaactctactttcgacggaagcagtgttttaccccgacactggcttgcctaggaccttgtgctctgcacaactagcagggcccggcaggatgtactgaattcttgctctcgtgtcca

SEQ ID NO: 297287 - DNA, 3799 bp, Homo sapiens
agcggagcttcggtgacgtcagagaggcgcgctcccagctcggagccgactcgcagacgcgccccgcccctcggcgtcgctctggactggcgcaggcgcaagccggcaagatggcggcggctggggctggccgtctgaggcgggtggcatcggctctgctgctgcggagcccccgcctgcccgcccgggagctgtcggccccggcccgactctatcacaagaaggtagggacaaaagaggggacgcgcggaatgccgactcagcggaggcctgggctggaggggcggccgcggggttctgcgcagctaggactgggagctgtgccctcccacgtctttgccctgactcgctttcccttgctgcgcagtgaggctcactgcaactgataaacaacagttaccgctcatcgggcggcgacttccagggggccccgccgctggccgcgacttcgtgcgtcccaattttaaattcgccaacagcccaggaggcagggtcctgttgggacttgtctttctgagtccagggacagacacacccccggagcgggctccggcttcagccactccgctgccctggccagatgaccttgggctagtcactgcgcctctctgaacctgtttccccaggtgtaaatggggggctctcagctgtcccttacaaaggatactgtgcgtggagtcctggcatggttcctggcacataggccccagcacgaggagaccgtttctgttactgctttaggagtgcataggggagtcaggcttgtaaccaacatgcgtaatgtttttgttttgtttggggggttttttggcggggaaggagggatagattcatagtctgcagccccttgctgtctggtggcacaaagtcccccagacgtgagactcccactcgagaaacaactaaagaatgccataaatcaacgtggcacaaaaggcccctacattagatactatcctgaggtcccttttacttggagtcaaaatccttagtcagatggggggaaaaggggactggaagatcggcgtgcttactactaaccagtaaccaaacctcaaggttattaaggccttctgtgtgccagttcgaatggatgtttattgtgatctggcttctgccctttctccaagggcttcttcactcctccccctcccgggggtgtgttttgttgagggtacaccctgaagaaacttggactagcagcctttcagcagccagggtgcgctgctgcaccagggtgatgacaggctgtgaaatacggtaatggcactgtttttattttaaaagacacataaacgtacacattccatagcattgttccctgtgtaacagtcaccttaaggcttctaagaaagctttccctccctgggccatggttatttttagaatttttaaatagtaatcatcctttgaggatggattttatttgaaaataacaaaactgctgtttgagcccaagtctggtgatgtaggtgggtgaaagtcaagtatttttgtaaaaatcctatggaactaagacatgatttcactgatttttttttcttctaggtatctcaaatctgtgaagtattgtagaggagacacaaaaggaattgggggtcacaaatggttctcattgacatgagtgtagacctttctactcaggtgaaatttggtatttagtgattgcctgccaggttcaagatgctgaccgaggagcttaccatcaaaccagagaccagtaccaatagagagtgaacatgatttatcttaaccctctcattttaggttgttgatcattatgaaaatcctagaaacgtggggtcccttgacaagacatctaaaaatgttggaactggactggtgggggctccagcatgtggtgacgtaatgaaattacagattcaagtggatgaaaaggggaagattgtggatgctaggtttaaaacatttggctgtggttccgcaattgcctccagctcattagccactgaatgggtgaaaggaaagacggtggaggaagccttgactatcaaaaacacagatatcgccaaggagctctgccttcctcccgtgaaactgcactgctccaaatctgtgctgtttccagcagaggagaaaactcagctttcgccataatcctgtttcctgtgtatttcttcacttcctgtctggatggtattcctgtcggggtctgcatctgtatatatggaacaactaagcccagttgtacaatgtccccctccctgctatcctaaaaaaaagcccagatgccttaagacttgtacttggctttccagtttggtctctgtattaaatctaatgctttttccatcatttcttaaccttctcagggaaagaaggaatgagaaacattagccttaatgcatcgatggaggtttactaaccaaattagttaaaaatcagcagagagtcaggcctcttgccaaggtaatactcacagcagaagagccaggtgccggggcagacacactaactcattcttcaggaagcctggtcagacctaagttctttccacttgatctggaattttaagtacccataaagaaaggtcatcacttgtaaacattttcacatggtttcaggaaatccccagcccttttattaggcctttttaggtactgaaacctttagctgatgttctctgttatttgcttgctttctgctgtcattccagctctctcagtttttattttccccatagcctcactttgaatattgactcctaaataaaagtggtcaaactctcgatcactagagggtgatgtggcaaatgccatcccatcaacagattgacatgatcttttttccaaagggcatgtcaacttttttatcatgacaagattttgtccaaagctagactttgatgggagcaggcaagaagtaacatttcctgtgtccctactatgtgtcagacatcttctgtaagtccccacactatcctggcaagaaaagcatgattatcccagttctatagaagagaaagtagggtcaaagaggctaaggaactagcctgggatcacagatttttaaccgtagtctgtctccaggatcacccgcaggagtaactcagctcaggaagcagctgctgacgtgcccagcaactcctcaccccagctttctggcttggttactccattagtccccaccagcaccacttcctcccagctcttaaagattctattcccaagtccatttctttcacatctagaaacttaggcttctttccttccgttacttccagtgctggctgaagatgcaatcaaggccgccctggctgattacaaattgaaacaagaacccaaaaaaggagaggcagagaagaaatgagccctccctcggcgaagcctccagcaggccacaccagctgtttcccacctgctgtgcagtcaccttagatgttcagaagccgcttcctctccactgaagagctatgagatacgcacaatacttgctgttcacgttatgactctcatgcaagcaaaatacacagtttcattgttctgaatcctgtggtttctttcagcccacttttatcgccttaacctagttaatgtatattttgaattgtgtgtatgacctcagaactgaaattgataatgaagttgcaagttttgatagcccgtgaagtgcataagtatctaattttacctgaattgatttggggggaaattaccagtagaatgccttggtctgaatatttgatagaaccaattgttgtacataaaacagatctgcgcatatatatatatgtataaaaaataataaaataatggaagatgatggtgttctctaataa

SEQ ID NO: 297288 - DNA, 713 bp, Homo sapiens
ccgttctgtgcttccttttccctcgttgccagcaattgcctccagctcattagccactgaatgggtgaaaggaaagacggtggaggaagccttgactatcaaaaacacagatatcgccaaggagctctgccttcctcccgtgaaactgcactgctccatgctggctgaagatgcaatcaaggccgccctggctgattacaaattgaaacaagaacccaaaaaaggagaggcagagaagaaatgagccctccctcggcgaagcctccagcaggccacaccagctgtttcccacctgctgtgcagtcaccttagatgttcagaagccgcttcctctccactgaagagctatgagatacgcacaatacttgctgttcacgttatgactctcatgcaagcaaaatacacagtttcattgttctgaatcctgtggtttctttcagcccacttttatcgccttaacctagttaatgtatattttgaattgtgtgtatgacctcagaactgaaattgataatgaagttgcaagttttgatagcccgtgaagtgcataagtatctaattttacctgaattgatttggggggaaattaccagtagaatgccttggtctgaatatttgatagaaccaattgttgtacataaaacagatctgcgcatatatatatatgtataaaaaataataaaataatggaagatgatggtgttctctaataa

SEQ ID NO: 297289 - DNA, 787 bp, Homo sapiens
agcggagcttcggtgacgtcagagaggcgcgctcccagctcggagccgactcgcagacgcgccccgcccctcggcgtcgctctggactggcgcaggcgcaagccggcaagatggcggcggctggggctggccgtctgaggcgggtggcatcggctctgctgctgcggagcccccgcctgcccgcccgggagctgtcggccccggcccgactctatcacaagaaggttgttgatcattatgaaaatcctagaaacgtggggtcccttgacaagacatctaaaaatgttggaactggactggtgggggctccagcatgtggtgacgtaatgaaattacagattcaagtggatgaaaaggggaagattgtggatgctaggtttaaaacatttggctgtggttccgcaattgcctccagctcattagccactgaatgggtgaaaggaaagacggtggaggaagccttgactatcaaaaacacagatatcgccaaggagctctgccttcctcccgtgaaactgcactgctccatgctggctgaagatgcaatcaaggccgccctggctgattacaaattgaaacaagaacccaaaaaaggagaggcagagaagaaatgagccctccctcggcgaagcctccagcaggccacaccagctgtttcccacctgctgtgcagtcaccttagatgttcagaagccgcttcctctccactgaagagctatgagatacgcacaatacttgctgttcacgttatgactctcatgcaagcaaaatacacagtttcattgtt

SEQ ID NO: 297290 - DNA, 416 bp, Homo sapiens
gcacgagctgctgtggcctgctggagccgcttcctctccactgaagagctatgagatacgcacaatacttgctgttcacgttatgactctcatgcaagcaaaatacacagtttcattgttctgaatcctgtggtttctttcagcccacttttatcgccttaacctagttaatgtatattttgaattgtgtgtatgacctcagaactgaaattgataatgaagttgcaagttttgatagcccgtgaagtgcataagtatctaattttacctgaattgatttggggggaaattaccagtagaatgccttggtctgaatatttgatagaaccaattgttgtacataaaacagatctgcgcatatatatatatgtataaaaaataataaaataatggaagatgatggtgttctctaataa

SEQ ID NO: 297291 - DNA, 460 bp, Homo sapiens
cgggcgggcaggcgggggctccgcagcagcagaaccgatgccacccgcctcagacggccagccccagccgccgcttcctctccactgaagagctatgagatacgcacaatacttgctgttcacgttatgactctcatgcaagcaaaatacacagtttcattgttctgaatcctgtggtttctttcagcccacttttatcgccttaacctagttaatgtatattttgaattgtgtgtatgacctcagaactgaaattgataatgaagttgcaagttttgatagcccgtgaagtgcataagtatctaattttacctgaattgatttggggggaaattaccagtagaatgccttggtctgaatatttgatagaaccaattgttgtacataaaacagatctgcgcatatatatatatgtataaaaaataataaaataatggaagatgatggtgttctctaataa

SEQ ID NO: 297292 - DNA, 745 bp, Homo sapiens
  misc_feature (713)..(713): n is a, c, g, or t
  misc_feature (716)..(716): n is a, c, g, or t
  misc_feature (741)..(741): n is a, c, g, or t
agcggagcttcggtgacgtcagagaggcgcgctcccagctcggagccgactcgcagacgcgccccgcccctcggcgtcgctctggactggcgcaggcgcaagccggcaagatggcggcggctggggctggccgtctgaggcgggtggcatcggctctgctgctgcggagcccccgcctgcccgcccgggagctgtcggccccggcccgactctatcacaagaaggtagggacaaaagaggggacgcgcggaatgccgactcagcggaggcctgggctggaggggcggccgcggggttctgcgcagctaggactgggagctgtgccctcccacgtctttgccctgactcgctttcccttgctgcgcagtgaggctcactgcaactgataaacaacagttaccgctcatcgggcggcgacttccagggggccccgccgctggccgcgacttcgtgcgtcccaattttaaattcgccaacagcccaggaggcagggtcctgttgggacttgtctttctgagtccagggacagacacacccccggagcgggctccggcttcagccactccgctgccctggccagatgaccttgggctagtcactgcgcctctctgaacctgtttccccaggtgtaaatggggggctctcagctgtcccttacaaaggatactgtgcgtggagtcctggcatggttccccccccccatgttttttttnccnaagaaaattgttttcttgttactgnttta

SEQ ID NO: 297293 - DNA, 2503 bp, Homo sapiens
agcggagcttcggtgacgtcagagaggcgcgctcccagctcggagccgactcgcagacgcgccccgcccctcggcgtcgctctggactggcgcaggcgcaagccggcaagatggcggcggctggggctggccgtctgaggcgggtggcatcggctctgctgctgcggagcccccgcctgcccgcccgggagctgtcggccccggcccgactctatcacaagaaggtagggacaaaagaggggacgcgcggaatgccgactcagcggaggcctgggctggaggggcggccgcggggttctgcgcagctaggactgggagctgtgccctcccacgtctttgccctgactcgctttcccttgctgcgcagtgaggctcactgcaactgataaacaacagttaccgctcatcgggcggcgacttccagggggccccgccgctggccgcgacttcgtgcgtcccaattttaaattcgccaacagcccaggaggcagggtcctgttgggacttgtctttctgagtccagggacagacacacccccggagcgggctccggcttcagccactccgctgccctggccagatgaccttgggctagtcactgcgcctctctgaacctgtttccccaggtgtaaatggggggctctcagctgtcccttacaaaggatactgtgcgtggagtcctggcatggttcctggcacataggccccagcacgaggagaccgtttctgttactgctttaggagtgcataggggagtcaggcttgtaaccaacatgcgtaatgtttttgttttgtttggggggttttttggcggggaaggagggatagattcatagtctgcagccccttgctgtctggtggcacaaagtcccccagacgtgagactcccactcgagaaacaactaaagaatgccataaatcaacgtggcacaaaaggcccctacattagatactatcctgaggtcccttttacttggagtcaaaatccttagtcagatggggggaaaaggggactggaagatcggcgtgcttactactaaccagtaaccaaacctcaaggttattaaggccttctgtgtgccagttcgaatggatgtttattgtgatctggcttctgccctttctccaagggcttcttcactcctccccctcccgggggtgtgttttgttgagggtacaccctgaagaaacttggactagcagcctttcagcagccagggtgcgctgctgcaccagggtgatgacaggctgtgaaatacggtaatggcactgtttttattttaaaagacacataaacgtacacattccatagcattgttccctgtgtaacagtcaccttaaggcttctaagaaagctttccctccctgggccatggttatttttagaatttttaaatagtaatcatcctttgaggatggattttatttgaaaataacaaaactgctgtttgagcccaagtctggtgatgtaggtgggtgaaagtcaagtatttttgtaaaaatcctatggaactaagacatgatttcactgatttttttttcttctaggtatctcaaatctgtgaagtattgtagaggagacacaaaaggaattgggggtcacaaatggttctcattgacatgagtgtagacctttctactcaggttgttgatcattatgaaaatcctagaaacgtggggtcccttgacaagacatctaaaaatgttggaactggactggtgggggctccagcatgtggtgacgtaatgaaattacagattcaagtggatgaaaaggggaagattgtggatgctaggtttaaaacatttggctgtggttccgcaattgcctccagctcattagccactgaatgggtgaaaggaaagacggtggaggaagccttgactatcaaaaacacagatatcgccaaggagctctgccttcctcccgtgaaactgcactgctccatgctggctgaagatgcaatcaaggccgccctggctgattacaaattgaaacaagaacccaaaaaaggagaggcagagaagaaatgagccctccctcggcgaagcctccagcaggccacaccagctgtttcccacctgctgtgcagtcaccttagatgttcagaagccgcttcctctccactgaagagctatgagatacgcacaatacttgctgttcacgttatgactctcatgcaagcaaaatacacagtttcattgttctgaatcctgtggtttctttcagcccacttttatcgccttaacctagttaatgtatattttgaattgtgtgtatgacctcagaactgaaattgataatgaagttgcaagttttgatagcccgtgaagtgcataagtatctaattttacctgaattgatttggggggaaattaccagtagaatgccttggtctgaatatttgatagaaccaattgttgtacataaaacagatctgcgcatatatatatatgtataaaaaataataaaataatggaagatgatggtgttctctaataa

SEQ ID NO: 297294 - DNA, 2626 bp, Homo sapiens
agcggagcttcggtgacgtcagagaggcgcgctcccagctcggagccgactcgcagacgcgccccgcccctcggcgtcgctctggactggcgcaggcgcaagccggcaagatggcggcggctggggctggccgtctgaggcgggtggcatcggctctgctgctgcggagcccccgcctgcccgcccgggagctgtcggccccggcccgactctatcacaagaaggtagggacaaaagaggggacgcgcggaatgccgactcagcggaggcctgggctggaggggcggccgcggggttctgcgcagctaggactgggagctgtgccctcccacgtctttgccctgactcgctttcccttgctgcgcagtgaggctcactgcaactgataaacaacagttaccgctcatcgggcggcgacttccagggggccccgccgctggccgcgacttcgtgcgtcccaattttaaattcgccaacagcccaggaggcagggtcctgttgggacttgtctttctgagtccagggacagacacacccccggagcgggctccggcttcagccactccgctgccctggccagatgaccttgggctagtcactgcgcctctctgaacctgtttccccaggtgtaaatggggggctctcagctgtcccttacaaaggatactgtgcgtggagtcctggcatggttcctggcacataggccccagcacgaggagaccgtttctgttactgctttaggagtgcataggggagtcaggcttgtaaccaacatgcgtaatgtttttgttttgtttggggggttttttggcggggaaggagggatagattcatagtctgcagccccttgctgtctggtggcacaaagtcccccagacgtgagactcccactcgagaaacaactaaagaatgccataaatcaacgtggcacaaaaggcccctacattagatactatcctgaggtcccttttacttggagtcaaaatccttagtcagatggggggaaaaggggactggaagatcggcgtgcttactactaaccagtaaccaaacctcaaggttattaaggccttctgtgtgccagttcgaatggatgtttattgtgatctggcttctgccctttctccaagggcttcttcactcctccccctcccgggggtgtgttttgttgagggtacaccctgaagaaacttggactagcagcctttcagcagccagggtgcgctgctgcaccagggtgatgacaggctgtgaaatacggtaatggcactgtttttattttaaaagacacataaacgtacacattccatagcattgttccctgtgtaacagtcaccttaaggcttctaagaaagctttccctccctgggccatggttatttttagaatttttaaatagtaatcatcctttgaggatggattttatttgaaaataacaaaactgctgtttgagcccaagtctggtgatgtaggtgggtgaaagtcaagtatttttgtaaaaatcctatggaactaagacatgatttcactgatttttttttcttctaggtatctcaaatctgtgaagtattgtagaggagacacaaaaggaattgggggtcacaaatggttctcattgacatgagtgtagacctttctactcaggtgaaatttggtatttagtgattgcctgccaggttcaagatgctgaccgaggagcttaccatcaaaccagagaccagtaccaatagagagtgaacatgatttatcttaaccctctcattttaggttgttgatcattatgaaaatcctagaaacgtggggtcccttgacaagacatctaaaaatgttggaactggactggtgggggctccagcatgtggtgacgtaatgaaattacagattcaagtggatgaaaaggggaagattgtggatgctaggtttaaaacatttggctgtggttccgcaattgcctccagctcattagccactgaatgggtgaaaggaaagacggtggaggaagccttgactatcaaaaacacagatatcgccaaggagctctgccttcctcccgtgaaactgcactgctccatgctggctgaagatgcaatcaaggccgccctggctgattacaaattgaaacaagaacccaaaaaaggagaggcagagaagaaatgagccctccctcggcgaagcctccagcaggccacaccagctgtttcccacctgctgtgcagtcaccttagatgttcagaagccgcttcctctccactgaagagctatgagatacgcacaatacttgctgttcacgttatgactctcatgcaagcaaaatacacagtttcattgttctgaatcctgtggtttctttcagcccacttttatcgccttaacctagttaatgtatattttgaattgtgtgtatgacctcagaactgaaattgataatgaagttgcaagttttgatagcccgtgaagtgcataagtatctaattttacctgaattgatttggggggaaattaccagtagaatgccttggtctgaatatttgatagaaccaattgttgtacataaaacagatctgcgcatatatatatatgtataaaaaataataaaataatggaagatgatggtgttctctaataa

SEQ ID NO: 297295 - DNA, 1179 bp, Homo sapiens
agcggagcttcggtgacgtcagagaggcgcgctcccagctcggagccgactcgcagacgcgccccgcccctcggcgtcgctctggactggcgcaggcgcaagccggcaagatggcggcggctggggctggccgtctgaggcgggtggcatcggctctgctgctgcggagcccccgcctgcccgcccgggagctgtcggccccggcccgactctatcacaagaaggtatctcaaatctgtgaagtattgtagaggagacacaaaaggaattgggggtcacaaatggttctcattgacatgagtgtagacctttctactcaggttgttgatcattatgaaaatcctagaaacgtggggtcccttgacaagacatctaaaaatgttggaactggactggtgggggctccagcatgtggtgacgtaatgaaattacagattcaagtggatgaaaaggggaagattgtggatgctaggtttaaaacatttggctgtggttccgcaattgcctccagctcattagccactgaatgggtgaaaggaaagacggtggaggaagccttgactatcaaaaacacagatatcgccaaggagctctgccttcctcccgtgaaactgcactgctccatgctggctgaagatgcaatcaaggccgccctggctgattacaaattgaaacaagaacccaaaaaaggagaggcagagaagaaatgagccctccctcggcgaagcctccagcaggccacaccagctgtttcccacctgctgtgcagtcaccttagatgttcagaagccgcttcctctccactgaagagctatgagatacgcacaatacttgctgttcacgttatgactctcatgcaagcaaaatacacagtttcattgttctgaatcctgtggtttctttcagcccacttttatcgccttaacctagttaatgtatattttgaattgtgtgtatgacctcagaactgaaattgataatgaagttgcaagttttgatagcccgtgaagtgcataagtatctaattttacctgaattgatttggggggaaattaccagtagaatgccttggtctgaatatttgatagaaccaattgttgtacataaaacagatctgcgcatatatatatatgtataaaaaataataaaataatggaagatgatggtgttctctaataa

SEQ ID NO: 297296 - DNA, 1869 bp, Homo sapiens
agcggagcttcggtgacgtcagagaggcgcgctcccagctcggagccgactcgcagacgcgccccgcccctcggcgtcgctctggactggcgcaggcgcaagccggcaagatggcggcggctggggctggccgtctgaggcgggtggcatcggctctgctgctgcggagcccccgcctgcccgcccgggagctgtcggccccggcccgactctatcacaagaaggtagggacaaaagaggggacgcgcggaatgccgactcagcggaggcctgggctggaggggcggccgcggggttctgcgcagctaggactgggagctgtgccctcccacgtctttgccctgactcgctttcccttgctgcgcagtgaggctcactgcaactgataaacaacagttaccgctcatcgggcggcgacttccagggggccccgccgctggccgcgacttcgtgcgtcccaattttaaattcgccaacagcccaggaggcagggtcctgttgggacttgtctttctgagtccagggtgtgttttgttgagggtacaccctgaagaaacttggactagcagcctttcagcagccagggtgcgctgctgcaccagggtgatgacaggctgtgaaatacggtaatggcactgtttttattttaaaagacacataaacgtacacattccatagcattgttccctgtgtaacagtcaccttaaggcttctaagaaagctttccctccctgggccatggttatttttagaatttttaaatagtaatcatcctttgaggatggattttatttgaaaataacaaaactgctgtttgagcccaagtctggtgatgtaggtgggtgaaagtcaagtatttttgtaaaaatcctatggaactaagacatgatttcactgatttttttttcttctaggtatctcaaatctgtgaagtattgtagaggagacacaaaaggaattgggggtcacaaatggttctcattgacatgagtgtagacctttctactcaggttgttgatcattatgaaaatcctagaaacgtggggtcccttgacaagacatctaaaaatgttggaactggactggtgggggctccagcatgtggtgacgtaatgaaattacagattcaagtggatgaaaaggggaagattgtggatgctaggtttaaaacatttggctgtggttccgcaattgcctccagctcattagccactgaatgggtgaaaggaaagacggtggaggaagccttgactatcaaaaacacagatatcgccaaggagctctgccttcctcccgtgaaactgcactgctccatgctggctgaagatgcaatcaaggccgccctggctgattacaaattgaaacaagaacccaaaaaaggagaggcagagaagaaatgagccctccctcggcgaagcctccagcaggccacaccagctgtttcccacctgctgtgcagtcaccttagatgttcagaagccgcttcctctccactgaagagctatgagatacgcacaatacttgctgttcacgttatgactctcatgcaagcaaaatacacagtttcattgttctgaatcctgtggtttctttcagcccacttttatcgccttaacctagttaatgtatattttgaattgtgtgtatgacctcagaactgaaattgataatgaagttgcaagttttgatagcccgtgaagtgcataagtatctaattttacctgaattgatttggggggaaattaccagtagaatgccttggtctgaatatttgatagaaccaattgttgtacataaaacagatctgcgcatatatatatatgtataaaaaataataaaataatggaagatgatggtgttctctaataa

SEQ ID NO: 297297 - DNA, 1928 bp, Homo sapiens
  misc_feature (1087)..(1087): n is a, c, g, or t
  misc_feature (1090)..(1090): n is a, c, g, or t
  misc_feature (1486)..(1486): n is a, c, g, or t
agcggagcttcggtgacgtcagagaggcgcgctcccagctcggagccgactcgcagacgcgccccgcccctcggcgtcgctctggactggcgcaggcgcaagccggcaagatggcggcggctggggctggccgtctgaggcgggtggcatcggctctgctgctgcggagcccccgcctgcccgcccgggagctgtcggccccggcccgactctatcacaagaaggttgttgatcattatgaaaatcctagaaacgtggggtcccttgacaagacatctaaaaatgttggaactggactggtgggggctccagcatgtggtgacgtaatgaaattacagattcaagtggatgaaaaggggaagattgtggatgctaggtttaaaacatttggctgtggttccgcaattgcctccagctcattagccactgaatgggtgaaaggaaagacggtggaggaagccttgactatcaaaaacacagatatcgccaaggagctctgccttcctcccgtgaaactgcactgctccatgctggctgaagatgcaatcaaggccgccctggctgattacaaattgaaacaagaacccaaaaaaggagaggcagagaagaaatgagccctccctcggcgaagcctccagcaggccacaccagctgtttcccacctgctgtgcagtcaccttagatgttcagaagccgcttcctctccactgaagagctatgagatacgcacaatacttgctgttcacgttatgactctcatgcaagcaaaatacacagtttcattgttctgaatcctgtggtttctttcagcccacttttatcgccttaacctagttaatgtatattttgaattgtgtgtatgacctcagaactgaaattgataatgaagttgcaagttttgatagcccgtgaagtgcataagtatctaattttacctgaattgatttggggggaaattaccagtagaatgccttggtctgaatatttgatagaaccaattgttgtacataaaacagatctgcgcatatatatatatgtataaaaaataataaaataatggaagatgatggtgttctctaataaaaanaanaaaaaaaaaaaaaacaaaaaaaatttgttcgcgcgcgccgcctgggggccctcggaagaaagttttatagaaaccattccgtgttggggacccgcggggccccacagagaggatagcgcgaacctgtgggccacaacggtggtgcccaaagggaaaaacacatggggcgcaaaaagacaaaaatgagggcatgggagcattcacaccgcacaaataaagaaaccgccaccggaggggaaaaacacagagaagcgcgtgctaagagacaacagtacccaggaagggggaagacaccgacagaagggcacaataacagaggagcatctaacacaaaacaaacgagggtgcaccaaaaacggggaggcaccaaagaaaatatcacaaaagtaagagccnccccaagcatgtgggggaacaaacgaacaagacagaggacgcggcgcgaggaggaaagacgagcaacaaaaagccaacacgaaaaggacgaaaacaaaaacacaaagagaccaagaaaaaacagcaagaacaacgaagagaaacaagacaacaagcaagacaagccgaaaagacgagagagagaaacagagaagagaagaaaagaacaaagggaagaaacaagaagagagagaaagaaaaaagaaggaagagaaagaagaggacaacagaaaaaaaagaaaaacagaaaagagaaaaaaaaaaaaaaaaaaaaaaaaaaaaactggttggtatctctgtcggggtctgcatctgtatatatggaacaactaagcccagttgtacaatgtccccctccctgctatcctaaaaaaaagcccagatgccttaagacttgtaaaaa

SEQ ID NO: 297298 - DNA, 2985 bp, Homo sapiens
agcggagcttcggtgacgtcagagaggcgcgctcccagctcggagccgactcgcagacgcgccccgcccctcggcgtcgctctggactggcgcaggcgcaagccggcaagatggcggcggctggggctggccgtctgaggcgggtggcatcggctctgctgctgcggagcccccgcctgcccgcccgggagctgtcggccccggcccgactctatcacaagaaggtagggacaaaagaggggacgcgcggaatgccgactcagcggaggcctgggctggaggggcggccgcggggttctgcgcagctaggactgggagctgtgccctcccacgtctttgccctgactcgctttcccttgctgcgcagtgaggctcactgcaactgataaacaacagttaccgctcatcgggcggcgacttccagggggccccgccgctggccgcgacttcgtgcgtcccaattttaaattcgccaacagcccaggaggcagggtcctgttgggacttgtctttctgagtccagggacagacacacccccggagcgggctccggcttcagccactccgctgccctggccagatgaccttgggctagtcactgcgcctctctgaacctgtttccccaggtgtaaatggggggctctcagctgtcccttacaaaggatactgtgcgtggagtcctggcatggttcctggcacataggccccagcacgaggagaccgtttctgttactgctttaggagtgcataggggagtcaggcttgtaaccaacatgcgtaatgtttttgttttgtttggggggttttttggcggggaaggagggatagattcatagtctgcagccccttgctgtctggtggcacaaagtcccccagacgtgagactcccactcgagaaacaactaaagaatgccataaatcaacgtggcacaaaaggcccctacattagatactatcctgaggtcccttttacttggagtcaaaatccttagtcagatggggggaaaaggggactggaagatcggcgtgcttactactaaccagtaaccaaacctcaaggttattaaggccttctgtgtgccagttcgaatggatgtttattgtgatctggcttctgccctttctccaagggcttcttcactcctccccctcccgggggtgtgttttgttgagggtacaccctgaagaaacttggactagcagcctttcagcagccagggtgcgctgctgcaccagggtgatgacaggctgtgaaatacggtaatggcactgtttttattttaaaagacacataaacgtacacattccatagcattgttccctgtgtaacagtcaccttaaggcttctaagaaagctttccctccctgggccatggttatttttagaatttttaaatagtaatcatcctttgaggatggattttatttgaaaataacaaaactgctgtttgagcccaagtctggtgatgtaggtgggtgaaagtcaagtatttttgtaaaaatcctatggaactaagacatgatttcactgatttttttttcttctaggtatctcaaatctgtgaagtattgtagaggagacacaaaaggaattgggggtcacaaatggttctcattgacatgagtgtagacctttctactcaggtgaaatttggtatttagtgattgcctgccaggttcaagatgctgaccgaggagcttaccatcaaaccagagaccagtaccaatagagagtgaacatgatttatcttaaccctctcattttaggttgttgatcattatgaaaatcctagaaacgtggggtcccttgacaagacatctaaaaatgttggaactggactggtgggggctccagcatgtggtgacgtaatgaaattacagattcaagtggatgaaaaggggaagattgtggatgctaggtttaaaacatttggctgtggttccgcaattgcctccagctcattagccactgaatgggtgaaaggaaagacggtggaggaagccttgactatcaaaaacacagatatcgccaaggagctctgccttcctcccgtgaaactgcactgctccaaatctgtgctgtttccagcagaggagaaaactcagctttcgccataatcctgtttcctgtgtatttcttcacttcctgtctggatggtattcctgtcggggtctgcatctgtatatatggaacaactaagcccagttgtacaatgtccccctccctgctatcctaaaaaaaagcccagatgccttaagacttgtacttggctttccagtttggtctctgtattaaatctaatgctttttccatcatttcttaaccttctcagggaaagaaggaatgagaaacattagccttaatgcatcgatggaggtttactaaccaaattagttaaaaatcagcagagagtcaggcctcttgccaagtgctggctgaagatgcaatcaaggccgccctggctgattacaaattgaaacaagaacccaaaaaaggagaggcagagaagaaatgagccctccctcggcgaagcctccagcaggccacaccagctgtttcccacctgctgtgcagtcaccttagatgttcagaagccgcttcctctccactgaagagctatgagatacgcacaatacttgctgttcacgttatgactctcatgcaagcaaaatacacagtttcattgttctgaatcctgtggtttctttcagcccacttttatcgccttaacctagttaatgtatattttgaattgtgtgtatgacctcagaactgaaattgataatgaagttgcaagttttgatagcccgtgaagtgcataagtatctaattttacctgaattgatttggggggaaattaccagtagaatgccttggtctgaatatttgatagaaccaattgttgtacataaaacagatctgcgcatatatatatatgtataaaaaataataaaataatggaagatgatggtgttctctaataa

SEQ ID NO: 297299 - DNA, 2256 bp, Homo sapiens
agcggagcttcggtgacgtcagagaggcgcgctcccagctcggagccgactcgcagacgcgccccgcccctcggcgtcgctctggactggcgcaggcgcaagccggcaagatggcggcggctggggctggccgtctgaggcgggtggcatcggctctgctgctgcggagcccccgcctgcccgcccgggagctgtcggccccggcccgactctatcacaagaaggttgttgatcattatgaaaatcctagaaacgtggggtcccttgacaagacatctaaaaatgttggaactggactggtgggggctccagcatgtggtgacgtaatgaaattacagattcaagtggatgaaaaggggaagattgtggatgctaggtttaaaacatttggctgtggttccgcaattgcctccagctcattagccactgaatgggtgaaaggaaagacggtggaggaagccttgactatcaaaaacacagatatcgccaaggagctctgccttcctcccgtgaaactgcactgctccaaatctgtgctgtttccagcagaggagaaaactcagctttcgccataatcctgtttcctgtgtatttcttcacttcctgtctggatggtattcctgtcggggtctgcatctgtatatatggaacaactaagcccagttgtacaatgtccccctccctgctatcctaaaaaaaagcccagatgccttaagacttgtacttggctttccagtttggtctctgtattaaatctaatgctttttccatcatttcttaaccttctcagggaaagaaggaatgagaaacattagccttaatgcatcgatggaggtttactaaccaaattagttaaaaatcagcagagagtcaggcctcttgccaaggtaatactcacagcagaagagccaggtgccggggcagacacactaactcattcttcaggaagcctggtcagacctaagttctttccacttgatctggaattttaagtacccataaagaaaggtcatcacttgtaaacattttcacatggtttcaggaaatccccagcccttttattaggcctttttaggtactgaaacctttagctgatgttctctgttatttgcttgctttctgctgtcattccagctctctcagtttttattttccccatagcctcactttgaatattgactcctaaataaaagtggtcaaactctcgatcactagagggtgatgtggcaaatgccatcccatcaacagattgacatgatcttttttccaaagggcatgtcaacttttttatcatgacaagattttgtccaaagctagactttgatgggagcaggcaagaagtaacatttcctgtgtccctactatgtgtcagacatcttctgtaagtccccacactatcctggcaagaaaagcatgattatcccagttctatagaagagaaagtagggtcaaagaggctaaggaactagcctgggatcacagatttttaaccgtagtctgtctccaggatcacccgcaggagtaactcagctcaggaagcagctgctgacgtgcccagcaactcctcaccccagctttctggcttggttactccattagtccccaccagcaccacttcctcccagctcttaaagattctattcccaagtccatttctttcacatctagaaacttaggcttctttccttccgttacttccagtgctggctgaagatgcaatcaaggccgccctggctgattacaaattgaaacaagaacccaaaaaaggagaggcagagaagaaatgagccctccctcggcgaagcctccagcaggccacaccagctgtttcccacctgctgtgcagtcaccttagatgttcagaagccgcttcctctccactgaagagctatgagatacgcacaatacttgctgttcacgttatgactctcatgcaagcaaaatacacagtttcattgttctgaatcctgtggtttctttcagcccacttttatcgccttaacctagttaatgtatattttgaattgtgtgtatgacctcagaactgaaattgataatgaagttgcaagttttgatagcccgtgaagtgcataagtatctaattttacctgaattgatttggggggaaattaccagtagaatgccttggtctgaatatttgatagaaccaattgttgtacataaaacagatctgcgcatatatatatatgtataaaaaataataaaataatggaagatgatggtgttctctaataa

SEQ ID NO: 297300 - DNA, 2599 bp, Homo sapiens
agcggagcttcggtgacgtcagagaggcgcgctcccagctcggagccgactcgcagacgcgccccgcccctcggcgtcgctctggactggcgcaggcgcaagccggcaagatggcggcggctggggctggccgtctgaggcgggtggcatcggctctgctgctgcggagcccccgcctgcccgcccgggagctgtcggccccggcccgactctatcacaagaaggtagggacaaaagaggggacgcgcggaatgccgactcagcggaggcctgggctggaggggcggccgcggggttctgcgcagctaggactgggagctgtgccctcccacgtctttgccctgactcgctttcccttgctgcgcagtgaggctcactgcaactgataaacaacagttaccgctcatcgggcggcgacttccagggggccccgccgctggccgcgacttcgtgcgtcccaattttaaattcgccaacagcccaggaggcagggtcctgttgggacttgtctttctgagtccagggacagacacacccccggagcgggctccggcttcagccactccgctgccctggccagatgaccttgggctagtcactgcgcctctctgaacctgtttccccaggtgtaaatggggggctctcagctgtcccttacaaaggatactgtgcgtggagtcctggcatggttcctggcacataggccccagcacgaggagaccgtttctgttactgctttaggagtgcataggggagtcaggcttgtaaccaacatgcgtaatgtttttgttttgtttggggggttttttggcggggaaggagggatagattcatagtctgcagccccttgctgtctggtggcacaaagtcccccagacgtgagactcccactcgagaaacaactaaagaatgccataaatcaacgtggcacaaaaggcccctacattagatactatcctgaggtcccttttacttggagtcaaaatccttagtcagatggggggaaaaggggactggaagatcggcgtgcttactactaaccagtaaccaaacctcaaggttattaaggccttctgtgtgccagttcgaatggatgtttattgtgatctggcttctgccctttctccaagggcttcttcactcctccccctcccgggggtgtgttttgttgagggtacaccctgaagaaacttggactagcagcctttcagcagccagggtgcgctgctgcaccagggtgatgacaggctgtgaaatacggtaatggcactgtttttattttaaaagacacataaacgtacacattccatagcattgttccctgtgtaacagtcaccttaaggcttctaagaaagctttccctccctgggccatggttatttttagaatttttaaatagtaatcatcctttgaggatggattttatttgaaaataacaaaactgctgtttgagcccaagtctggtgatgtaggtgggtgaaagtcaagtatttttgtaaaaatcctatggaactaagacatgatttcactgatttttttttcttctaggtatctcaaatctgtgaagtattgtagaggagacacaaaaggaattgggggtcacaaatggttctcattgacatgagtgtagacctttctactcaggtgaaatttggtatttagtgattgcctgccaggttcaagatgctgaccgaggagcttaccatcaaaccagagaccagtaccaatagagagtgaacatgatttatcttaaccctctcattttaggttgttgatcattatgaaaatcctagaaacgtggggtcccttgacaagacatctaaaaatgttggaactggactggtgggggctccagcatgtggtgacgtaatgaaattacagattcaagtggatgaaaaggggaagattgtggatgctaggtttaaaacatttggctgtggttccgcaattgcctccagctcattagccactgaatgggtgaaaggaaagacggtggaggaagccttgactatcaaaaacacagatatcgccaaggagctctgccttcctcccgtgaaactgcactgctccatgctggctgaagatgcaatcaaggccgccctggctgattacaaattgaaacaagaacccaaaaaccctcggcgaagcctccagcaggccacaccagctgtttcccacctgctgtgcagtcaccttagatgttcagaagccgcttcctctccactgaagagctatgagatacgcacaatacttgctgttcacgttatgactctcatgcaagcaaaatacacagtttcattgttctgaatcctgtggtttctttcagcccacttttatcgccttaacctagttaatgtatattttgaattgtgtgtatgacctcagaactgaaattgataatgaagttgcaagttttgatagcccgtgaagtgcataagtatctaattttacctgaattgatttggggggaaattaccagtagaatgccttggtctgaatatttgatagaaccaattgttgtacataaaacagatctgcgcatatatatatatgtataaaaaataataaaataatggaagatgatggtgttctctaataa

SEQ ID NO: 297301 - DNA, 1169 bp, Homo sapiens
agcggagcttcggtgacgtcagagaggcgcgctcccagctcggagccgactcgcagacgcgccccgcccctcggcgtcgctctggactggcgcaggcgcaagccggcaagatggcggcggctggggctggccgtctgaggcgggtggcatcggctctgctgctgcggagcccccgcctgcccgcccgggagctgtcggccccggcccgactctatcacaagaaggttgttgatcattatgaaaatcctagaaacgtggggtcccttgacaagacatctaaaaatgttggaactggactggtgggggctccagcatgtggtgacgtaatgaaattacagattcaagtggatgaaaaggggaagattgtggatgctaggtttaaaacatttggctgtggttccgcaattgcctccagctcattagccactgaatgggtgaaaggaaagacggtggaggaagccttgactatcaaaaacacagatatcgccaaggagctctgccttcctcccgtgaaactgcactgctccaaatctgtgctgtttccagcagaggagaaaactcagctttcgccataatcctgtttcctgtgtatttcttcacttcctgtctggatgtgctggctgaagatgcaatcaaggccgccctggctgattacaaattgaaacaagaacccaaaaaaggagaggcagagaagaaatgagccctccctcggcgaagcctccagcaggccacaccagctgtttcccacctgctgtgcagtcaccttagatgttcagaagccgcttcctctccactgaagagctatgagatacgcacaatacttgctgttcacgttatgactctcatgcaagcaaaatacacagtttcattgttctgaatcctgtggtttctttcagcccacttttatcgccttaacctagttaatgtatattttgaattgtgtgtatgacctcagaactgaaattgataatgaagttgcaagttttgatagcccgtgaagtgcataagtatctaattttacctgaattgatttggggggaaattaccagtagaatgccttggtctgaatatttgatagaaccaattgttgtacataaaacagatctgcgcatatatatatatgtataaaaaataataaaataatggaagatgatggtgttctctaataa

SEQ ID NO: 297302 - DNA, 2574 bp, Homo sapiens
agcggagcttcggtgacgtcagagaggcgcgctcccagctcggagccgactcgcagacgcgccccgcccctcggcgtcgctctggactggcgcaggcgcaagccggcaagatggcggcggctggggctggccgtctgaggcgggtggcatcggctctgctgctgcggagcccccgcctgcccgcccgggagctgtcggccccggcccgactctatcacaagaaggtagggacaaaagaggggacgcgcggaatgccgactcagcggaggcctgggctggaggggcggccgcggggttctgcgcagctaggactgggagctgtgccctcccacgtctttgccctgactcgctttcccttgctgcgcagtgaggctcactgcaactgataaacaacagttaccgctcatcgggcggcgacttccagggggccccgccgctggccgcgacttcgtgcgtcccaattttaaattcgccaacagcccaggaggcagggtcctgttgggacttgtctttctgagtccagggacagacacacccccggagcgggctccggcttcagccactccgctgccctggccagatgaccttgggctagtcactgcgcctctctgaacctgtttccccaggtgtaaatggggggctctcagctgtcccttacaaaggatactgtgcgtggagtcctggcatggttcctggcacataggccccagcacgaggagaccgtttctgttactgctttaggagtgcataggggagtcaggcttgtaaccaacatgcgtaatgtttttgttttgtttggggggttttttggcggggaaggagggatagattcatagtctgcagccccttgctgtctggtggcacaaagtcccccagacgtgagactcccactcgagaaacaactaaagaatgccataaatcaacgtggcacaaaaggcccctacattagatactatcctgaggtcccttttacttggagtcaaaatccttagtcagatggggggaaaaggggactggaagatcggcgtgcttactactaaccagtaaccaaacctcaaggttattaaggccttctgtgtgccagttcgaatggatgtttattgtgatctggcttctgccctttctccaagggcttcttcactcctccccctcccgggggtgtgttttgttgagggtacaccctgaagaaacttggactagcagcctttcagcagccagggtgcgctgctgcaccagggtgatgacaggctgtgaaatacggtaatggcactgtttttattttaaaagacacataaacgtacacattccatagcattgttccctgtgtaacagtcaccttaaggcttctaagaaagctttccctccctgggccatggttatttttagaatttttaaatagtaatcatcctttgaggatggattttatttgaaaataacaaaactgctgtttgagcccaagtctggtgatgtaggtgggtgaaagtcaagtatttttgtaaaaatcctatggaactaagacatgatttcactgatttttttttcttctaggtatctcaaatctgtgaagtattgtagaggagacacaaaaggaattgggggtcacaaatggttctcattgacatgagtgtagacctttctactcaggtgaaatttggtatttagtgattgcctgccaggttcaagatgctgaccgaggagcttaccatcaaaccagagaccagtaccaatagagagtgaacatgatttatcttaaccctctcattttaggttgttgatcattatgaaaatcctagaaacgtggggtcccttgacaagacatctaaaaatgttggaactggactggtgggggctccagcatgtggtgacgtaatgaaattacagattcaagtggatgaaaaggggaagattgtggatgctaggtttaaaacatttggctgtggttccgcaattgcctccagctcattagccactgaatgggtgaaaggaaagacggtggaggaagccttgactatcaaaaacacagatatcgccaaggagctctgccttcctcccgtgaaactgcactgctccatgctggctgaagatgcaatcaaggccgccctggctgattacaaattgaaacaagaacccaaaaaacaccagctgtttcccacctgctgtgcagtcaccttagatgttcagaagccgcttcctctccactgaagagctatgagatacgcacaatacttgctgttcacgttatgactctcatgcaagcaaaatacacagtttcattgttctgaatcctgtggtttctttcagcccacttttatcgccttaacctagttaatgtatattttgaattgtgtgtatgacctcagaactgaaattgataatgaagttgcaagttttgatagcccgtgaagtgcataagtatctaattttacctgaattgatttggggggaaattaccagtagaatgccttggtctgaatatttgatagaaccaattgttgtacataaaacagatctgcgcatatatatatatgtataaaaaataataaaataatggaagatgatggtgttctctaataa

SEQ ID NO: 297303 - DNA, 571 bp, Homo sapiens
tactcgagtacagttctgaggtcatacacactattcacagagtatacattaactaggttgaggcgataaaagtgggctgaaggagaggcagagaagaaatgagccctccctcggcgaagcctccagcaggccacaccagctgtttcccacctgctgtgcagtcaccttagatgttcagaagccgcttcctctccactgaagagctatgagatacgcacaatacttgctgttcacgttatgactctcatgcaagcaaaatacacagtttcattgttctgaatcctgtggtttctttcagcccacttttatcgccttaacctagttaatgtatattttgaattgtgtgtatgacctcagaactgaaattgataatgaagttgcaagttttgatagcccgtgaagtgcataagtatctaattttacctgaattgatttggggggaaattaccagtagaatgccttggtctgaatatttgatagaaccaattgttgtacataaaacagatctgcgcatatatatatatgtataaaaaataataaaataatggaagatgatggtgttctctaataa

SEQ ID NO: 297304 - DNA, 1031 bp, Homo sapiens
agcggagcttcggtgacgtcagagaggcgcgctcccagctcggagccgactcgcagacgcgccccgcccctcggcgtcgctctggactggcgcaggcgcaagccggcaagatggcggcggctggggctggccgtctgaggcgggtggcatcggctctgctgctgcggagcccccgcctgcccgcccgggagctgtcggccccggcccgactctatcacaagaaggttgttgatcattatgaaaatcctagaaacgtggggtcccttgacaagacatctaaaaatgttggaactggactggtgggggctccagcatgtggtgacgtaatgaaattacagattcaagtggatgaaaaggggaagattgtggatgctaggtttaaaacatttggctgtggttccgcaattgcctccagctcattagccactgaatgggtgaaaggaaagacggtggaggaagccttgactatcaaaaacacagatatcgccaaggagctctgccttcctcccgtgaaactgcactgctccatgctggctgaagatgcaatcaaggccgccctggctgattacaaattgaaacaagaacccaaaaaacaccagctgtttcccacctgctgtgcagtcaccttagatgttcagaagccgcttcctctccactgaagagctatgagatacgcacaatacttgctgttcacgttatgactctcatgcaagcaaaatacacagtttcattgttctgaatcctgtggtttctttcagcccacttttatcgccttaacctagttaatgtatattttgaattgtgtgtatgacctcagaactgaaattgataatgaagttgcaagttttgatagcccgtgaagtgcataagtatctaattttacctgaattgatttggggggaaattaccagtagaatgccttggtctgaatatttgatagaaccaattgttgtacataaaacagatctgcgcatatatatatatgtataaaaaataataaaataatggaagatgatggtgttctctaataa

SEQ ID NO: 297305 - DNA, 583 bp, Homo sapiens
acccccctaaaaatctcataaactttgagtggtattgagaaattgtagggtgaactgaaaaaggctcatgggattttagagccaagaaggcctgagtggcagttcctaccttagtaggaatagcttcagtggtgtgttgcaggtggaacccagattaaagtgggttaaaaagtaaatgaaggctaggaagataaatttttcaacaggtttgtctgtgaagagtccaggctattagatttttagtgttccccctctctcatgcaagcaaaatacacagtttcattgttctgaatcctgtggtttctttcagcccacttttatcgccttaacctagttaatgtatattttgaattgtgtgtatgacctcagaactgaaattgataatgaagttgcaagttttgatagcccgtgaagtgcataagtatctaattttacctgaattgatttggggggaaattaccagtagaatgccttggtctgaatatttgatagaaccaattgttgtacataaaacagatctgcgcatatatatatatgtataaaaaataataaaataatggaagatgatggtgttctctaataa

SEQ ID NO: 297306 - DNA, 828 bp, Homo sapiens
agcggagcttcggtgacgtcagagaggcgcgctcccagctcggagccgactcgcagacgcgccccgcccctcggcgtcgctctggactggcgcaggcgcaagccggcaagatggcggcggctggggctggccgtctgaggcgggtggcatcggctctgctgctgcggagcccccgcctgcccgcccgggagctgtcggccccggcccgactctatcacaagaaggttgttgatcattatgaaaatcctagaaacgtggggtcccttgacaagacatctaaaaatgttggaactggactggtgggggctccagcatgtggtgacgtaatgaaattacagattcaagtggatgaaaaggggaagattgtggatgctaggtttaaaacatttggctgtggttccgcaattgcctccagctcattagccactgaatgggtgaaaggaaagacggtggaggaagccttgactatcaaaaacacagatatcgccaaggagctctgccttcctcccgtgaaactgcactgctccagtaagtctctgctctccataccagtcagctgggacatttggcagtaatttcaacttggtttgcaacagtccttttagatcatggagcccacgtttgtaaccctcagaattagagctcatgagtctgtccttataacctgcagagggttagagcccccatggtctcacattcatccctaagagaatcatgccagaaggaggtatgcaccagccatcatactgagcacttcatgggcgtaatttctaaacctcacaaatatccttgagtgcacagtagatgtcattacttccctcttatgga

SEQ ID NO: 297307 - DNA, 1047 bp, Homo sapiens
agcggagcttcggtgacgtcagagaggcgcgctcccagctcggagccgactcgcagacgcgccccgcccctcggcgtcgctctggactggcgcaggcgcaagccggcaagatggcggcggctggggctggccgtctgaggcgggtggcatcggctctgctgctgcggagcccccgcctgcccgcccgggagctgtcggccccggcccgactctatcacaagaaggtatctcaaatctgtgaagtattgtagaggagacacaaaaggaattgggggtcacaaatggttctcattgacatgagtgtagacctttctactcaggtgaaatttggtatttagtgattgcctgccaggttcaagatgctgaccgaggagcttaccatcaaaccagagaccagtaccaatagagagtgaacatgatttatcttaaccctctcattttaggttgttgatcattatgaaaatcctagaaacgtggggtcccttgacaagacatctaaaaatgttggaactggactggtgggggctccagcatgtggtgacgtaatgaaattacagattcaagtggatgaaaaggggaagattgtggatgctaggtttaaaacatttggctgtggttccgcaattgcctccagctcattagccactgaatgggtgaaaggaaagacggtggaggaagccttgactatcaaaaacacagatatcgccaaggagctctgccttcctcccgtgaaactgcactgctccagtaagtctctgctctccataccagtcagctgggacatttggcagtaatttcaacttggtttgcaacagtccttttagatcatggagcccacgtttgtaaccctcagaattagagctcatgagtctgtccttataacctgcagagggttagagcccccatggtctcacattcatccctaagagaatcatgccagaaggaggtatgcaccagccatcatactgagcacttcatgggcgtaatttctaaacctcacaaatatccttgagtgcacagtagatgtcattacttccctcttatgga

SEQ ID NO: 297308 - DNA, 1083 bp, Homo sapiens
agcggagcttcggtgacgtcagagaggcgcgctcccagctcggagccgactcgcagacgcgccccgcccctcggcgtcgctctggactggcgcaggcgcaagccggcaagatggcggcggctggggctggccgtctgaggcgggtggcatcggctctgctgctgcggagcccccgcctgcccgcccgggagctgtcggccccggcccgactctatcacaagaaggttgttgatcattatgaaaatcctagaaacgtggggtcccttgacaagacatctaaaaatgttggaactggactggtgggggctccagcatgtggtgacgtaatgaaattacagattcaagtggatgaaaaggggaagattgtggatgctaggtttaaaacatttggctgtggttccgcaattgcctccagctcattagccactgaatgggtgaaaggaaagacggtggaggaagccttgactatcaaaaacacagatatcgccaaggagctctgccttcctcccgtgaaactgcactgctccatgctggctgaagatgcaatcaaggccgccctggctgattacaaattgaaacaagaacccaaaaaaggagaggcagagaagaaatgagccctccctcggcgaagcctccagcaggccacaccagctgtttcccacctgctgtgcagtcaccttagatgttcagaagccgcttcctctccactgaagagctatgagatacgcacaatacttgctgttcacgttatgactctcatgcaagcaaaatacacagtttcattgttctgaatcctgtggtttctttcagcccacttttatcgccttaacctagttaatgtatattttgaattgtgtgtatgacctcagaactgaaattgataatgaagttgcaagttttgatagcccgtgaagtgcataagtatctaattttacctgaattgatttggggggaaattaccagtagaatgccttggtctgaatatttgatagaaccaattgttgtacataaaacagatctgcgcatatatatatatgtataaaaaataataaaataatggaagatgatggtgttctctaataa

SEQ ID NO: 297309 - DNA, 1462 bp, Homo sapiens
ctattaaagtcatgatagggttggatagagaagtagagtatagaaacctcttgtttgtcacatgagtctctttaggacagttgtagtaggcagaattctaaaatggtccccaagacttacccccactgtacacaccctgttactgtaaatttgatgtatctactaccttgactaggttacgttttatggcacagttgacctaattatccaggtggacctgccctaatcagatgagccttttaaaagcaaagaattttcttggctggttgcagaagagaaagtcagagagttgaagcatataggccattgctggcttaaagatggacgcaggtatgtagtaaggaatgtgggcaacctctaggagctgagagcagttcctggatgacagccagcaaggaaactgggacctcagtcctgcaaggaaatgaattctgccaacaaccacttgatcttggaagaggacctcaagcctcagatgagaaacacagtccaggctgacaccttgattatagcttggtgagacctttgagcagagagcccagtcacattatggccttacttatgacctacagaaactgggagataataaactcttgctttaaattgctacatttgtggcaatagaaaactaatatctaattccatctctcaaggaatagatagcctaatttcacaggcatactttttttgtaattatgtgtttagcaatttatactataaaatactgaattgttttttatccttcagactaaacaccaagcatcattgtgatgtgtgaagagatgctagttaaaatgtatctgcccttgagagttctaagggtgatctaatttttctgcaaatctattttttaatttttaataatatgaatatgattttttttaaatgaaaaatttaaagaaataaccaccccacaatcatctaccagtgaatgggccagagaagagctgccagacaagattgactacataatcattaggcccagaacacagtgaaaatgcagcatcccttgttcaaaaaaattattaagaatttcaagacacggcagcagagcattaaaccaagagtggggtccttctgaacatggggtcctatgtgatggcacaggtcacaaaaccatggagccaaccagctctgtgcccagaccttctccagcaccttccagataaaagcttaactaagagctacatactttccaaaggcaccattgcttcttcactgggtgacatttgcaaaataattgcccataatgccaccatctaggacaatgagatcctttcagaattttctccaagcttgtatgtgtatatggatgtgtgtttgtgtatgtgtctctttgacacaggtggattgttcttaacaattgttgtactattgtgtcacttaaaattatagcaggagtatttctctgtattaataaatagtatttaagaataaaatttaaatatttaaaaaaaaaaaa

SEQ ID NO: 297310 - DNA, 5619 bp, Homo sapiens
gccttttccctccggctcgggagcgtctcgcttgcgccccgggcccgcggcgcccgcgcggctgcgagcctcgggtggccgcgtgccggctccaggaagccggagagggcgcggcggccaggatggcgcggcacgggccgtgcggctagacgggagccgagggaaccgccggctcgcgccctccgttctttcccggagccggcttcacgcagggccgggaacggccgtgcctctgggatccgccttcgctgacgccgggcacctacctggacgcgagcgagcgagatgcccaaccccaaaaacagcaaaggcggccgcaaaaacaagcgcgccaacagcagcggcgacgagcaggaaaatggagccggggccctggcagcggcgggcgcggcgggagcggcggccgggggggccctggcggcggcggccggttgcggggcggcggcggcgggcgcgccgggcgccggaggcgcggcgggcgccggaggcgcggggactggcgccgcgaacgctgcggccgccgcgggggctgcggccgcgggcgatgccaaaaacggtaagaagccccatgtgccactcccctgatctgcagcttcggtaggccggtggacctggagaaggacgactaccagaaggtggtgtgcaacaacgagcactgcccctgcagcacctggatgcacctgcagtgcttctacgagtgggagagcagcatcctcgtccagttcaactgcatcggccgcgcgcgcagctggaacgagaagcaatgccgccagaacatgtggacaaagaagggctacgacctggccttccgcttctgctcttgccgctgtggccagggccacttgaagaaggacacagactggtatcaggtgaagcggatgcaggacgagaaaaagaagaagtctggctccgagaagaacacagggaggcctcctggtgaggcggcggaggaggcaaaaaagtgcaggcccccaaacaagccccagaaaggcccaagccacgacctcccccgccggcattccatggaccggcagaactcccaggagaaggcagtgggtgccgcagcctacggtgcccgttcccccggtggctccccgggccagtccccacccacgggctactccatcctctctcctgcccacttcagcggcccccgctcctccagatacctcggggagttcttaaagaacgccatccatctggagcctcacaagaaggccatggctgggggccatgtgttcagaaatgcccactttgattacagccctgcggggttggcagttcacagggggggacacttcgacacccccgtgcagttccttcggcggctggacctctccgaactcctcactcacatccccaggcataagctgaacactttccacgtgcgcatggaagacgatgcccaagtgggccagggggaagacttgcggaagttcattctggccgcgctcagtgccagccacagaaacgtggtaaactgtgccctgtgccaccgggcgctcccggtgttcgaacagttcccactggtggatggaactttgttcctaagcccgtcgagacatgatgagatcgaatatgatgttccttgtcaccttcaagggagactcatgcatctgtatgccgtgtgcgtggactgcctggaaggggttcacaagatcatctgcatcaagtgtaagtcacggtgggatggcagctggcaccagctgggcactatgtacacctacgacatcctggctgcctctccatgttgtcaggcccgcctgaactgtaagcactgtgggaagccggtgatcgacgtgaggatcgggatgcagtacttctccgaatatagcaacgtccagcagtgtccacactgtgggaacctggactaccacttcgtgaagccattttcctccttcaaagttctcgaagcttattgatgaaagctttgctttagtaatagctattttattgatattattactttattacatatcttttatagggaaacattctgtgacattaatttcctttctaatttaaaggagagttactttgttgtatgtgtgccactaaaataggggctgcccttgccctgtcttgattcccgagtgttaatctgtggttttgaccagagcccagatgggtaatcctgtgcatttgggttggggttcactcttaccaagaatctttgatgcagctttaagatggtggggaggatggggtgaatttaggaaaggaatttgtggttataaactaagagcttgataggagttggaaggaaactcttactaaaatgttaactttctaaaaaccttcttttagatcttccttgggcctttggaaaaatatgtgacaagtgaatgtaagtctgtgcctggagagctaatagtgcattagtctatctcagcctagtgttctgcagcacacatgggcaggcagtttactcacactgacaggtgacctgaaagtggcacaagtgctgtttctatcactattgtaatttgccagttcatttttcatgctgaaagtaatatccaaattgtaagacatatgaaagatattagtgttgcaaatatgtttaggtaaactgacctataacagaatatgtgaaatgaatttggaaataatgcaagaaggcagaactcaatcatttaaattgtgtctttgaagttggtaatatagcttttaaggagaacccatgaataacctgatttgggcagtgatgatttattacaggttgcactgttgaagtgtcatttggtgtcaggttcttctcacaggtaaatctttcagccacagaatctaactggtgagcttcagaaccaataattgccacatttattgtcctcaaaattgcttatggccatgtttaaccaattaattctgagtttccaaaatcaaagatttgaccttaagagggaagggaaaaaagtgtgaaaggatgatgaagaaaataattttactatttcttttaaaagtatgttttggaaaatcaatgattttaatgcatagcagtatgtttgaaaaatagaccattctaaaaagcccatgataccttactgttgatgaaaaaggatgatcatatatatagaacttgattagtcagagcattgggcattccaaaatacagcctttggttcagtagattttaatgctttaaatagactgacgtcgcatacccttatagaattggaatatgatttctcaaaaattaatttgataatttcatgtatgatgtgcatatatgctaaaagaatgcagaaaatcattttatgaatagccaaatttggggttgatgtgaacattttatgttactcatttggtttatacttttttttttttttttttaactgtgtggtttttcttttcagaagtatttaggcaatattgcacgtgagtttcagttctttttttcttttttttgagatggagtctcactcttgtcacccaggctggagtgcagtagtgcgatctcagctcactgcaacctctgcctcctggattcaagcgattctcctgtcccagcctcccaggtagctgggactataggcacgtgccaccacacccggctaattttttgtatttttagtagagacagcgtttcaccatgttagctaggatggtctagatctcctgaccttgtgatctgcctgcctcggcctcccaaagtgctgggattacaggcgtgagtcactgcgcctggccaagtttcagttctatatgaagtatttgatgttttgtttgaaacaatacagcattaaagaaccaatgttattcactaatatcattcatctttcagtttggatgatttggtttgctgcatctaggtcggtgtttgatcatctgaaaaaacatttcagtgggaagaaatgcataaaatgcctataagaagtagaaagtcattgaactgacagtgtttgatgcaactaaaagaggattgtaagacatagctttctgcaaacttgtctttaatgcacaaagctgtagtggtgaattaactatctccttattgattctctcctgtacccagatgcaaaaagtgctaagtttctcttgtcctcgtaataccatttggattttatttctgaatttaaatagtaaaatatttatgatgctgatctttaacccacctaaaattttatagtgaaacctgctttatattgttgttctgaagcttacaattgacctatacattgcattcagcaagctcctgaatttagaactgccgtcagtgtagtgtatgctgtgttccatgttgcctttttagatggctttctaccccctgaacaataaataggatgaggttttactgtaattgggtaaagtttactcttggacattatttcgatgctaaagtaaggattctgtggatgttacttaaagagaaaagcataagagcatgaagcatatctgggaatatcttttgcctttaagacgattcattcttgtctagagggaaaatctggctgatttgggaataaaatataatcgaatattcaacaccatgaagataaatcttattttggaaatctactgaccttaataccccaagcttgccctgaatactttgattggaattggaatatatcaaaaaaggttagtatttttgttgtagttaggatactaaaaggatattagttacccaagagatccaatttgtttttctgatgaatagtgttcagtaaaatgaagcagtcttaagagtgactaataatttcaaagtgatttttcgtctattcttaatattttttaattatttatttttaagagttttataccttgagcagatacaatgatctgctttagtgagaggacaatttctgattgattgttttctcttcaggccatctcacctcttcattctcttgttacatttgaagcagttgatataatgggtttatactttaaaagatagacatggtgccatgaagttggggagttgggtgaattatcccattctagttacagaggagctttccttaaatgccctttaacttctaggttttgttcaagaagttcattttctgagtaaaagttattttcatatatgttgggggaaaattaactcatctaaaaagaatcttattaggtatttgaactctaaaactaacagataagacagatatgtaccttattagagcaccagaactaatttgctaagtcttttgtttagtcctgcaagactgatgcttaatacacagtctgttctcctgtgtctaggtcaggaactccagtttgcttttctgttttgtgtcctggtagcagctgttgagtaactttcattggaggttgggaaggaagtgaggagaaagtgttcttgtttagtgttttatttcctataataggatgctgcctaacccagttcatctctatgtcctgttcactgaatattccgggtaattgaaagaaaatataatggatgggctccattaaaaccagctcaaaaataaattcttgtcagtaaagatttcttgtcaagatgtcttggattgcacttttgttgaggaaagacagtgtaaatagttaaagaatgttgataaaattgaaacatttggttgtggaattgtgtgtggttttagagggtttctgtttgtgaaatgtatgtattaaaaataataaaattccagaaactaa

SEQ ID NO: 297311 - DNA, 5215 bp, Homo sapiens
gccttttccctccggctcgggagcgtctcgcttgcgccccgggcccgcggcgcccgcgcggctgcgagcctcgggtggccgcgtgccggctccaggaagccggagagggcgcggcggccaggatggcgcggcacgggccgtgcggctagacgggagccgagggaaccgccggctcgcgccctccgttctttcccggagccggcttcacgcagggccgggaacggccgtgcctctgggatccgccttcgctgacgccgggcacctacctggacgcgagcgagcgagatgcccaaccccaaaaacagcaaaggcggccgcaaaaacaagcgcgccaacagcagcggcgacgagcaggaaaatggagccggggccctggcagcggcgggcgcggcgggagcggccttccgcttctgctcttgccgctgtggccagggccacttgaagaaggacacagactggtatcaggtgaagcggatgcaggacgagaaaaagaagaagtctggctccgagaagaacacagggaggcctcctggtgaggcggcggaggaggcaaaaaagtgcaggcccccaaacaagccccagaaaggcccaagccacgacctcccccgccggcattccatggaccggcagaactcccaggagaaggcagtgggtgccgcagcctacggtgcccgttcccccggtggctccccgggccagtccccacccacgggctactccatcctctctcctgcccacttcagcggcccccgctcctccagatacctcggggagttcttaaagaacgccatccatctggagcctcacaagaaggccatggctgggggccatgtgttcagaaatgcccactttgattacagccctgcggggttggcagttcacagggggggacacttcgacacccccgtgcagttccttcggcggctggacctctccgaactcctcactcacatccccaggcataagctgaacactttccacgtgcgcatggaagacgatgcccaagtgggccagggggaagacttgcggaagttcattctggccgcgctcagtgccagccacagaaacgtggtaaactgtgccctgtgccaccgggcgctcccggtgttcgaacagttcccactggtggatggaactttgttcctaagcccgtcgagacatgatgagatcgaatatgatgttccttgtcaccttcaagggagactcatgcatctgtatgccgtgtgcgtggactgcctggaaggggttcacaagatcatctgcatcaagtgtaagtcacggtgggatggcagctggcaccagctgggcactatgtacacctacgacatcctggctgcctctccatgttgtcaggcccgcctgaactgtaagcactgtgggaagccggtgatcgacgtgaggatcgggatgcagtacttctccgaatatagcaacgtccagcagtgtccacactgtgggaacctggactaccacttcgtgaagccattttcctccttcaaagttctcgaagcttattgatgaaagctttgctttagtaatagctattttattgatattattactttattacatatcttttatagggaaacattctgtgacattaatttcctttctaatttaaaggagagttactttgttgtatgtgtgccactaaaataggggctgcccttgccctgtcttgattcccgagtgttaatctgtggttttgaccagagcccagatgggtaatcctgtgcatttgggttggggttcactcttaccaagaatctttgatgcagctttaagatggtggggaggatggggtgaatttaggaaaggaatttgtggttataaactaagagcttgataggagttggaaggaaactcttactaaaatgttaactttctaaaaaccttcttttagatcttccttgggcctttggaaaaatatgtgacaagtgaatgtaagtctgtgcctggagagctaatagtgcattagtctatctcagcctagtgttctgcagcacacatgggcaggcagtttactcacactgacaggtgacctgaaagtggcacaagtgctgtttctatcactattgtaatttgccagttcatttttcatgctgaaagtaatatccaaattgtaagacatatgaaagatattagtgttgcaaatatgtttaggtaaactgacctataacagaatatgtgaaatgaatttggaaataatgcaagaaggcagaactcaatcatttaaattgtgtctttgaagttggtaatatagcttttaaggagaacccatgaataacctgatttgggcagtgatgatttattacaggttgcactgttgaagtgtcatttggtgtcaggttcttctcacaggtaaatctttcagccacagaatctaactggtgagcttcagaaccaataattgccacatttattgtcctcaaaattgcttatggccatgtttaaccaattaattctgagtttccaaaatcaaagatttgaccttaagagggaagggaaaaaagtgtgaaaggatgatgaagaaaataattttactatttcttttaaaagtatgttttggaaaatcaatgattttaatgcatagcagtatgtttgaaaaatagaccattctaaaaagcccatgataccttactgttgatgaaaaaggatgatcatatatatagaacttgattagtcagagcattgggcattccaaaatacagcctttggttcagtagattttaatgctttaaatagactgacgtcgcatacccttatagaattggaatatgatttctcaaaaattaatttgataatttcatgtatgatgtgcatatatgctaaaagaatgcagaaaatcattttatgaatagccaaatttggggttgatgtgaacattttatgttactcatttggtttatacttttttttttttttttttaactgtgtggtttttcttttcagaagtatttaggcaatattgcacgtgagtttcagttctttttttcttttttttgagatggagtctcactcttgtcacccaggctggagtgcagtagtgcgatctcagctcactgcaacctctgcctcctggattcaagcgattctcctgtcccagcctcccaggtagctgggactataggcacgtgccaccacacccggctaattttttgtatttttagtagagacagcgtttcaccatgttagctaggatggtctagatctcctgaccttgtgatctgcctgcctcggcctcccaaagtgctgggattacaggcgtgagtcactgcgcctggccaagtttcagttctatatgaagtatttgatgttttgtttgaaacaatacagcattaaagaaccaatgttattcactaatatcattcatctttcagtttggatgatttggtttgctgcatctaggtcggtgtttgatcatctgaaaaaacatttcagtgggaagaaatgcataaaatgcctataagaagtagaaagtcattgaactgacagtgtttgatgcaactaaaagaggattgtaagacatagctttctgcaaacttgtctttaatgcacaaagctgtagtggtgaattaactatctccttattgattctctcctgtacccagatgcaaaaagtgctaagtttctcttgtcctcgtaataccatttggattttatttctgaatttaaatagtaaaatatttatgatgctgatctttaacccacctaaaattttatagtgaaacctgctttatattgttgttctgaagcttacaattgacctatacattgcattcagcaagctcctgaatttagaactgccgtcagtgtagtgtatgctgtgttccatgttgcctttttagatggctttctaccccctgaacaataaataggatgaggttttactgtaattgggtaaagtttactcttggacattatttcgatgctaaagtaaggattctgtggatgttacttaaagagaaaagcataagagcatgaagcatatctgggaatatcttttgcctttaagacgattcattcttgtctagagggaaaatctggctgatttgggaataaaatataatcgaatattcaacaccatgaagataaatcttattttggaaatctactgaccttaataccccaagcttgccctgaatactttgattggaattggaatatatcaaaaaaggttagtatttttgttgtagttaggatactaaaaggatattagttacccaagagatccaatttgtttttctgatgaatagtgttcagtaaaatgaagcagtcttaagagtgactaataatttcaaagtgatttttcgtctattcttaatattttttaattatttatttttaagagttttataccttgagcagatacaatgatctgctttagtgagaggacaatttctgattgattgttttctcttcaggccatctcacctcttcattctcttgttacatttgaagcagttgatataatgggtttatactttaaaagatagacatggtgccatgaagttggggagttgggtgaattatcccattctagttacagaggagctttccttaaatgccctttaacttctaggttttgttcaagaagttcattttctgagtaaaagttattttcatatatgttgggggaaaattaactcatctaaaaagaatcttattaggtatttgaactctaaaactaacagataagacagatatgtaccttattagagcaccagaactaatttgctaagtcttttgtttagtcctgcaagactgatgcttaatacacagtctgttctcctgtgtctaggtcaggaactccagtttgcttttctgttttgtgtcctggtagcagctgttgagtaactttcattggaggttgggaaggaagtgaggagaaagtgttcttgtttagtgttttatttcctataataggatgctgcctaacccagttcatctctatgtcctgttcactgaatattccgggtaattgaaagaaaatataatggatgggctccattaaaaccagctcaaaaataaattcttgtcagtaaagatttcttgtcaagatgtcttggattgcacttttgttgaggaaagacagtgtaaatagttaaagaatgttgataaaattgaaacatttggttgtggaattgtgtgtggttttagagggtttctgtttgtgaaatgtatgtattaaaaataataaaattccagaaactaa

SEQ ID NO: 297312 - DNA, 5920 bp, Homo sapiens
gccttttccctccggctcgggagcgtctcgcttgcgccccgggcccgcggcgcccgcgcggctgcgagcctcgggtggccgcgtgccggctccaggaagccggagagggcgcggcggccaggatggcgcggcacgggccgtgcggctagacgggagccgagggaaccgccggctcgcgccctccgttctttcccggagccggcttcacgcagggccgggaacggccgtgcctctgggatccgccttcgctgacgccgggcacctacctggacgcgagcgagcgagatgcccaaccccaaaaacagcaaaggcggccgcaaaaacaagcgcgccaacagcagcggcgacgagcaggaaaatggagccggggccctggcagcggcgggcgcggcgggagcggcggccgggggggccctggcggcggcggccggttgcggggcggcggcggcgggcgcgccgggcgccggaggcgcggcgggcgccggaggcgcggggactggcgccgcgaacgctgcggccgccgcgggggctgcggccgcgggcgatgccaaaaacggtaagaagccccatgtgccactcccctgatctgcagcttcggtaggccggtggacctggagaaggacgactaccagaaggtggtgtgcaacaacgagcactgcccctgcagcacctggatgcacctgcagtgcttctacgagtgggagagcagcatcctcgtccagttcaactgcatcggccgcgcgcgcagctggaacgagaagcaatgccgccagaacatgtggacaaagaagggctacgacctggccttccgcttctgctcttgccgctgtggccagggccacttgaagaaggacacagactggtatcaggtgaagcggatgcaggacgagaaaaagaagaagtctggctccgagaagaacacagggaggcctcctggtgaggcggcggaggaggcaaaaaagtgcaggcccccaaacaagccccagaaaggcccaagccacgacctcccccgccggcattccatggaccggcagaactcccaggagaaggcagtgggtgccgcagcctacggtgcccgttcccccggtggctccccgggccagtccccacccacgggctactccatcctctctcctgcccacttcagcggcccccgctcctccagatacctcggggagttcttaaagaacgccatccatctggagcctcacaagaaggccatggctgggggccatgtgttcagaaatgcccactttgattacagccctgcggggttggcagttcacagggggggacacttcgacacccccgtgcagttccttcggcggctggacctctccgaactcctcactcacatccccaggcataagctgaacactttccacgtgcgcatggaagacgatgcccaagtgggccagggggaagacttgcggaagttcattctggccgcgctcagtgccagccacagaaacgtggtaaactgtgccctgtgccaccgggcgctcccggtgttcgaacagttcccactggtggatggaactttgttcctaagcccgtcgagacatgatgagatcgaatatgatgttccttgtcaccttcaagggagactcatgcatctgtatgccgtgtgcgtggactgcctggaaggggttcacaagatcatctgcatcaagtgtaagtcacggtgggatggcagctggcaccagctgggcactatgtacacctacgacatcctggctgcctctccatgttgtcaggcccgcctgaactgtaagcactgtgggaagccggtgatcgacgtgaggatcgggatgcagtacttctccgaatatagcaacgtccagcagtgtccacactgtgggaacctggactaccacttcgtgaagccattttcctccttcaaagttctcgaagcttattgatgaaagctttgctttagtaatagctattttattgatattattactttattacatatcttttatagggaaacattctgtgacattaatttcctttctaatttaaaggagagttactttgttgtatgtgtgccactaaaataggggctgcccttgccctgtcttgattcccgagtgttaatctgtggttttgaccagagcccagatgggtaatcctgtgcatttgggttggggttcactcttaccaagaatctttgatgcagctttaagatggtggggaggatggggtgaatttaggaaaggaatttgtggttataaactaagagcttgataggagttggaaggaaactcttactaaaatgttaactttctaaaaaccttcttttagatcttccttgggcctttggaaaaatatgtgacaagtgaatgtaagtctgtgcctggagagctaatagtgcattagtctatctcagcctagtgttctgcagcacacatgggcaggcagtttactcacactgacaggtgacctgaaagtggcacaagtgctgtttctatcactattgtaatttgccagttcatttttcatgctgaaagtaatatccaaattgtaagacatatgaaagatattagtgttgcaaatatgtttaggtaaactgacctataacagaatatgtgaaatgaatttggaaataatgcaagaaggcagaactcaatcatttaaattgtgtctttgaagttggtaatatagcttttaaggagaacccatgaataacctgatttgggcagtgatgatttattacaggttgcactgttgaagtgtcatttggtgtcaggttcttctcacaggtaaatctttcagccacagaatctaactggtgagcttcagaaccaataattgccacatttattgtcctcaaaattgcttatggccatgtttaaccaattaattctgagtttccaaaatcaaagatttgaccttaagagggaagggaaaaaagtgtgaaaggatgatgaagaaaataattttactatttcttttaaaagtatgttttggaaaatcaatgattttaatgcatagcagtatgtttgaaaaatagaccattctaaaaagcccatgataccttactgttgatgaaaaaggatgatcatatatatagaacttgattagtcagagcattgggcattccaaaatacagcctttggttcagtagattttaatgctttaaatagactgacgtcgcatacccttatagaattggaatatgatttctcaaaaattaatttgataatttcatgtatgatgtgcatatatgctaaaagaatgcagaaaatcattttatgaatagccaaatttggggttgatgtgaacattttatgttactcatttggtttatacttttttttttttttttttaactgtgtggtttttcttttcagaagtatttaggcaatattgcacgtgagtttcagttctttttttcttttttttgagatggagtctcactcttgtcacccaggctggagtgcagtagtgcgatctcagctcactgcaacctctgcctcctggattcaagcgattctcctgtcccagcctcccaggtagctgggactataggcacgtgccaccacacccggctaattttttgtatttttagtagagacagcgtttcaccatgttagctaggatggtctagatctcctgaccttgtgatctgcctgcctcggcctcccaaagtgctgggattacaggcgtgagtcactgcgcctggccaagtttcagttctatatgaagtatttgatgttttgtttgaaacaatacagcattaaagaaccaatgttattcactaatatcattcatctttcagtttggatgatttggtttgctgcatctaggtcggtgtttgatcatctgaaaaaacatttcagtgggaagaaatgcataaaatgcctataagaagtagaaagtcattgaactgacagtgtttgatgcaactaaaagaggattgtaagacatagctttctgcaaacttgtctttaatgcacaaagctgtagtggtgaattaactatctccttattgattctctcctgtacccagatgcaaaaagtgctaagtttctcttgtcctcgtaataccatttggattttatttctgaatttaaatagtaaaatatttatgatgctgatctttaacccacctaaaattttatagtgaaacctgctttatattgttgttctgaagcttacaattgacctatacattgcattcagcaagctcctgaatttagaactgccgtcagtgtagtgtatgctgtgttccatgttgcctttttagatggctttctaccccctgaacaataaataggatgaggttttactgtaattgggtaaagtttactcttggacattatttcgatgctaaagtaaggattctgtggatgttacttaaagagaaaagcataagagcatgaagcatatctgggaatatcttttgcctttaagacgattcattcttgtctagagggaaaatctggctgatttgggaataaaatataatcgaatattcaacaccatgaagataaatcttattttggaaatctactgaccttaataccccaagcttgccctgaatactttgattggaattggaatatatcaaaaaaggttagtatttttgttgtagttaggatactaaaaggatattagttacccaagagatccaatttgtttttctgatgaatagtgttcagtaaaatgaagcagtcttaagagtgactaataatttcaaagtgatttttcgtctattcttaatattttttaattatttatttttaagagttttataccttgagcagatacaatgatctgctttagtgagaggacaatttctgattgattgttttctcttcaggccatctcacctcttcattctcttgttacatttgaagcagttgatataatgggtttatactttaaaagatagacatggtgccatgaagttggggagttgggtgaattatcccattctagttacagaggagctttccttaaatgccctttaacttctaggttttgttcaagaagttcattttctgagtaaaagttattttcatatatgttgggggaaaattaactcatctaaaaagaatcttattaggtatttgaactctaaaactaacagataagacagatatgtaccttattagagcaccagaactaatttgctaagtcttttgtttagtcctgcaagactgatgcttaatacacagtctgttctcctgtgtctaggtcaggaactccagtttgcttttctgttttgtgtcctggtagcagctgttgagtaactttcattggaggttgggaaggaagtgaggagaaagtgttcttgtttagtgttttatttcctataataggatgctgcctaacccagttcatctctatgtcctgttcactgaatattccgggtaattgaaagaaaatataatggatgggctccattaaaaccagctcaaaaataaattcttgtcagtaaagatttcttgtcaagatgtcttggattgcacttttgttgaggaaagacagtgtaaatagttaaagaatgttgataaaattgaaacatttggttgtggaattgtgtgtggttttagagggtttctgtttgtgaaatgtatgtattaaaaataataaaattccagaaactaaaaaaaaaaaaaaaaaaaaaaaaaaaaaaaaaaaaaaaaaaaaacaaaaaaaaaaaacaaaaaaaaaaaaaaaaaaaaaaaaaaaaaaacaaaacaacaaccagaagcgacaaccagcacggggggggacgctcagaagaaaaagaagtaaaagagaggagggacggggagacggagtggactaaggtgaagacagacgaatatacgaagtagacgggggtggacacaggcggccgccatctcaagtgcagagcctatagcgtcgaccagagaacaccgacaagaagagaattagcataggg

SEQ ID NO: 297313 - DNA, 841 bp, Homo sapiens
  misc_feature (23)..(23): n is a, c, g, or t
cctagagtacccatgcaataacntcctctgattgattgttttctcttcaggccatctcacctcttcattctcttgttacatttgaagcagttgatataatgggtttatactttaaaagatagacatggtgccatgaagttggggagttgggtgaattatcccattctagttacagaggagctttccttaaatgccctttaacttctaggttttgttcaagaagttcattttctgagtaaaagttattttcatatatgttgggggaaaattaactcatctaaaaagaatcttattaggtatttgaactctaaaactaacagataagacagatatgtaccttattagagcaccagaactaatttgctaagtcttttgtttagtcctgcaagactgatgcttaatacacagtctgttctcctgtgtctaggtcaggaactccagtttgcttttctgttttgtgtcctggtagcagctgttgagtaactttcattggaggttgggaaggaagtgaggagaaagtgttcttgtttagtgttttatttcctataataggatgctgcctaacccagttcatctctatgtcctgttcactgaatattccgggtaattgaaagaaaatataatggatgggctccattaaaaccagctcaaaaataaattcttgtcagtaaagatttcttgtcaagatgtcttggattgcacttttgttgaggaaagacagtgtaaatagttaaagaatgttgataaaattgaaacatttggttgtggaattgtgtgtggttttagagggtttctgtttgtgaaatgtatgtattaaaaataataaaattccagaaactaa

SEQ ID NO: 297314 - DNA, 1151 bp, Homo sapiens
gccttttccctccggctcgggagcgtctcgcttgcgccccgggcccgcggcgcccgcgcggctgcgagcctcgggtggccgcgtgccggctccaggaagccggagagggcgcggcggccaggatggcgcggcacgggccgtgcggctagacgggagccgagggaaccgccggctcgcgccctccgttctttcccggagccggcttcacgcagggccgggaacggccgtgcctctgggatccgccttcgctgacgccgggcacctacctggacgcgagcgagcgagatgcccaaccccaaaaacagcaaaggcggccgcaaaaacaagcgcgccaacagcagcggcgacgagcaggaaaatggagccggggccctggcagcggcgggcgcggcgggagcggcggccgggggggccctggcggcggcggccggttgcggggcggcggcggcgggcgcgccgggcgccggaggcgcggcgggcgccggaggcgcggggactggcgccgcgaacgctgcggccgccgcgggggctgcggccgcgggcgatgccaaaaacggtaagacggggctggcggggcgagcgccaacttcctccccgacggggacggcgcggtggcggggccctgggtggcgcgggcggtgcgtggacaatgcgagagtcaggaagtgctcaccccgcccctccgccccgccgcggctgccccttcgcggtccccacgcctggcggcggggacagatctgcggcccctgcccggtgtccgcgcggggggcagcccgcgccccacactctgaggggctcccggctgcggcagcgctgccctcgggcccagcctgctgcccgcgctggcactgccccgccgtgtgtgccgggccgaagggaggaaggaagggaggaaagagccgcccaagttgagaagaatgatccgattgaaaacttaggcaccggttaattcttcccggtgctccaaggccacccgtaacccccggaatgaaggagagagagcctcaattcttagcacacccaggcttgctgcgtcgatcgccacaggtgaagaggcctcgagacatttagggcctctgtgtttgctctttaattttttggcttgcttgaggaaggaagagaatctgaacttgacttccgttctcagcccg

SEQ ID NO: 297315 - DNA, 842 bp, Homo sapiens
gccttttccctccggctcgggagcgtctcgcttgcgccccgggcccgcggcgcccgcgcggctgcgagcctcgggtggccgcgtgccggctccaggaagccggagagggcgcggcggccaggatggcgcggcacgggccgtgcggctagacgggagccgagggaaccgccggctcgcgccctccgttctttcccggagccggcttcacgcagggccgggaacggccgtgcctctgggatccgccttcgctgacgccgggcacctacctggacgcgagcgagcgagatgcccaaccccaaaaacagcaaaggcggccgcaaaaacaagcgcgccaacagcagcggcgacgagcaggaaaatggagccggggccctggcagcggcgggcgcggcgggagcggcggccgggggggccctggcggcggcggccggttgcggggcggcggcggcgggcgcgccgggcgccggaggcgcggcgggcgccggaggcgcggggactggcgccgcgaacgctgcggccgccgcgggggctgcggccgcgggcgatgccaaaaacggtaagccgaagggaggaaggaagggaggaaagagccgcccaagttgagaagaatgatccgattgaaaacttaggcaccggttaattcttcccggtgctccaaggccacccgtaacccccggaatgaaggagagagagcctcaattcttagcacacccaggcttgctgcgtcgatcgccacaggtgaagaggcctcgagacatttagggcctctgtgtttgctctttaattttttggcttgcttgaggaaggaagagaatctgaacttgacttccgttctcagcccg

SEQ ID NO: 297316 - DNA, 1130 bp, Homo sapiens
cagctcctaggctcaagtgatcctcctgccctagcctcctgagtagctgggaccacaggatctcagggacaggccccgtgtcctgctgaccctctcaacaaggcacccgcttaccttgggtttattgcagtgcgcgaccactcgcaagattcttctcttcagatcttccaagttggtcacactgagcctgtttagcaaaggggcacactgaggctgggacctggcactcccaaccccccagccctgggcacagcaccaggtgggcttacctgggaatcacatccttccccaggacgagtgacacgatgaagctctgagaatattcctgcagagctttgctgaaattccaaacagagagaggatgttagctttacgatgacactgcccacaagggcttccatgaaagaaatcagtaacactgaggggttaggttcccaggcctcagctctgttctctcttctctaaagggagggtaggggaaacgtcagttatggcaactcactggccagatcctactaaagccacaatatgtgttcaacagagacgccccgcagctaaaaccgcaaactggacaccaaggcggaccaagcacatggatctgtcctttgacccagaaaccgcgcttggaagactccatcaaagatgcactggaggccgggtgcagtggctcacgcctgtaatcccagcactttgggaggccgaggcaggcggatcacaaggtcaggagattgaaaccatcctggctaacacggtaaaagcccgtctctactaaaaatacaaaaaattagccaggcgtggtggtgggcgcctgtagtcccagctactcaggaggctgaggtaggagaatggcatgaacccgggaggcggagctggcagtgaactgagatcgcgccactgcactccagcctgggcgacagagcgagactccatctcaaaagaaaaaaaaaaaaaaaagatgccccagcaaaaatgaaggggcagaggcaacaggcgattcactgcggcagaacctgcaccggcagaggctggagcctccaaacacccatccacagaactgccttcagctcccaacaacgagtcacataatagtgcgtcccgcacagctgggagaaggaggaggactgtgtgtg

SEQ ID NO: 297317 - DNA, 4253 bp, Homo sapiens
tggccaggagcgtgatcggtttccggtcagtggtgtggtaccgggtacccggagacgtgtatcggacggtgggccgcagccatggccgagagaaaacctaacggtggcagcggcggcgcctccacttcctcatcgggcactaacttacttttctcctcctcggccacggagttcagcttcaatgtgcccttcatcccagtcacccaggcctccgcttctccggcctccctgctcttaccgggagaggattccacagatgttggtgaggaggacagcttccttggtcagacttctattcacacatctgccccacagacatttagttacttctctcaggtatcaagcagcagtgatccttttgggaatattggacagtcaccattaacaactgcagcaacctcagttggacaatcaggattccccaagcccctgactgctctcccttttacaactggatcccaagatgtctcgaatgcattttcaccatccatttcgaaggctcaacctggtgctccaccttcctcactgatgggaataaattcttatctgccttctcagccaagtagtctccctccttcatattttgggaaccaaccccaaggaattccccaaccaggatacaatccatatcgccatacccctggcagcagcagggctaatccttacattgcaccaccccagctgcagcagtgccaaacaccaggccctcctgctcatcctccaccttctggaccccctgttcagatgtaccagatgcctccaggatctttgccaccggttccttcttcagtgcagtcaccggcacagcagcaggtacctgccagacctggggctccctctgttcaagtgccatctccttttctacttcaaaaccaatatgagcctgttcagccccactggttttactgcaaggaggtagaatacaaacaactgtggatgccttttagtgtgttcgactctttgaatcttgaagaaatctataattcagttcagccagatccggagagcgtggttcttggcacggatggagggcgctacgatgtttacctctatgaccgaataaggaaggctgcctactgggaagaggagccagccgaagtgagacgctgtacttggttttacaagggggacacagatagtcgatttattccctatactgaggagttcagtgaaaaactagaggctgaatataaaaaagctgtaaccactaatcagtggcaccgaagattagagtttccaagtggagagacaattgttatgcacaatccaaaggttattgttcagttccagccctcctcagtgccagatgaatggggcaccacgcaagatggacagacaaggcccagggttgtaaagcgtggaattgatgataaccttgatgaaattcccgacggggagatgcctcaagttgaccatttggtgtttgtggtgcatggcattggacctgtgtgtgacttacgctttaggagcattattgagtgtgtggatgattttagggtggtttctctcaaattgctgcggacacatttcaagaaatctttagatgacgggaaagtaagcagagtggagttccttccagttcattggcatagttctttgggtggggacgccacaggtgtggacaggaatattaagaaaatcactttgccaagtattggtcgatttcgtcactttaccaatgaaactttgctagatattttattttataacagccccacctactgtcagacaattgtggaaaaagtaggaatggagataaaccatctgcatgcactctttatgagtcggaacccagacttcaaaggaggtgtctctgttgctggtcacagtttaggttctttaatattgtttgacatcctgtctaatcaaaaagatttgaatttatcaaagtgccctggacctcttgctgttgctaatggagttgtgaagcagctacattttcaggaaaagcagatgcctgaagagccaaagctgactttggatgagtcgtatgaccttgttgttgaaaatgaagaagtcctaactttgcaagaaactctggaagcacttagcctctctgaatattttagcacttttgaaaaggaaaagattgatatggagtccctgcttatgtgtacagttgatgacctgaaggaaatggggataccccttggacccagaaagaagatagctaactttgtagaacataaagcagccaaactgaaaaaagcagcgtcagaaaagaaggcagtggcggccacttctacaaaaggacaagagcaaagtgcccagaagactaaagacatggcttccctcccctcagaatccaatgagccaaagaggaaacttccagttggtgcttgcgtgtcttctgtgtgtgtgaattatgaatcttttgaagttggcgccggacaggtttctgttgcttacaactcattagattttgaaccagagatattctttgccttggggtctccaattgctatgtttctcactattcgaggagttgataggatagatgagaattacagccttcctacctgtaaagggttcttcaatatttatcatccgcttgatccagtggcatatagattagaacctatgattgttccagatttggacctaaaagctgttctcattccacatcacaaaggcagaaaaagacttcatttagaattgaaagagagtctctctcgtatgggatctgatttgaagcagggttttattagctctctcaaaagtgcttggcagacattaaatgagtttgcccgtgctcatacgtcttcaacccagttgcaagaagaattggagaaggtggccaatcagatcaaagaagaagaagaaaagcaagtagttgaagcagaaaaggttgttgaaagtccagatttttccaaggatgaggactacttaggaaaggttggaatgttaaatggaggccgccgaattgactacgttctccaagaaaaaccaatagagagttttaatgaataccttttcgctcttcagagtcacttatgctattgggaatctgaagatactgctctgttactacttaaagaaatttatcgaacaatgaacattagtccagaacagccccagcattgatcaaacttcagttttactgtactttcttgtctgcacagaaagtcccagtacaacttccattgctgagaaaatcctcagaggactttcccacttcgctcctgtgatggatgacagaagagtgattcattaacaattgctcagccacaattctcggatatagggattcaaaagacaggatacagaactaacacagtgaaaaaaatcagtaccacatttggacagtataggtgagaaaacataattataaaaatgatgccatgaaaaattccacagatcagtttagttgtatagttgtcaaagttatatgtgatatcaatgaagaaatatttgtagcatgtaaacggttatttctgtttcttaaaaagtattgttagtgggctattaaacttggatttttctttttattaatgcagtatgttctttttattcaagtatgaacttgttgagaaactatagtaatatgatttttaagagatttatgttctacttaaaatgtgaattgtacttctgagctgccttaatgcaaggtcatttatatttgttaagaggaaataatcaagatcactcatatcccaactgaatctgaggttttataaatccctcaaacgattgctgagagcctgattgtggaaagaagtgagatgcaccttattttcaagaagtcctgggaagcgctctcctagcacgtccatttccaggaggagaagcaagcagatgagaggttttccattttgtcatccaaggtagctgtgcacttgccttgttgctgaagttccaataatgtgaaaaccaaagtagaggtttttttcttcttctttttgttttctattaatttcacttataccaaagtgtttgaaagtatgaaatgtgttgcttctgagttatataaggctacttcatgacaagactgctttgtaatatttcactttgttttactacaaattcagatcactttgttttactataaattcagattatccaaatattttcctaatactatgtgggaatgctgattttcttttgttacgtagtggaaacattttgcattgtttacatagttctcatggaacatggaaatttttgaaagtgatatatgatacacattttttgtgtatgtattctaattagtgtgaataaagcagtaacattaatgcattttttaagcagca

SEQ ID NO: 297318 - DNA, 330 bp, Homo sapiens
tggccaggagcgtgatcggtttccggtcagtggtgtggtaccgggtacccggagacgtgtatcggacggtgggccgcagccatggccgagagaaaacctaacggtggcagcggcggcgcctccacttcctcatcgggcactaacttacttttctcctcctcggccacggagttcagcttcaatgtgcccttcatcccagtcacccaggcctccgcttctccggcctccctgctcttaccgggagtttttcatttctaagaagcaagttttcaaagaaaaaaagaaaaaactttttttctgtaatgcagaaatagcaagtttgaagaacaa

SEQ ID NO: 297319 - DNA, 4674 bp, Homo sapiens
tggccaggagcgtgatcggtttccggtcagtggtgtggtaccgggtacccggagacgtgtatcggacggtgggccgcagccatggccgagagaaaacctaacggtggcagcggcggcgcctccacttcctcatcgggcactaacttacttttctcctcctcggccacggagttcagcttcaatgtgcccttcatcccagtcacccaggcctccgcttctccggcctccctgctcttaccgggagaggattccacagatgttggtgaggaggacagcttccttggtcagacttctattcacacatctgccccacagacatttagttacttctctcaggtatcaagcagcagtgatccttttgggaatattggacagtcaccattaacaactgcagcaacctcagttggacaatcaggattccccaagcccctgactgctctcccttttacaactggatcccaagatgtctcgaatgcattttcaccatccatttcgaaggctcaacctggtgctccaccttcctcactgatgggaataaattcttatctgccttctcagccaagtagtctccctccttcatattttgggaaccaaccccaaggaattccccaaccaggatacaatccatatcgccatacccctggcagcagcagggctaatccttacattgcaccaccccagctgcagcagtgccaaacaccaggccctcctgctcatcctccaccttctggaccccctgttcagatgtaccagatgcctccaggatctttgccaccggttccttcttcagtgcagtcaccggcacagcagcaggtacctgccagacctggggctccctctgttcaagtgccatctccttttctacttcaaaaccaatatgagcctgttcagccccactggttttactgcaaggaggtagaatacaaacaactgtggatgccttttagtgtgttcgactctttgaatcttgaagaaatctataattcagttcagccagatccggagagcgtggttcttggcacggatggagggcgctacgatgtttacctctatgaccgaataaggaaggctgcctactgggaagaggagccagccgaagtgagacgctgtacttggttttacaagggggacacagatagtcgatttattccctatactgaggagttcagtgaaaaactagaggctgaatataaaaaagctgtaaccactaatcagtggcaccgaagattagagtttccaagtggagagacaattgttatgcacaatccaaaggttattgttcagttccagccctcctcagtgccagatgaatggggcaccacgcaagatggacagacaaggcccagggttgtaaagcgtggaattgatgataaccttgatgaaattcccgacggggagatgcctcaagttgaccatttggtgtttgtggtgcatggcattggacctgtgtgtgacttacgctttaggagcattattgagtgtgtggatgattttagggtggtttctctcaaattgctgcggacacatttcaagaaatctttagatgacgggaaagtaagcagagtggagttccttccagttcattggcatagttctttgggtggggacgccacaggtgtggacaggaatattaagaaaatcactttgccaagtattggtcgatttcgtcactttaccaatgaaactttgctagatattttattttataacagccccacctactgtcagacaattgtggaaaaagtaggaatggagataaaccatctgcatgcactctttatgagtcggaacccagacttcaaaggaggtgtctctgttgctggtcacagtttaggttctttaatattgtttgacatcctgtctaatcaaaaagatttgaatttatcaaagtgccctggacctcttgctgttgctaatggagttgtgaagcagctacattttcaggaaaagcagatgcctgaagagccaaagctgactttggatgagtcgtatgaccttgttgttgaaaatgaagaagtcctaactttgcaagaaactctggaagcacttagcctctctgaatattttagcacttttgaaaaggaaaagattgatatggagtccctgcttatgtgtacagttgatgacctgaaggaaatggggataccccttggacccagaaagaagatagctaactttgtagaacataaagcagccaaactgaaaaaagcagcgtcagaaaagaaggcagtggcggccacttctacaaaaggacaagagcaaagtgcccagaagactaaagacatggcttccctcccctcagaatccaatgagccaaagaggaaacttccagttggtgcttgcgtgtcttctgtgtgtgtgaattatgaatcttttgaagttggcgccggacaggtttctgttgcttacaactcattagattttgaaccagagatattctttgccttggggtctccaattgctatgtttctcactattcgaggagttgataggatagatgagaattacagccttcctacctgtaaagggttcttcaatatttatcatccgcttgatccagtggcatatagattagaacctatgattgttccagatttggacctaaaagctgttctcattccacatcacaaaggcagaaaaagacttcatttagaattgaaagagagtctctctcgtatgggatctgatttgaagcagggttttattagctctctcaaaagtgcttggcagacattaaatgagtttgcccgtgctcatacgtcttcaacccagttgcaagaagaattggagaaggtggccaatcagatcaaagaagaagaagaaaagcaagtagttgaagcagaaaaggttgttgaaagtccagatttttccaaggatgaggactacttaggaaaggttggaatgttaaatggaggccgccgaattgactacgttctccaagaaaaaccaatagagagttttaatgaataccttttcgctcttcagagtcacttatgctattgggaatctgaagatactgctctgttactacttaaagaaatttatcgaacaatgaacattagtccagaacagccccagcattgatcaaacttcagttttactgtactttcttgtctgcacagaaagtcccagtacaacttccattgctgagaaaatcctcagaggactttcccacttcgctcctgtgatggatgacagaagagtgattcattaacaattgctcagccacaattctcggatatagggattcaaaagacaggatacagaactaacacagtgaaaaaaatcagtaccacatttggacagtataggtgagaaaacataattataaaaatgatgccatgaaaaattccacagatcagtttagttgtatagttgtcaaagttatatgtgatatcaatgaagaaatatttgtagcatgtaaacggttatttctgtttcttaaaaagtattgttagtgggctattaaacttggatttttctttttattaatgcagtatgttctttttattcaagtatgaacttgttgagaaactatagtaatatgatttttaagagatttatgttctacttaaaatgtgaattgtacttctgagctgccttaatgcaaggtcatttatatttgttaagaggaaataatcaagatcactcatatcccaactgaatctgaggttttataaatccctcaaacgattgctgagagcctgattgtggaaagaagtgagatgcaccttattttcaagaagtcctgggaagcgctctcctagcacgtccatttccaggaggagaagcaagcagatgagaggttttccattttgtcatccaaggtagctgtgcacttgccttgttgctgaagttccaataatgtgaaaaccaaagtagaggtttttttcttcttctttttgttttctattaatttcacttataccaaagtgtttgaaagtatgaaatgtgttgcttctgagttatataaggctacttcatgacaagactgctttgtaatatttcactttgttttactacaaattcagatcactttgttttactataaattcagattatccaaatattttcctaatactatgtgggaatgctgattttcttttgttacgtagtggaaacattttgcattgtttacatagttctcatggaacatggaaatttttgaaagtgatatatgatacacattttttgtgtatgtattctaattagtgtgaataaagcagtaacattaatgcattttttaagcagcaaacttatgtatttctcttgtcttccttaaaagtgtccccatgaactcagtgtttattcccttttcattttgagtacctgcttatatggtcagtatgtaacgttagcattggctcctaatggtagaattagaacagcaagattgtagagctgtaattgactccagacaacatagatttcagccacctcattctacagctgaggccaggacaataaatgcctttcccagactgggtagtggcagatctgggatggaatatggttttcttgattccctttcagccttcatttctctctctcaggactactactttttaattacttttcacttaatttcccaatactgatgaaataaagaaaaatgagggttatttatatacatttcaataaaatccaatttgatttttcaacttaaaaaaaaat

SEQ ID NO: 297320 - DNA, 4158 bp, Homo sapiens
tggccaggagcgtgatcggtttccggtcagtggtgtggtaccgggtacccggagacgtgtatcggacggtgggccgcagccatggccgagagaaaacctaacggtggcagcggcggcgcctccacttcctcatcgggcactaacttacttttctcctcctcggccacggagttcagcttcaatgtgcccttcatcccagtcacccaggcctccgcttctccggcctccctgctcttaccgggagaggattccacagatgttggtgaggaggacagcttccttggtcagacttctattcacacatctgccccacagacatttagttacttctctcaggtatcaagcagcagtgatccttttgggaatattggacagtcaccattaacaactgcagcaacctcagttggacaatcaggattccccaagcccctgactgctctcccttttacaactggatcccaagatgtctcgaatgcattttcaccatccatttcgaaggctcaacctggtgctccaccttcctcactgatgggaataaattcttatctgccttctcagccaagtagtctccctccttcatattttgggaaccaaccccaaggaattccccaaccaggatacaatccatatcgccatacccctggcagcagcagggctaatccttacattgcaccaccccagctgcagcagtgccaaacaccaggccctcctgctcatcctccaccttctggaccccctgttcagatgtaccagatgcctccaggatctttgccaccggttccttcttcagtgcagtcaccggcacagcagcaggtacctgccagacctggggctccctctgttcaagtgccatctccttttctacttcaaaaccaatatgagcctgttcagccccactggttttactgcaaggaggtagaatacaaacaactgtggatgccttttagtgtgttcgactctttgaatcttgaagaaatctataattcagttcagccagatccggagagcgtggttcttggcacggatggagggcgctacgatgtttacctctatgaccgaataaggaaggctgcctactgggaagaggagccagccgaagtgagacgctgtacttggttttacaagggggacacagatagtcgatttattccctatactgaggagttcagtgaaaaactagaggctgaatataaaaaagctgtaaccactaatcagtggcaccgaagattagagtttccaagtggagagacaattgttatgcacaatccaaaggttattgttcagttccagccctcctcagtgccagatgaatggggcaccacgcaagatggacagacaaggcccagggttgtaaagcgtggaattgatgataaccttgatgaaattcccgacggggagatgcctcaagttgaccatttggtgtttgtggtgcatggcattggacctgtgtgtgacttacgctttaggagcattattgagtgtgtggatgattttagggtggtttctctcaaattgctgcggacacatttcaagaaatctttagatgacgggaaagtaagcagagtggagttccttccagttcattggcatagttctttgggtggggacgccacaggtgtggacaggaatattaagaaaatcactttgccaagtattggtcgatttcgtcactttaccaatgaaactttgctagatattttattttataacagccccacctactgtcagacaattgtggaaaaagtaggaatggagataaaccatctgcatgcactctttatgagtcggaacccagacttcaaaggaggtgtctctgttgctggtcacagtttaggttctttaatattgtttgacatcctgtctaatcaaaaagatttgaatttatcaaagtgccctggacctcttgctgttgctaatggagttgtgaagcagctacattttcaggaaaagcagatgcctgaagagccaaagctgactttggatgagtcgtatgaccttgttgttgaaaatgaagaagtcctaactttgcaagaaactctggaagcacttagcctctctgaatattttagcacttttgaaaaggaaaagattgatatggagtccctgcttatgtgtacagttgatgacctgaaggaaatggggataccccttggacccagaaagaagatagctaactttgtagaacataaagcagccaaactgaaaaaagcagcgtcagaaaagaaggcagtggcggccacttctacaaaaggacaagagcaaagtgcccagaagactaaagacatggcttccctcccctcagaatccaatgagccaaagaggaaacttccagttggtgcttgcgtgtcttctgtgtgtgtgaattatgaatcttttgaagttggcgccggacaggtttctgttgcttacaactcattagattttgaaccagagatattctttgccttggggtctccaattgctatgtttctcactattcgaggagttgataggatagatgagaattacagccttcctacctgtaaagggttcttcaatatttatcatccgcttgatccagtggcatatagattagaacctatgattgttccagatttggacctaaaagctgttctcattccacatcacaaaggcagaaaaagacttcatttagaattgaaagagagtctctctcgtatgggatctgatttgaagcagggttttattagctctctcaaaagtgcttggcagacattaaatgagtttgcccgtgctcatacgtcttcaacccagttgcaagaagaattggagaaggtggccaatcagatcaaagaagaagaagaaaagcaagtagttgaagcagaaaaggttgttgaaagtccagatttttccaaggatgaggactacttaggaaaggttggaatgttaaatggaggccgccgaattgactacgttctccaagaaaaaccaatagagagttttaatgaataccttttcgctcttcagagtcacttatgctattgggaatctgaagatactgctctgttactacttaaagaaatttatcgaacaatgaacattagtccagaacagccccagcattgatcaaacttcagttttactgtactttcttgtctgcacagaaagtcccagtacaacttccattgctgagaaaatcctcagaggactttcccacttcgctcctgtgatggatgacagaagagtgattcattaacaattgctcagccacaattctcggatatagggattcaaaagacaggatacagaactaacacagtgaaaaaaatcagtaccacatttggacagtataggtgagaaaacataattataaaaatgatgccatgaaaaattccacagatcagtttagttgtatagttgtcaaagttatatgtgatatcaatgaagaaatatttgtagcatgtaaacggttatttctgtttcttaaaaagtattgttagtgggctattaaacttggatttttctttttattaatgcagtatgttctttttattcaagtatgaacttgttgagaaactatagtaatatgatttttaagagatttatgttctacttaaaatgtgaattgtacttctgagctgccttaatgcaaggtcatttatatttgttaagaggaaataatcaagatcactcatatcccaactgaatctgaggttttataaatccctcaaacgattgctgagagcctgattgtggaaagaagtgagatgcaccttattttcaagaagtcctgggaagcgctctcctagcacgtccatttccaggaggagaagcaagcagatgagaggttttccattttgtcatccaagcctgtcttctgagtaatgggcagagaaggaccagggttcgtagaagaagcatgtggcagctgagtggcagcagtcttgccctttcattttaatacttgagtacacagaaaatagaatttttgagtgactctgcctgtggatatatatactcatacatacatatatatatatacacacacacatatgtatgtatgtatgtattactattcagtctcttaaaaaccaaaaaacagtagatcccctgagggtagagtctttatgtatgaacatattgttcactgttgtaaccaccttgcaggatttcagtctataaactaggtgagaatccagc

SEQ ID NO: 297321 - DNA, 3617 bp, Homo sapiens
tggccaggagcgtgatcggtttccggtcagtggtgtggtaccgggtacccggagacgtgtatcggacggtgggccgcagccatggccgagagaaaacctaacggtggcagcggcggcgcctccacttcctcatcgggcactaacttacttttctcctcctcggccacggagttcagcttcaatgtgcccttcatcccagtcacccaggcctccgcttctccggcctccctgctcttaccgggagaggattccacagatgttggtgaggaggacagcttccttggtcagacttctattcacacatctgccccacagacatttagttacttctctcaggtatcaagcagcagtgatccttttgggaatattggacagtcaccattaacaactgcagcaacctcagttggacaatcaggattccccaagcccctgactgctctcccttttacaactggatcccaagatgtctcgaatgcattttcaccatccatttcgaaggctcaacctggtgctccaccttcctcactgatgggaataaattcttatctgccttctcagccaagtagtctccctccttcatattttgggaaccaaccccaaggaattccccaaccaggatacaatccatatcgccatacccctggcagcagcagggctaatccttacattgcaccaccccagctgcagcagtgccaaacaccaggccctcctgctcatcctccaccttctggaccccctgttcagatgtaccagatgcgggagatgcctcaagttgaccatttggtgtttgtggtgcatggcattggacctgtgtgtgacttacgctttaggagcattattgagtgtgtggatgattttagggtggtttctctcaaattgctgcggacacatttcaagaaatctttagatgacgggaaagtaagcagagtggagttccttccagttcattggcatagttctttgggtggggacgccacaggtgtggacaggaatattaagaaaatcactttgccaagtattggtcgatttcgtcactttaccaatgaaactttgctagatattttattttataacagccccacctactgtcagacaattgtggaaaaagtaggaatggagataaaccatctgcatgcactctttatgagtcggaacccagacttcaaaggaggtgtctctgttgctggtcacagtttaggttctttaatattgtttgacatcctgtctaatcaaaaagatttgaatttatcaaagtgccctggacctcttgctgttgctaatggagttgtgaagcagctacattttcaggaaaagcagatgcctgaagagccaaagctgactttggatgagtcgtatgaccttgttgttgaaaatgaagaagtcctaactttgcaagaaactctggaagcacttagcctctctgaatattttagcacttttgaaaaggaaaagattgatatggagtccctgcttatgtgtacagttgatgacctgaaggaaatggggataccccttggacccagaaagaagatagctaactttgtagaacataaagcagccaaactgaaaaaagcagcgtcagaaaagaaggcagtggcggccacttctacaaaaggacaagagcaaagtgcccagaagactaaagacatggcttccctcccctcagaatccaatgagccaaagaggaaacttccagttggtgcttgcgtgtcttctgtgtgtgtgaattatgaatcttttgaagttggcgccggacaggtttctgttgcttacaactcattagattttgaaccagagatattctttgccttggggtctccaattgctatgtttctcactattcgaggagttgataggatagatgagaattacagccttcctacctgtaaagggttcttcaatatttatcatccgcttgatccagtggcatatagattagaacctatgattgttccagatttggacctaaaagctgttctcattccacatcacaaaggcagaaaaagacttcatttagaattgaaagagagtctctctcgtatgggatctgatttgaagcagggttttattagctctctcaaaagtgcttggcagacattaaatgagtttgcccgtgctcatacgtcttcaacccagttgcaagaagaattggagaaggtggccaatcagatcaaagaagaagaagaaaagcaagtagttgaagcagaaaaggttgttgaaagtccagatttttccaaggatgaggactacttaggaaaggttggaatgttaaatggaggccgccgaattgactacgttctccaagaaaaaccaatagagagttttaatgaataccttttcgctcttcagagtcacttatgctattgggaatctgaagatactgctctgttactacttaaagaaatttatcgaacaatgaacattagtccagaacagccccagcattgatcaaacttcagttttactgtactttcttgtctgcacagaaagtcccagtacaacttccattgctgagaaaatcctcagaggactttcccacttcgctcctgtgatggatgacagaagagtgattcattaacaattgctcagccacaattctcggatatagggattcaaaagacaggatacagaactaacacagtgaaaaaaatcagtaccacatttggacagtataggtgagaaaacataattataaaaatgatgccatgaaaaattccacagatcagtttagttgtatagttgtcaaagttatatgtgatatcaatgaagaaatatttgtagcatgtaaacggttatttctgtttcttaaaaagtattgttagtgggctattaaacttggatttttctttttattaatgcagtatgttctttttattcaagtatgaacttgttgagaaactatagtaatatgatttttaagagatttatgttctacttaaaatgtgaattgtacttctgagctgccttaatgcaaggtcatttatatttgttaagaggaaataatcaagatcactcatatcccaactgaatctgaggttttataaatccctcaaacgattgctgagagcctgattgtggaaagaagtgagatgcaccttattttcaagaagtcctgggaagcgctctcctagcacgtccatttccaggaggagaagcaagcagatgagaggttttccattttgtcatccaaggtagctgtgcacttgccttgttgctgaagttccaataatgtgaaaaccaaagtagaggtttttttcttcttctttttgttttctattaatttcacttataccaaagtgtttgaaagtatgaaatgtgttgcttctgagttatataaggctacttcatgacaagactgctttgtaatatttcactttgttttactacaaattcagatcactttgttttactataaattcagattatccaaatattttcctaatactatgtgggaatgctgattttcttttgttacgtagtggaaacattttgcattgtttacatagttctcatggaacatggaaatttttgaaagtgatatatgatacacattttttgtgtatgtattctaattagtgtgaataaagcagtaacattaatgcattttttaagcagca

SEQ ID NO: 297322 - DNA, 4163 bp, Homo sapiens
tggccaggagcgtgatcggtttccggtcagtggtgtggtaccgggtacccggagacgtgtatcggacggtgggccgcagccatggccgagagaaaacctaacggtggcagcggcggcgcctccacttcctcatcgggcactaacttacttttctcctcctcggccacggagttcagcttcaatgtgcccttcatcccagtcacccaggcctccgcttctccggcctccctgctcttaccgggagaggattccacagatgttggtgaggaggacagcttccttggtcagacttctattcacacatctgccccacagacatttagttacttctctcaggtatcaagcagcagtgatccttttgggaatattggacagtcaccattaacaactgcagcaacctcagttggacaatcaggattccccaagcccctgactgctctcccttttacaactggatcccaagatgtctcgaatgcattttcaccatccatttcgaaggctcaacctggtgctccaccttcctcactgatgggaataaattcttatctgccttctcagccaagtagtctccctccttcatattttgggaaccaaccccaaggaattccccaaccaggatacaatccatatcgccatacccctggcagcagcagggctaatccttacattgcaccaccccagctgcagcagtgccaaacaccaggccctcctgctcatcctccaccttctggaccccctgttcagatgtaccagatgcctccaggatctttgccaccggttccttcttcagtgcagtcaccggcacagcagcaggtacctgccagacctggggctccctctgttcaagtgccatctccttttctacttcaaaaccaatatgagcctgttcagccccactggttttactgcaaggaggtagaatacaaacaactgtggatgccttttagtgtgttcgactctttgaatcttgaagaaatctataattcagttcagccagatccggagagcgtggttcttggcacggatggagggcgctacgatgtttacctctatgaccgaataaggaaggctgcctactgggaagaggagccagccgaagtgagacgctgtacttggttttacaagggggacacagatagtcgatttattccctatactgaggagttcagtgaaaaactagaggttattgttcagttccagccctcctcagtgccagatgaatggggcaccacgcaagatggacagacaaggcccagggttgtaaagcgtggaattgatgataaccttgatgaaattcccgacggggagatgcctcaagttgaccatttggtgtttgtggtgcatggcattggacctgtgtgtgacttacgctttaggagcattattgagtgtgtggatgattttagggtggtttctctcaaattgctgcggacacatttcaagaaatctttagatgacgggaaagtaagcagagtggagttccttccagttcattggcatagttctttgggtggggacgccacaggtgtggacaggaatattaagaaaatcactttgccaagtattggtcgatttcgtcactttaccaatgaaactttgctagatattttattttataacagccccacctactgtcagacaattgtggaaaaagtaggaatggagataaaccatctgcatgcactctttatgagtcggaacccagacttcaaaggaggtgtctctgttgctggtcacagtttaggttctttaatattgtttgacatcctgtctaatcaaaaagatttgaatttatcaaagtgccctggacctcttgctgttgctaatggagttgtgaagcagctacattttcaggaaaagcagatgcctgaagagccaaagctgactttggatgagtcgtatgaccttgttgttgaaaatgaagaagtcctaactttgcaagaaactctggaagcacttagcctctctgaatattttagcacttttgaaaaggaaaagattgatatggagtccctgcttatgtgtacagttgatgacctgaaggaaatggggataccccttggacccagaaagaagatagctaactttgtagaacataaagcagccaaactgaaaaaagcagcgtcagaaaagaaggcagtggcggccacttctacaaaaggacaagagcaaagtgcccagaagactaaagacatggcttccctcccctcagaatccaatgagccaaagaggaaacttccagttggtgcttgcgtgtcttctgtgtgtgtgaattatgaatcttttgaagttggcgccggacaggtttctgttgcttacaactcattagattttgaaccagagatattctttgccttggggtctccaattgctatgtttctcactattcgaggagttgataggatagatgagaattacagccttcctacctgtaaagggttcttcaatatttatcatccgcttgatccagtggcatatagattagaacctatgattgttccagatttggacctaaaagctgttctcattccacatcacaaaggcagaaaaagacttcatttagaattgaaagagagtctctctcgtatgggatctgatttgaagcagggttttattagctctctcaaaagtgcttggcagacattaaatgagtttgcccgtgctcatacgtcttcaacccagttgcaagaagaattggagaaggtggccaatcagatcaaagaagaagaagaaaagcaagtagttgaagcagaaaaggttgttgaaagtccagatttttccaaggatgaggactacttaggaaaggttggaatgttaaatggaggccgccgaattgactacgttctccaagaaaaaccaatagagagttttaatgaataccttttcgctcttcagagtcacttatgctattgggaatctgaagatactgctctgttactacttaaagaaatttatcgaacaatgaacattagtccagaacagccccagcattgatcaaacttcagttttactgtactttcttgtctgcacagaaagtcccagtacaacttccattgctgagaaaatcctcagaggactttcccacttcgctcctgtgatggatgacagaagagtgattcattaacaattgctcagccacaattctcggatatagggattcaaaagacaggatacagaactaacacagtgaaaaaaatcagtaccacatttggacagtataggtgagaaaacataattataaaaatgatgccatgaaaaattccacagatcagtttagttgtatagttgtcaaagttatatgtgatatcaatgaagaaatatttgtagcatgtaaacggttatttctgtttcttaaaaagtattgttagtgggctattaaacttggatttttctttttattaatgcagtatgttctttttattcaagtatgaacttgttgagaaactatagtaatatgatttttaagagatttatgttctacttaaaatgtgaattgtacttctgagctgccttaatgcaaggtcatttatatttgttaagaggaaataatcaagatcactcatatcccaactgaatctgaggttttataaatccctcaaacgattgctgagagcctgattgtggaaagaagtgagatgcaccttattttcaagaagtcctgggaagcgctctcctagcacgtccatttccaggaggagaagcaagcagatgagaggttttccattttgtcatccaaggtagctgtgcacttgccttgttgctgaagttccaataatgtgaaaaccaaagtagaggtttttttcttcttctttttgttttctattaatttcacttataccaaagtgtttgaaagtatgaaatgtgttgcttctgagttatataaggctacttcatgacaagactgctttgtaatatttcactttgttttactacaaattcagatcactttgttttactataaattcagattatccaaatattttcctaatactatgtgggaatgctgattttcttttgttacgtagtggaaacattttgcattgtttacatagttctcatggaacatggaaatttttgaaagtgatatatgatacacattttttgtgtatgtattctaattagtgtgaataaagcagtaacattaatgcattttttaagcagca

SEQ ID NO: 297323 - DNA, 4199 bp, Homo sapiens
tggccaggagcgtgatcggtttccggtcagtggtgtggtaccgggtacccggagacgtgtatcggacggtgggccgcagccatggccgagagaaaacctaacggtggcagcggcggcgcctccacttcctcatcgggcactaacttacttttctcctcctcggccacggagttcagcttcaatgtgcccttcatcccagtcacccaggcctccgcttctccggcctccctgctcttaccgggagaggattccacagatgttggtgaggaggacagcttccttggtcagacttctattcacacatctgccccacagacatttagttacttctctcaggtatcaagcagcagtgatccttttgggaatattggacagtcaccattaacaactgcagcaacctcagttggacaatcaggattccccaagcccctgactgctctcccttttacaactggatcccaagatgtctcgaatgcattttcaccatccatttcgaaggctcaacctggtgctccaccttcctcactgatgggaataaattcttatctgccttctcagccaagtagtctccctccttcatattttgggaaccaaccccaaggaattccccaaccaggatacaatccatatcgccatacccctggcagcagcagggctaatccttacattgcaccaccccagctgcagcagtgccaaacaccaggccctcctgctcatcctccaccttctggaccccctgttcagatgtaccagatgcctccaggatctttgccaccggttccttcttcagtgcagtcaccggcacagcagcaggtacctgccagacctggggctccctctgttcaagtgccatctccttttctacttcaaaaccaatatgagcctgttcagccccactggttttactgcaaggaggtagaatacaaacaactgtggatgccttttagtgtgttcgactctttgaatcttgaagaaatctataattcagttcagccagatccggagagcgtggttcttggcacggatggagggcgctacgatgtttacctctatgaccgaataaggaaggctgcctactgggaagaggagccagccgaagtgagacgctgtacttggttttacaagggggacacagatagtcgatttattccctatactgaggagttcagtgaaaaactagaggctgaatataaaaaagctgtaaccactaatcagtggcaccgaagattagagtttccaagtggagagacaattgttatgcacaatccaaaggttattgttcagttccagccctcctcagtgccagatgaatggggcaccacgcaagatggacagacaaggcccagggttgtaaagcgtggaattgatgataaccttgatgaaattcccgacggggagatgcctcaagttgaccatttggtgtttgtggtgcatggcattggacctgtgtgtgacttacgctttaggagcattattgagtgtgtggatgattttagggtggtttctctcaaattgctgcggacacatttcaagaaatctttagatgacgggaaagtaagcagagtggagttccttccagttcattggcatagttctttgggtggggacgccacaggtgtggacaggaatattaagaaaatcactttgccaagtattggtcgatttcgtcactttaccaatgaaactttgctagatattttattttataacagccccacctactgtcagacaattgtggaaaaagtaggaatggagataaaccatctgcatgcactctttatgagtcggaacccagacttcaaaggaggtgtctctgttgctggtcacagtttaggttctttaatattgtttgacatcctgtctaatcaaaaagatttgaatttatcaaagtgccctggacctcttgctgttgctaatggagttgtgaagcagctacattttcaggaaaagcagatgcctgaagagccaaagctgactttggatgagtcgtatgaccttgttgttgaaaatgaagaagtcctaactttgcaagaaactctggaagcacttagcctctctgaatattttagcacttttgaaaaggaaaagattgatatggagtccctgcttatgtgtacagttgatgacctgaaggaaatggggataccccttggacccagaaagaagatagctaactttgtagaacataaagcagccaaactgaaaaaagcagcgtcagaaaagaaggcagtggcggccacttctacaaaatccaatgagccaaagaggaaacttccagttggtgcttgcgtgtcttctgtgtgtgtgaattatgaatcttttgaagttggcgccggacaggtttctgttgcttacaactcattagattttgaaccagagatattctttgccttggggtctccaattgctatgtttctcactattcgaggagttgataggatagatgagaattacagccttcctacctgtaaagggttcttcaatatttatcatccgcttgatccagtggcatatagattagaacctatgattgttccagatttggacctaaaagctgttctcattccacatcacaaaggcagaaaaagacttcatttagaattgaaagagagtctctctcgtatgggatctgatttgaagcagggttttattagctctctcaaaagtgcttggcagacattaaatgagtttgcccgtgctcatacgtcttcaacccagttgcaagaagaattggagaaggtggccaatcagatcaaagaagaagaagaaaagcaagtagttgaagcagaaaaggttgttgaaagtccagatttttccaaggatgaggactacttaggaaaggttggaatgttaaatggaggccgccgaattgactacgttctccaagaaaaaccaatagagagttttaatgaataccttttcgctcttcagagtcacttatgctattgggaatctgaagatactgctctgttactacttaaagaaatttatcgaacaatgaacattagtccagaacagccccagcattgatcaaacttcagttttactgtactttcttgtctgcacagaaagtcccagtacaacttccattgctgagaaaatcctcagaggactttcccacttcgctcctgtgatggatgacagaagagtgattcattaacaattgctcagccacaattctcggatatagggattcaaaagacaggatacagaactaacacagtgaaaaaaatcagtaccacatttggacagtataggtgagaaaacataattataaaaatgatgccatgaaaaattccacagatcagtttagttgtatagttgtcaaagttatatgtgatatcaatgaagaaatatttgtagcatgtaaacggttatttctgtttcttaaaaagtattgttagtgggctattaaacttggatttttctttttattaatgcagtatgttctttttattcaagtatgaacttgttgagaaactatagtaatatgatttttaagagatttatgttctacttaaaatgtgaattgtacttctgagctgccttaatgcaaggtcatttatatttgttaagaggaaataatcaagatcactcatatcccaactgaatctgaggttttataaatccctcaaacgattgctgagagcctgattgtggaaagaagtgagatgcaccttattttcaagaagtcctgggaagcgctctcctagcacgtccatttccaggaggagaagcaagcagatgagaggttttccattttgtcatccaaggtagctgtgcacttgccttgttgctgaagttccaataatgtgaaaaccaaagtagaggtttttttcttcttctttttgttttctattaatttcacttataccaaagtgtttgaaagtatgaaatgtgttgcttctgagttatataaggctacttcatgacaagactgctttgtaatatttcactttgttttactacaaattcagatcactttgttttactataaattcagattatccaaatattttcctaatactatgtgggaatgctgattttcttttgttacgtagtggaaacattttgcattgtttacatagttctcatggaacatggaaatttttgaaagtgatatatgatacacattttttgtgtatgtattctaattagtgtgaataaagcagtaacattaatgcattttttaagcagca

SEQ ID NO: 297324 - DNA, 3093 bp, Homo sapiens
gaacagagagagcctgctgcctccacctcttgttctagttcgcttttatatgccaagagggacaaattgttcctctaatttgataggggtaatgaggcttattctctttgaagggtcatgaatttctttggcaagtttgtgatgacgaaagggatatctagaatattgccattaggaaaatccaaacaaattcccatcttttatgtaggtttaaaaattttttttgatagggggggagatgcctcaagttgaccatttggtgtttgtggtgcatggcattggacctgtgtgtgacttacgctttaggagcattattgagtgtgtggatgattttagggtggtttctctcaaattgctgcggacacatttcaagaaatctttagatgacgggaaagtaagcagagtggagttccttccagttcattggcatagttctttgggtggggacgccacaggtgtggacaggaatattaagaaaatcactttgccaagtattggtcgatttcgtcactttaccaatgaaactttgctagatattttattttataacagccccacctactgtcagacaattgtggaaaaagtaggaatggagataaaccatctgcatgcactctttatgagtcggaacccagacttcaaaggaggtgtctctgttgctggtcacagtttaggttctttaatattgtttgacatcctgtctaatcaaaaagatttgaatttatcaaagtgccctggacctcttgctgttgctaatggagttgtgaagcagctacattttcaggaaaagcagatgcctgaagagccaaagctgactttggatgagtcgtatgaccttgttgttgaaaatgaagaagtcctaactttgcaagaaactctggaagcacttagcctctctgaatattttagcacttttgaaaaggaaaagattgatatggagtccctgcttatgtgtacagttgatgacctgaaggaaatggggataccccttggacccagaaagaagatagctaactttgtagaacataaagcagccaaactgaaaaaagcagcgtcagaaaagaaggcagtggcggccacttctacaaaaggacaagagcaaagtgcccagaagactaaagacatggcttccctcccctcagaatccaatgagccaaagaggaaacttccagttggtgcttgcgtgtcttctgtgtgtgtgaattatgaatcttttgaagttggcgccggacaggtttctgttgcttacaactcattagattttgaaccagagatattctttgccttggggtctccaattgctatgtttctcactattcgaggagttgataggatagatgagaattacagccttcctacctgtaaagggttcttcaatatttatcatccgcttgatccagtggcatatagattagaacctatgattgttccagatttggacctaaaagctgttctcattccacatcacaaaggcagaaaaagacttcatttagaattgaaagagagtctctctcgtatgggatctgatttgaagcagggttttattagctctctcaaaagtgcttggcagacattaaatgagtttgcccgtgctcatacgtcttcaacccagttgcaagaagaattggagaaggtggccaatcagatcaaagaagaagaagaaaagcaagtagttgaagcagaaaaggttgttgaaagtccagatttttccaaggatgaggactacttaggaaaggttggaatgttaaatggaggccgccgaattgactacgttctccaagaaaaaccaatagagagttttaatgaataccttttcgctcttcagagtcacttatgctattgggaatctgaagatactgctctgttactacttaaagaaatttatcgaacaatgaacattagtccagaacagccccagcattgatcaaacttcagttttactgtactttcttgtctgcacagaaagtcccagtacaacttccattgctgagaaaatcctcagaggactttcccacttcgctcctgtgatggatgacagaagagtgattcattaacaattgctcagccacaattctcggatatagggattcaaaagacaggatacagaactaacacagtgaaaaaaatcagtaccacatttggacagtataggtgagaaaacataattataaaaatgatgccatgaaaaattccacagatcagtttagttgtatagttgtcaaagttatatgtgatatcaatgaagaaatatttgtagcatgtaaacggttatttctgtttcttaaaaagtattgttagtgggctattaaacttggatttttctttttattaatgcagtatgttctttttattcaagtatgaacttgttgagaaactatagtaatatgatttttaagagatttatgttctacttaaaatgtgaattgtacttctgagctgccttaatgcaaggtcatttatatttgttaagaggaaataatcaagatcactcatatcccaactgaatctgaggttttataaatccctcaaacgattgctgagagcctgattgtggaaagaagtgagatgcaccttattttcaagaagtcctgggaagcgctctcctagcacgtccatttccaggaggagaagcaagcagatgagaggttttccattttgtcatccaaggtagctgtgcacttgccttgttgctgaagttccaataatgtgaaaaccaaagtagaggtttttttcttcttctttttgttttctattaatttcacttataccaaagtgtttgaaagtatgaaatgtgttgcttctgagttatataaggctacttcatgacaagactgctttgtaatatttcactttgttttactacaaattcagatcactttgttttactataaattcagattatccaaatattttcctaatactatgtgggaatgctgattttcttttgttacgtagtggaaacattttgcattgtttacatagttctcatggaacatggaaatttttgaaagtgatatatgatacacattttttgtgtatgtattctaattagtgtgaataaagcagtaacattaatgcattttttaagcagca

SEQ ID NO: 297325 - DNA, 3491 bp, Homo sapiens
tggccaggagcgtgatcggtttccggtcagtggtgtggtaccgggtacccggagacgtgtatcggacggtgggccgcagccatggccgagagaaaacctaacggtggcagcggcggcgcctccacttcctcatcgggcactaacttacttttctcctcctcggccacggagttcagcttcaatgtgcccttcatcccagtcacccaggcctccgcttctccggcctccctgctcttaccgggagaggattccacagatgttggtgaggaggacagcttccttggtcagacttctattcacacatctgccccacagacatttagttacttctctcaggtatcaagcagcagtgatccttttgggaatattggacagtcaccattaacaactgcagcaacctcagttggacaatcaggattccccaagcccctgactgctctcccttttacaactggatcccaagatgtctcgaatgcattttcaccatccatttcgaaggctcaacctggtgctccaccttcctcactgatgggaataaattcttatctgccttctcagccaagtagtctccctccttcatattttgggaaccaaccccaaggaattccccaaccaggatacaatccatatcgccatacccctggcagcagcagggctaatccttacattgcaccaccccagctgcagcagtgccaaacaccaggccctcctgctcatcctccaccttctggaccccctgttcagatgtaccagatgcctccaggatctttgccaccggttccttcttcagtgcagtcaccggcacagcagcaggtacctgccagacctggggctccctctgttcaagtgccatctccttttctacttcaaaaccaatatgagcctgttcagccccactggttttactgcaaggaggtagaatacaaacaactgtggatgccttttagtgtgttcgactctttgaatcttgaagaaatctataattcagttcagccagatccggagagcgtggttcttggcacggatggagggcgctacgatgtttacctctatgaccgaataaggaaggctgcctactgggaagaggagccagccgaagtgagacgctgtacttggttttacaagggggacacagatagtcgatttattccctatactgaggagttcagtgaaaaactagaggctgaatataaaaaagctgtaaccactaatcagtggcaccgaagattagagtttccaagtggagagacaattgttatgcacaatccaaaggttattgttcagttccagccctcctcagtgccagatgaatggggcaccacgcaagatggacagacaaggcccagggttgtaaagcgtggaattgatgataaccttgatgaaattcccgacggggagatgcctcaagttgaccatttggtgtttgtggtgcatggcattggacctgtgtgtgacttacgctttaggagcattattgagtgtgtggatgattttagggtggtttctctcaaattgctgcggacacatttcaagaaatctttagatgacgggaaagtaagcagagtggagttccttccagttcattggcatagttctttgggtggggacgccacaggtgtggacaggaatattaagaaaatcactttgccaagtattggtcgatttcgtcactttaccaatgaaactttgctagatattttattttataacagccccacctactgtcagacaattgtggaaaaagtaggaatggagataaaccatctgcatgcactctttatgagtcggaacccagacttcaaaggaggtgtctctgttgctggtcacagtttaggttctttaatattgtttgacatcctgtctaatcaaaaagatttgaatttatcaaagtgccctggacctcttgctgttgctaatggagttgtgaagcagctacattttcaggaaaagcagatgcctgaagagccaaagctgactttggatgagtcgtatgaccttgttgttgaaaatgaagaagtcctaactttgcaagaaactctggaagcacttagcctctctgaatattttagcacttttgaaaaggaaaagattgatatggagtccctgcttatgtgtacagttgatgacctgaaggaaatggggataccccttggacccagaaagaagatagctaactttgtagaacataaagcagccaaactgaaaaaagcagcgtcagaaaagaaggcagtggcggccacttctacaaaaggacaagagcaaagtgcccagaagactaaagacatggcttccctcccctcagaatccaatgagccaaagaggaaacttccagttggtgcttgcgtgtcttctgtgtgtgtgaattatgaatcttttgaagttggcgccggacaggtttctgttgcttacaactcattagattttgaaccagagatattctttgccttggggtctccaattgctatgtttctcactattcgaggagttgataggatagatgagaattacagccttcctacctgtaaagggttcttcaatatttatcatccgcttgatccagtggcatatagattagaacctatgattgttccagatttggacctaaaagctgttctcattccacatcacaaaggcagaaaaagacttcatttagaattgaaagagagtctctctcgtatgggatctgatttgaagcagggttttattagctctctcaaaagtgcttggcagacattaaatgagtttgcccgtgctcatacgtcttcaacccagttgcaagaagaattggagaaggtggccaatcagatcaaagaagaagaagaaaagcaagtagttgaagcagaaaaggttgttgaaagtccagatttttccaaggatgaggactacttaggaaaggttggaatgttaaatggaggccgccgaattgactacgttctccaagaaaaaccaatagagagttttaatgaataccttttcgctcttcagagtcacttatgctattgggaatctgaagatactgctctgttactacttaaagaaatttatcgaacaatgaacattagtccagaacagccccagcattgatcaaacttcagttttactgtactttcttgtctgcacagaaagtcccagtacaacttccattgctgagaaaatcctcagaggactttcccacttcgctcctgtgatggatgacagaagagtgattcattaacaattgctcagccacaattctcggatatagggattcaaaagacaggatacagaactaacacagtgaaaaaaatcagtaccacatttggacagtataggtgagaaaacataattataaaaatgatgccatgaaaaattccacagatcagtttagttgtatagttgtcaaagttatatgtgatatcaatgaagaaatatttgtagcatgtaaacggttatttctgtttcttaaaaagtattgttagtgggctattaaacttggatttttctttttatta

SEQ ID NO: 297326 - DNA, 4096 bp, Homo sapiens
tggccaggagcgtgatcggtttccggtcagtggtgtggtaccgggtacccggagacgtgtatcggacggtgggccgcagccatggccgagagaaaacctaacggtggcagcggcggcgcctccacttcctcatcgggcactaacttacttttctcctcctcggccacggagttcagcttcaatgtgcccttcatcccagtcacccaggcctccgcttctccggcctccctgctcttaccgggagaggattccacagatgttggtgaggaggacagcttccttggtcagacttctattcacacatctgccccacagacatttagttacttctctcaggtatcaagcagcagtgatccttttgggaatattggacagtcaccattaacaactgcagcaacctcagttggacaatcaggattccccaagcccctgactgctctcccttttacaactggatcccaagatgtctcgaatgcattttcaccatccatttcgaaggctcaacctggtgctccaccttcctcactgatgggaataaattcttatctgccttctcagccaagtagtctccctccttcatattttgggaaccaaccccaaggaattccccaaccaggatacaatccatatcgccatacccctggcagcagcagggctaatccttacattgcaccaccccagctgcagcagtgccaaacaccaggccctcctgctcatcctccaccttctggaccccctgttcagatgtaccagatgcctccaggatctttgccaccggttccttcttcagtgcagtcaccggcacagcagcaggtacctgccagacctggggctccctctgttcaagtgccatctccttttctacttcaaaaccaatatgagcctgttcagccccactggttttactgcaaggaggtagaatacaaacaactgtggatgccttttagtgtgttcgactctttgaatcttgaagaaatctataattcagttcagccagatccggagagcgtggttcttggcacggatggagggcgctacgatgtttacctctatgaccgaataaggaaggctgcctactgggaagaggagccagccgaagtgagacgctgtacttggttttacaagggggacacagatagtcgatttattccctatactgaggagttcagtgaaaaactagaggctgaatataaaaaagctgtaaccactaatcagtggcaccgaagattagagtttccaagtggagagacaattgttatgcacaatccaaaggttattgttcagttccagccctcctcagtgccagatgaatggggcaccacgcaagatggacagacaaggcccagggttgtaaagcgtggaattgatgataaccttgatgaaattcccgacggggagatgcctcaagttgaccatttggtgtttgtggtgcatggcattggacctgtgtgtgacttacgctttaggagcattattgagtgtgtggatgattttagggtggtttctctcaaattgctgcggacacatttcaagaaatctttagatgacgggaaagtaagcagagtggagttccttccagttcattggcatagttctttgggtggggacgccacaggtgtggacaggaatattaagaaaatcactttgccaagtattggtcgatttcgtcactttaccaatgaaactttgctagatattttattttataacagccccacctactgtcagacaattgtggaaaaagtaggaatggagataaaccatctgcatgcactctttatgagtcggaacccagacttcaaaggaggtgtctctgttgctggtcacagtttaggttctttaatattgtttgacatcctgtctaatcaaaaagatttgaatttatcaaagtgccctggacctcttgctgttgctaatggagttgtgaagcagctacattttcaggaaaagcagatgcctgaagagccaaagctgactttggatgagtcgtatgaccttgttgttgaaaatgaagaagtcctaactttgcaagaaactctggaagcacttagcctctctgaatattttagcacttttgaaaaggaaaagattgatatggagtccctgcttatgtgtacagttgatgacctgaaggaaatggggataccccttggacccagaaagaagatagctaactttgtagaacataaagcagccaaactgaaaaaagcagcgtcagaaaagaaggcagtggcggccacttctacaaaatccaatgagccaaagaggaaacttccagttggtgcttgcgtgtcttctgtgtgtgtgaattatgaatcttttgaagttggcgccggacaggtttctgttgcttacaactcattagattttgaaccagagatattctttgccttggggtctccaattgctatgtttctcactattcgaggagttgataggatagatgagaattacagccttcctacctgtaaagggttcttcaatatttatcatccgaattgaaagagagtctctctcgtatgggatctgatttgaagcagggttttattagctctctcaaaagtgcttggcagacattaaatgagtttgcccgtgctcatacgtcttcaacccagttgcaagaagaattggagaaggtggccaatcagatcaaagaagaagaagaaaagcaagtagttgaagcagaaaaggttgttgaaagtccagatttttccaaggatgaggactacttaggaaaggttggaatgttaaatggaggccgccgaattgactacgttctccaagaaaaaccaatagagagttttaatgaataccttttcgctcttcagagtcacttatgctattgggaatctgaagatactgctctgttactacttaaagaaatttatcgaacaatgaacattagtccagaacagccccagcattgatcaaacttcagttttactgtactttcttgtctgcacagaaagtcccagtacaacttccattgctgagaaaatcctcagaggactttcccacttcgctcctgtgatggatgacagaagagtgattcattaacaattgctcagccacaattctcggatatagggattcaaaagacaggatacagaactaacacagtgaaaaaaatcagtaccacatttggacagtataggtgagaaaacataattataaaaatgatgccatgaaaaattccacagatcagtttagttgtatagttgtcaaagttatatgtgatatcaatgaagaaatatttgtagcatgtaaacggttatttctgtttcttaaaaagtattgttagtgggctattaaacttggatttttctttttattaatgcagtatgttctttttattcaagtatgaacttgttgagaaactatagtaatatgatttttaagagatttatgttctacttaaaatgtgaattgtacttctgagctgccttaatgcaaggtcatttatatttgttaagaggaaataatcaagatcactcatatcccaactgaatctgaggttttataaatccctcaaacgattgctgagagcctgattgtggaaagaagtgagatgcaccttattttcaagaagtcctgggaagcgctctcctagcacgtccatttccaggaggagaagcaagcagatgagaggttttccattttgtcatccaaggtagctgtgcacttgccttgttgctgaagttccaataatgtgaaaaccaaagtagaggtttttttcttcttctttttgttttctattaatttcacttataccaaagtgtttgaaagtatgaaatgtgttgcttctgagttatataaggctacttcatgacaagactgctttgtaatatttcactttgttttactacaaattcagatcactttgttttactataaattcagattatccaaatattttcctaatactatgtgggaatgctgattttcttttgttacgtagtggaaacattttgcattgtttacatagttctcatggaacatggaaatttttgaaagtgatatatgatacacattttttgtgtatgtattctaattagtgtgaataaagcagtaacattaatgcattttttaagcagca

SEQ ID NO: 297327 - DNA, 4212 bp, Homo sapiens
tggccaggagcgtgatcggtttccggtcagtggtgtggtaccgggtacccggagacgtgtatcggacggtgggccgcagccatggccgagagaaaacctaacggtggcagcggcggcgcctccacttcctcatcgggcactaacttacttttctcctcctcggccacggagttcagcttcaatgtgcccttcatcccagtcacccaggcctccgcttctccggcctccctgctcttaccgggagaggattccacagatgttggtgaggaggacagcttccttggtcagacttctattcacacatctgccccacagacatttagttacttctctcaggtatcaagcagcagtgatccttttgggaatattggacagtcaccattaacaactgcagcaacctcagttggacaatcaggattccccaagcccctgactgctctcccttttacaactggatcccaagatgtctcgaatgcattttcaccatccatttcgaaggctcaacctggtgctccaccttcctcactgatgggaataaattcttatctgccttctcagccaagtagtctccctccttcatattttgggaaccaaccccaaggaattccccaaccaggatacaatccatatcgccatacccctggcagcagcagggctaatccttacattgcaccaccccagctgcagcagtgccaaacaccaggccctcctgctcatcctccaccttctggaccccctgttcagatgtaccagatgcctccaggatctttgccaccggttccttcttcagtgcagtcaccggcacagcagcaggtacctgccagacctggggctccctctgttcaagtgccatctccttttctacttcaaaaccaatatgagcctgttcagccccactggttttactgcaaggaggtagaatacaaacaactgtggatgccttttagtgtgttcgactctttgaatcttgaagaaatctataattcagttcagccagatccggagagcgtggttcttggcacggatggagggcgctacgatgtttacctctatgaccgaataaggaaggctgcctactgggaagaggagccagccgaagtgagacgctgtacttggttttacaagggggacacagatagtcgatttattccctatactgaggagttcagtgaaaaactagaggctgaatataaaaaagctgtaaccactaatcagtggcaccgaagattagagtttccaagtggagagacaattgttatgcacaatccaaaggttattgttcagttccagccctcctcagtgccagatgaatggggcaccacgcaagatggacagacaaggcccagggttgtaaagcgtggaattgatgataaccttgatgaaattcccgacggggagatgcctcaagttgaccatttggtgtttgtggtgcatggcattggacctgtgtgtgacttacgctttaggagcattattgagtgtgtggatgattttagggtggtttctctcaaattgctgcggacacatttcaagaaatctttagatgacgggaaagtaagcagagtggagttccttccagttcattggcatagttctttgggtggggacgccacaggtgtggacaggaatattaagaaaatcactttgccaagtattggtcgatttcgtcactttaccaatgaaactttgctagatattttattttataacagccccacctactgtcagacaattgtggaaaaagtaggaatggagataaaccatctgcatgcactctttatgagtcggaacccagacttcaaaggaggtgtctctgttgctggtcacagtttaggttctttaatattgtttgacatcctgtctaatcaaaaagatttgaatttatcaaagtgccctggacctcttgctgttgctaatggagttgtgaagcagctacattttcaggaaaagcagatgcctgaagagccaaagctgactttggatgagtcgtatgaccttgttgttgaaaatgaagaagtcctaactttgcaagaaactctggaagcacttagcctctctgaatattttagcacttttgaaaaggaaaagattgatatggagtccctgcttatgtgtacagttgatgacctgaaggaaatggggataccccttggacccagaaagaagatagctaactttgtagaacataaagcagccaaactgaaaaaagcagcgtcagaaaagaaggcagtggcggccacttctacaaaaggacaagagcaaagtgcccagaagactaaagacatggcttccctcccctcagaatccaatgagccaaagaggaaacttccagttggtgcttgcgtgtcttctgtgtgtgtgaattatgaatcttttgaagttggcgccggacaggtttctgttgcttacaactcattagattttgaaccagagatattctttgccttggggtctccaattgctatgtttctcactattcgaggagttgataggatagatgagaattacagccttcctacctgtaaagggttcttcaatatttatcatccgcttgatccagtggcatatagattagaacctatgattgttccagatttggacctaaaagctgttctcattccacatcacaaaggcagaaaaagacttcatttagcagggttttattagctctctcaaaagtgcttggcagacattaaatgagtttgcccgtgctcatacgtcttcaacccagttgcaagaagaattggagaaggtggccaatcagatcaaagaagaagaagaaaagcaagtagttgaagcagaaaaggttgttgaaagtccagatttttccaaggatgaggactacttaggaaaggttggaatgttaaatggaggccgccgaattgactacgttctccaagaaaaaccaatagagagttttaatgaataccttttcgctcttcagagtcacttatgctattgggaatctgaagatactgctctgttactacttaaagaaatttatcgaacaatgaacattagtccagaacagccccagcattgatcaaacttcagttttactgtactttcttgtctgcacagaaagtcccagtacaacttccattgctgagaaaatcctcagaggactttcccacttcgctcctgtgatggatgacagaagagtgattcattaacaattgctcagccacaattctcggatatagggattcaaaagacaggatacagaactaacacagtgaaaaaaatcagtaccacatttggacagtataggtgagaaaacataattataaaaatgatgccatgaaaaattccacagatcagtttagttgtatagttgtcaaagttatatgtgatatcaatgaagaaatatttgtagcatgtaaacggttatttctgtttcttaaaaagtattgttagtgggctattaaacttggatttttctttttattaatgcagtatgttctttttattcaagtatgaacttgttgagaaactatagtaatatgatttttaagagatttatgttctacttaaaatgtgaattgtacttctgagctgccttaatgcaaggtcatttatatttgttaagaggaaataatcaagatcactcatatcccaactgaatctgaggttttataaatccctcaaacgattgctgagagcctgattgtggaaagaagtgagatgcaccttattttcaagaagtcctgggaagcgctctcctagcacgtccatttccaggaggagaagcaagcagatgagaggttttccattttgtcatccaaggtagctgtgcacttgccttgttgctgaagttccaataatgtgaaaaccaaagtagaggtttttttcttcttctttttgttttctattaatttcacttataccaaagtgtttgaaagtatgaaatgtgttgcttctgagttatataaggctacttcatgacaagactgctttgtaatatttcactttgttttactacaaattcagatcactttgttttactataaattcagattatccaaatattttcctaatactatgtgggaatgctgattttcttttgttacgtagtggaaacattttgcattgtttacatagttctcatggaacatggaaatttttgaaagtgatatatgatacacattttttgtgtatgtattctaattagtgtgaataaagcagtaacattaatgcattttttaagcagca

SEQ ID NO: 297328 - DNA, 1640 bp, Homo sapiens
cagaatcgttatttttcccccttagttacccacaagatggcagtatgtcatctgcttttgaccaaagacccttggttcttgcacactgtttttgtgggaatgcctttcacagtgggagtggtagggactttgaaatgccattctttcctgtatccctgtcaccaaggagaattgcaacacagctattttggagctaatcagtattcatctagtttttaaggacagctctgagattacgctgctttatttattacactgagattacattgctatcatttgcccttcttagatagagttgaatagaatagaacctgcattttcaaccattgtgcatagaagttaatttcttctaattgtctcttaagtaaatatgcttttccttttcatagggaatctgaagatactgctctgttactacttaaagaaatttatcgaacaatgaacattagtccagaacagccccagcattgatcaaacttcagttttactgtactttcttgtctgcacagaaagtcccagtacaacttccattgctgagaaaatcctcagaggactttcccacttcgctcctgtgatggatgacagaagagtgattcattaacaattgctcagccacaattctcggatatagggattcaaaagacaggatacagaactaacacagtgaaaaaaatcagtaccacatttggacagtataggtgagaaaacataattataaaaatgatgccatgaaaaattccacagatcagtttagttgtatagttgtcaaagttatatgtgatatcaatgaagaaatatttgtagcatgtaaacggttatttctgtttcttaaaaagtattgttagtgggctattaaacttggatttttctttttattaatgcagtatgttctttttattcaagtatgaacttgttgagaaactatagtaatatgatttttaagagatttatgttctacttaaaatgtgaattgtacttctgagctgccttaatgcaaggtcatttatatttgttaagaggaaataatcaagatcactcatatcccaactgaatctgaggttttataaatccctcaaacgattgctgagagcctgattgtggaaagaagtgagatgcaccttattttcaagaagtcctgggaagcgctctcctagcacgtccatttccaggaggagaagcaagcagatgagaggttttccattttgtcatccaaggtagctgtgcacttgccttgttgctgaagttccaataatgtgaaaaccaaagtagaggtttttttcttcttctttttgttttctattaatttcacttataccaaagtgtttgaaagtatgaaatgtgttgcttctgagttatataaggctacttcatgacaagactgctttgtaatatttcactttgttttactacaaattcagatcactttgttttactataaattcagattatccaaatattttcctaatactatgtgggaatgctgattttcttttgttacgtagtggaaacattttgcattgtttacatagttctcatggaacatggaaatttttgaaagtgatatatgatacacattttttgtgtatgtattctaattagtgtgaataaagcagtaacattaatgcattttttaagcagca

SEQ ID NO: 297329 - DNA, 3153 bp, Homo sapiens
tggccaggagcgtgatcggtttccggtcagtggtgtggtaccgggtacccggagacgtgtatcggacggtgggccgcagccatggccgagagaaaacctaacggtggcagcggcggcgcctccacttcctcatcgggcactaacttacttttctcctcctcggccacggagttcagcttcaatgtgcccttcatcccagtcacccaggcctccgcttctccggcctccctgctcttaccgggagaggattccacagatgttggtgaggaggacagcttccttggtcagacttctattcacacatctgccccacagacatttagttacttctctcaggtatcaagcagcagtgatccttttgggaatattggacagtcaccattaacaactgcagcaacctcagttggacaatcaggattccccaagcccctgactgctctcccttttacaactggatcccaagatgtctcgaatgcattttcaccatccatttcgaaggctcaacctggtgctccaccttcctcactgatgggaataaattcttatctgccttctcagccaagtagtctccctccttcatattttgggaaccaaccccaaggaattccccaaccaggatacaatccatatcgccatacccctggcagcagcagggctaatccttacattgcaccaccccagctgcagcagtgccaaacaccaggccctcctgctcatcctccaccttctggaccccctgttcagatgtaccagatgcctccaggatctttgccaccggttccttcttcagtgcagtcaccggcacagcagcaggtacctgccagacctggggctccctctgttcaagtgccatctccttttctacttcaaaaccaatatgagcctgttcagccccactggttttactgcaaggaggtagaatacaaacaactgtggatgccttttagtgtgttcgactctttgaatcttgaagaaatctataattcagttcagccagatccggagagcgtggttcttggcacggatggagggcgctacgatgtttacctctatgaccgaataaggaaggctgcctactgggaagaggagccagccgaagtgagacgctgtacttggttttacaagggggacacagatagtcgatttattccctatactgaggagttcagtgaaaaactagaggctgaatataaaaaagctgtaaccactaatcagtggcaccgaagattagagtttccaagtggagagacaattgttatgcacaatccaaaggttattgttcagttccagccctcctcagtgccagatgaatggggcaccacgcaagatggacagacaaggcccagggttgtaaagcgtggaattgatgataaccttgatgaaattcccgacggggagatgcctcaagttgaccatttggtgtttgtggtgcatggcattggacctgtgtgtgacttacgctttaggagcattattgagtgtgtggatgattttagggtggtttctctcaaattgctgcggacacatttcaagaaatctttagatgacgggaaagtaagcagagtggagttccttccagttcattggcatagttctttgggtggggacgccacaggtgtggacaggaatattaagaaaatcactttgccaagtattggtcgatttcgtcactttaccaatgaaactttgctagatattttattttataacagccccacctactgtcagacaattgtggaaaaagtaggaatggagataaaccatctgcatgcactctttatgagtcggaacccagacttcaaaggaggtgtctctgttgctggtcacagtttaggttctttaatattgtttgacatcctgtctaatcaaaaagatttgaatttatcaaagtgccctggacctcttgctgttgctaatggagttgtgaagcagctacattttcaggaaaagcagatgcctgaagagccaaagctgactttggatgagtcgtatgaccttgttgttgaaaatgaagaagtcctaactttgcaagaaactctggaagcacttagcctctctgaatattttagcacttttgaaaaggaaaagattgatatggagtccctgcttatgtgtacagttgatgacctgaaggaaatggggataccccttggacccagaaagaagatagctaactttgtagaacataaagcagccaaactgaaaaaagcagcgtcagaaaagaaggcagtggcggccacttctacaaaaggacaagagcaaagtgcccagaagactaaagacatggcttccctcccctcagaatccaatgagccaaagaggaaacttccagttggtgcttgcgtgtcttctgtgtgtgtgaattatgaatcttttgaagttggcgccggacaggtttctgttgcttacaactcattagattttgaaccagagatattctttgccttggggtctccaattgctatgtttctcactattcgaggagttgataggatagatgagaattacagccttcctacctgtaaagggttcttcaatatttatcatccgcttgatccagtggcatatagattagaacctatgattgttccagatttggacctaaaagctgttctcattccacatcacaaaggcagaaaaagacttcatttagaattgaaagagagtctctctcgtatgggatctgatttgaagcagggttttattagctctctcaaaagtgcttggcagacattaaatgagtttgcccgtgctcatacgtcttcaacccagttgcaagaagaattggagaaggtggccaatcagatcaaagaagaagaagaaaagcaagtagttgaagcagaaaaggttgttgaaagtccagatttttccaaggatgaggactacttaggaaaggttggaatgttaaatggaggccgccgaattgactacgttctccaagaaaaaccaatagagagttttaatgaataccttttcgctcttcagagtcacttatgctattgggaatctgaagatactgctctgttactacttaaagaaatttatcgaacaatgaacattagtccagaacagccccagcattgatcaaacttcagttttactgtgtgagtttatccttattgaatgtataaattctgaatgtttgcattctca

SEQ ID NO: 297330 - DNA, 1570 bp, Homo sapiens
tggccaggagcgtgatcggtttccggtcagtggtgtggtaccgggtacccggagacgtgtatcggacggtgggccgcagccatggccgagagaaaacctaacggtggcagcggcggcgcctccacttcctcatcgggcactaacttacttttctcctcctcggccacggagttcagcttcaatgtgcccttcatcccagtcacccaggcctccgcttctccggcctccctgctcttaccgggagaggattccacagatgttggtgaggaggacagcttccttggtcagacttctattcacacatctgccccacagacatttagttacttctctcaggtatcaagcagcagtgatccttttgggaatattggacagtcaccattaacaactgcagcaacctcagttggacaatcaggattccccaagcccctgactgctctcccttttacaactggatcccaagatgtctcgaatgcattttcaccatccatttcgaaggctcaacctggtgctccaccttcctcactgatgggaataaattcttatctgccttctcagccaagtagtctccctccttcatattttgggaaccaaccccaaggaattccccaaccaggatacaatccatatcgccatacccctggcagcagcagggctaatccttacattgcaccaccccagctgcagcagtgccaaacaccaggccctcctgctcatcctccaccttctggaccccctgttcagatgtaccagatgcctccaggatctttgccaccggttccttcttcagtgcagtcaccggcacagcagcaggtacctgccagacctggggctccctctgttcaagtgccatctccttttctacttcaaaaccaatatgagcctgttcagccccactggttttactgcaaggaggtagaatacaaacaactgtggatgccttttagtgtgttcgactctttgaatcttgaagaaatctataattcagttcagccagatccggagagcgtggttcttggcacggatggagggcgctacgatgtttacctctatgaccgaataaggaaggctgcctactgggaagaggagccagccgaagtgagacgctgtacttggttttacaagggggacacagatagtcgatttattccctatactgaggagttcagtgaaaaactagaggtacgggtgctttatttctttatgagtttctttaaaaaatgtaggtcctatatacattggtgagtaacatcattcacagtggagcggactttacttacaagacagcttgttttgatgctgttcacagagaagattactttttaagtggtgtcatcactcatgaggtgctaatcgtggcatctgtgtctaaagatagaatatgatttgcagagacacatcacagatctaataaggtgcttgtgtcaagccttcaatagaacctaggccgctgggatttgttgttgatagaagatgccaagcatatggacattttcaaattagtattcagtaaaaggcttgaaattaacctctgatttgtgaaaataaataaatagaattggaaaaagtg

SEQ ID NO: 297331 - DNA, 2290 bp, Homo sapiens
cccggatggaggagctgaggttcggtccccgccggggaggtcgggacgggcaggggctgaggaccccgcgccagcttgggagccctggagttctggcgggagggaagctgtcaaatggaagccggtagaaatgagacagacgcccggagaagcggggagccccgcccctccgccatagcagcctcgggcgccgcctcttcctttccagcctcccgccctcgtctgcttccggccctgtggcctggtggggctctgcaggctccctcgggagtggtccttgggccgtggcccctctgggaggcctgagggagctcaatcctggtagcaacacccctgaattcctggtggtgaaaggatgtggccccaggacccatcccggaaggaggtgctgaggtttgcagtcagctgccgtatcctgactctgatgctgcaggccctcttcaatgccatcatcccagatcaccatgcagaagccttctctcctcctcgcctggccccctcaggctttgtggaccaactcgtggaaggtcttctgggcggcctgtctcactgggatgctgaacacttcttgttcattgctgagcatggctacctgtatgagcacaactttgccttctttcctggtttccccttggccctgctggtggggactgaactgttgagacccttacgggggttactgagtctacgcagttgcctgctgatttcggtagcatcactcaatttcttgttcttcatgttggctgcagttgcacttcatgacctgggttgtctggttttgcactgtccccaccagtccttttatgcagctctgcttttctgtctcagccctgccaatgtcttcctggcagctggttactcagaagctttgtttgccctcctgacattcagtgccatggggcagctggagaggggccgagtctggactagtgtactcctctttgcctttgccactggggtacgctccaacgggctggtcagtgttggcttcctcatgcattctcaatgccaaggctttttctcttctctaacgatgctgaatcctctgagacagctctttaagctgatggcctctctgtttctgtcggtgttcacacttggccttccctttgccctctttcagtattatgcctacacccaattctgtctgccaggctcagcccgccccattcctgagcctttggtacagttagctgtagacaagggctaccggattgcagagggaaatgaaccgccttggtgcttctgggatgttccactaatatacagctatatccaggatgtctactggaatgttggctttttgaaatactatgagctcaagcaggtgcccaattttctactggctgcaccagtggctatactggttgcctgggcaacttggacatacgtgaccactcacccttggctctgccttacacttgggctgcaaaggagcaagaacaataagaccctagagaagcccgatcttggattcctcagtcctcaggtgtttgtgtacgtggtccacgctgcagtgctgctgctgtttggaggtctgtgcatgcatgttcaggttctcaccaggtttttgggctcctccactcctattatgtactggtttccagctcacttgcttcaggatcaagagccgctgttgagatccttaaagactgtgccttggaagcctcttgcagaggactccccaccaggacaaaaggtccccagaaatcctatcatgggacttttgtatcactggaaaacctgttctccagtcacacgatacattctaggctacttcctgacttactggctcctgggactactcctacattgcaacttcctgccttggacatgacctggactctccagggacaggttggaagccaacttaacccaggggtctgaaagtaaaaatacacattggaactgcctctgctgccctgggatcattactgtgtccattataatctttctctttctctttgaaagctggtcaggaatgggagaagtgtcagacactagagagccccttctggtcctggctagggcaaattttagacaactattttctctgtaagtgaagattgtcgtattccaagtctaaaatacacctggatctgtctagtcaatcaacatagcagagacagtcttaaacctaccattgacctgtgtgtaaatttaaatgtcaatttattgaagtgtaaatttcatcaaaggcattagctgacaggctggtaacagtccacacaagatggtataggcctgaacagtgtagtggcagtaataaagtgggaccattttttccaaa

SEQ ID NO: 297332 - DNA, 2397 bp, Homo sapiens
cccggatggaggagctgaggttcggtccccgccggggaggtcgggacgggcaggggctgaggaccccgcgccagcttgggagccctggagttctggcgggagggaagctgtcaaatggaagccggtagaaatgagacagacgcccggagaagcggggagccccgcccctccgccatagcagcctcgggcgccgcctcttcctttccagcctcccgccctcgtctgcttccggccctgtggcctggtggggctctgcaggctccctcgggagtggtccttgggccgtggcccctctgggaggcctgagggagctcaatcctggtagcaacacccctgaattcctggtggtgaaaggatgtggccccaggacccatcccggaaggaggtgctgaggtttgcagtcagctgccgtatcctgactctgatgctgcaggccctcttcaatgccatcatcccagatcaccatgcagaagccttctctcctcctcgcctggccccctcaggctttgtggaccaactcgtggaaggtcttctgggcggcctgtctcactgggatgctgaacacttcttgttcattgctgagcatggctacctgtatgagcacaactttgccttctttcctggtttccccttggccctgctggtggggactgaactgttgagacccttacgggggttactgagtctacgcagttgcctgctgatttcggtagcatcactcaatttcttgttcttcatgttggctgcagttgcacttcatgacctgggttgtctggttttgcactgtccccaccagtccttttatgcagctctgcttttctgtctcagccctgccaatgtcttcctggcagctggttactcagaagctttgtttgccctcctgacattcagtgccatggggcagctggagaggggccgagtctggactagtgtactcctctttgcctttgccactggggtacgctccaacgggctggtcagtgttggcttcctcatgcattctcaatgccaaggctttttctcttctctaacgatgctgaatcctctgagacagctctttaagctgatggcctctctgtttctgtcggtgttcacacttggccttccctttgccctctttcagtattatgcctacacccaattctgtctgccaggctcagcccgccccattcctgagcctttggtacagttagctgtagacaagggctaccggattgcagagggaaatgaaccgccttggtgcttctgggatgttccactaatatacagctatatccaggatgtctactggaatgttggctttttgaaatactatgagctcaagcaggtgcccaattttctactggctgcaccagtggctatactggttgcctgggcaacttggacatacgtgaccactcacccttggctctgccttacacttgggctgcaaaggagcaagaacaataagaccctagagaagcccgatcttggattcctcagtcctcaggtgtttgtgtacgtggtccacgctgcagtgctgctgctgtttggaggtctgtgcatgcatgttcaggttctcaccaggtttttgggctcctccactcctattatgtactggtttccagctcacttgcttcaggatcaagagccgctgttgagatccttaaagactgtgccttggaagcctcttgcagaggactccccaccaggacaaaaggtccccagaaatcctatcatgggacttttgtatcactggaaaacctgttctccagtcacacgatacattctaggctacttcctgacttactggctcctgggactactcctacattgcaacttcctgccttggacatgacctggactctccagggacaggttggaagccaacttaacccaggggtctgaaagtaaaaatacacattggaactgcctctgctgccctgggatcattactgtgtccattataatctttctctttctctttgaaagctggtcaggaatgggagaagtgtcagacactagagagccccttctggtcctggctagggcaaattttagacaactattttctctgtaagtgaagattgtcgtattccaagtctaaaatacacctggatctgtctagtcaatcaacatagcagagacagtcttaaacctaccattgacctgtgtgtaaatttaaatgtcaatttattgaagtgtaaatttcatcaaaggcattagctgacaggctggtaacagtccacacaagatggtataggcctgaacagtgtagtggcagtaataaagtgggaccattttttccaaatgcgacattgtttctgatgtttttttttatgatttgtgcatgtatttttatatgaaaaaaacttacaaagatatgcaaattaaacttctttcagttataaaaaaaat

SEQ ID NO: 297333 - DNA, 1115 bp, Homo sapiens
cccggatggaggagctgaggttcggtccccgccggggaggtcgggacgggcaggggctgaggaccccgcgccagcttgggagccctggagttctggcgggagggaagctgtcaaatggaagccggtagaaatgagacagacgcccggagaagcggggagccccgcccctccgccatagcagcctcgggcgccgcctcttcctttccagcctcccgccctcgtctgcttccggccctgtggcctggtggggctctgcaggctccctcgggagtggtccttgggccgtggcccctctggggtgagcgtggatgattagtacccagaagggactgtgtccaaaaggagccggccagaaacgggttgcggacacggctgggctgacagaaggcagcccccacgaggcctttggctctgaggaccctgggtcagagcgacttctccagcctgcgcagggggtgttagtcttacccagagggtccagagctgccgttcaacaggatgtcccagattctcagatagggcccaactaccctaagcatacctagcaagggcaggctgcggcatggaagtactgggctaggcgtttgggtgacctgggtcataatcctggctcggaaagggcgcgtaccctttggcgagggatgcgggctggtaccgtgaggtttaagaagcagaaaacatgacagcctctttaagtagccctgggtacgtcacttgaccccagtgagcctcagtttccatatccataaaatggcgatggtaattatactagcctcacagtgtctgatgagatctctggagcctatttatctcacgggaaaatttttgaagagtgaaactagttgatctaggcctgagggagctcaatcctggtagcaacacccctgaattcctggtggtgaaaggatgtggccccaggacccatcccggaaggaggtgctgaggtttgcagtcagctgccgtatcctgactctgatgctgcaggccctcttcaatgccatcatcccagatcaccatgcagaagccttctctcctcctcgcccctcagcttggggccatcggggaagtctctggcgcggctctgggtgtgacctttgtctgggcctgtactgtta

SEQ ID NO: 297334 - DNA, 2841 bp, Homo sapiens
cccggatggaggagctgaggttcggtccccgccggggaggtcgggacgggcaggggctgaggaccccgcgccagcttgggagccctggagttctggcgggagggaagctgtcaaatggaagccggtagaaatgagacagacgcccggagaagcggggagccccgcccctccgccatagcagcctcgggcgccgcctcttcctttccagcctcccgccctcgtctgcttccggccctgtggcctggtggggctctgcaggctccctcgggagtggtccttgggccgtggcccctctggggtgagcgtggatgattagtacccagaagggactgtgtccaaaaggagccggccagaaacgggttgcggacacggctgggctgacagaaggcagcccccacgaggcctttggctctgaggaccctgggtcagagcgacttctccagcctgcgcagggggtgttagtcttacccagagggtccagagctgccgttcaacaggatgtcccagattctcagatagggcccaactaccctaagcatacctagcaagggcaggctgcggcatggaagtactgggctaggcgtttgggtgacctgggtcataatcctggctcggaaagggcgcgtaccctttggcgagggatgcgggctggtaccgtgaggtttaagaagcagaaaacatgacagcctctttaagtagccctgggtacgtcacttgaccccagtgagcctcagtttccatatccataaaatggcgatggtaattatactagcctcacagtgtctgatgagatctctggagcctatttatctcacgggaaaatttttgaagagtgaaactagttgatctaggcctgagggagctcaatcctggtagcaacacccctgaattcctggtggtgaaaggatgtggccccaggacccatcccggaaggaggtgctgaggtttgcagtcagctgccgtatcctgactctgatgctgcaggccctcttcaatgccatcatcccagatcaccatgcagaagccttctctcctcctcgcctggccccctcaggctttgtggaccaactcgtggaaggtcttctgggcggcctgtctcactgggatgctgaacacttcttgttcattgctgagcatggctacctgtatgagcacaactttgccttctttcctggtttccccttggccctgctggtggggactgaactgttgagacccttacgggggttactgagtctacgcagttgcctgctgatttcggtagcatcactcaatttcttgttcttcatgttggctgcagttgcacttcatgacctgggttgtctggttttgcactgtccccaccagtccttttatgcagctctgcttttctgtctcagccctgccaatgtcttcctggcagctggttactcagaagctttgtttgccctcctgacattcagtgccatggggcagctggagaggggccgagtctggactagtgtactcctctttgcctttgccactggggtacgctccaacgggctggtcagtgttggcttcctcatgcattctcaatgccaaggctttttctcttctctaacgatgctgaatcctctgagacagctctttaagctgatggcctctctgtttctgtcggtgttcacacttggccttccctttgccctctttcagtattatgcctacacccaattctgtctgccaggctcagcccgccccattcctgagcctttggtacagttagctgtagacaagggctaccggattgcagagggaaatgaaccgccttggtgcttctgggatgttccactaatatacagctatatccaggatgtctactggaatgttggctttttgaaatactatgagctcaagcaggtgcccaattttctactggctgcaccagtggctatactggttgcctgggcaacttggacatacgtgaccactcacccttggctctgccttacacttgggctgcaaaggagcaagaacaataagaccctagagaagcccgatcttggattcctcagtcctcaggtgtttgtgtacgtggtccacgctgcagtgctgctgctgtttggaggtctgtgcatgcatgttcaggttctcaccaggtttttgggctcctccactcctattatgtactggtttccagctcacttgcttcaggatcaagagccgctgttgagatccttaaagactgtgccttggaagcctcttgcagaggactccccaccaggacaaaaggtccccagaaatcctatcatgggacttttgtatcactggaaaacctgttctccagtcacacgatacattctaggctacttcctgacttactggctcctgggactactcctacattgcaacttcctgccttggacatgacctggactctccagggacaggttggaagccaacttaacccaggggtctgaaagtaaaaatacacattggaactgcctctgctgccctgggatcattactgtgtccattataatctttctctttctctttgaaagctggtcaggaatgggagaagtgtcagacactagagagccccttctggtcctggctagggcaaattttagacaactattttctctgtaagtgaagattgtcgtattccaagtctaaaatacacctggatctgtctagtcaatcaacatagcagagacagtcttaaacctaccattgacctgtgtgtaaatttaaatgtcaatttattgaagtgtaaatttcatcaaaggcattagctgacaggctggtaacagtccacacaagatggtataggcctgaacagtgtagtggcagtaataaagtgggaccattttttccaaa

SEQ ID NO: 297335 - DNA, 2051 bp, Homo sapiens
tggtccggtccggaagtgttaggatcgcgggcgcgtgggccccggatggaggagctgagaggcctgagggagctcaatcctggtagcaacacccctgaattcctggtggtgaaaggatgtggccccaggacccatcccggaaggaggtgctgaggtttgcagtcagctgccgtatcctgactctgatgctgcaggccctcttcaatgccatcatcccagatcaccatgcagaagccttctctcctcctcgcctggccccctcaggctttgtggaccaactcgtggaaggtcttctgggcggcctgtctcactgggatgctgaacacttcttgttcattgctgagcatggctacctgtatgagcacaactttgccttctttcctggtttccccttggccctgctggtggggactgaactgttgagacccttacgggggttactgagtctacgcagttgcctgctgatttcggtagcatcactcaatttcttgttcttcatgttggctgcagttgcacttcatgacctgggttgtctggttttgcactgtccccaccagtccttttatgcagctctgcttttctgtctcagccctgccaatgtcttcctggcagctggttactcagaagctttgtttgccctcctgacattcagtgccatggggcagctggagaggggccgagtctggactagtgtactcctctttgcctttgccactggggtacgctccaacgggctggtcagtgttggcttcctcatgcattctcaatgccaaggctttttctcttctctaacgatgctgaatcctctgagacagctctttaagctgatggcctctctgtttctgtcggtgttcacacttggccttccctttgccctctttcagtattatgcctacacccaattctgtctgccaggctcagcccgccccattcctgagcctttggtacagttagctgtagacaagggctaccggattgcagagggaaatgaaccgccttggtgcttctgggatgttccactaatatacagctatatccaggatgtctactggaatgttggctttttgaaatactatgagctcaagcaggtgcccaattttctactggctgcaccagtggctatactggttgcctgggcaacttggacatacgtgaccactcacccttggctctgccttacacttgggctgcaaaggagcaagaacaataagaccctagagaagcccgatcttggattcctcagtcctcaggtgtttgtgtacgtggtccacgctgcagtgctgctgctgtttggaggtctgtgcatgcatgttcaggttctcaccaggtttttgggctcctccactcctattatgtactggtttccagctcacttgcttcaggatcaagagccgctgttgagatccttaaagactgtgccttggaagcctcttgcagaggactccccaccaggacaaaaggtccccagaaatcctatcatgggacttttgtatcactggaaaacctgttctccagtcacacgatacattctaggctacttcctgacttactggctcctgggactactcctacattgcaacttcctgccttggacatgacctggactctccagggacaggttggaagccaacttaacccaggggtctgaaagtaaaaatacacattggaactgcctctgctgccctgggatcattactgtgtccattataatctttctctttctctttgaaagctggtcaggaatgggagaagtgtcagacactagagagccccttctggtcctggctagggcaaattttagacaactattttctctgtaagtgaagattgtcgtattccaagtctaaaatacacctggatctgtctagtcaatcaacatagcagagacagtcttaaacctaccattgacctgtgtgtaaatttaaatgtcaatttattgaagtgtaaatttcatcaaaggcattagctgacaggctggtaacagtccacacaagatggtataggcctgaacagtgtagtggcagtaataaagtgggaccattttttccaaa

SEQ ID NO: 297336 - DNA, 2095 bp, Homo sapiens
ttacctgtaagcaaagtgtgggctacacacatctgtagtcgctgaggctagagcttgactcgagagaggaaaggaagaatgcaagcatggtcaagtggcagagaggcctgagggagctcaatcctggtagcaacacccctgaattcctggtggtgaaaggatgtggccccaggacccatcccggaaggaggtgctgaggtttgcagtcagctgccgtatcctgactctgatgctgcaggccctcttcaatgccatcatcccagatcaccatgcagaagccttctctcctcctcgcctggccccctcaggctttgtggaccaactcgtggaaggtcttctgggcggcctgtctcactgggatgctgaacacttcttgttcattgctgagcatggctacctgtatgagcacaactttgccttctttcctggtttccccttggccctgctggtggggactgaactgttgagacccttacgggggttactgagtctacgcagttgcctgctgatttcggtagcatcactcaatttcttgttcttcatgttggctgcagttgcacttcatgacctgggttgtctggttttgcactgtccccaccagtccttttatgcagctctgcttttctgtctcagccctgccaatgtcttcctggcagctggttactcagaagctttgtttgccctcctgacattcagtgccatggggcagctggagaggggccgagtctggactagtgtactcctctttgcctttgccactggggtacgctccaacgggctggtcagtgttggcttcctcatgcattctcaatgccaaggctttttctcttctctaacgatgctgaatcctctgagacagctctttaagctgatggcctctctgtttctgtcggtgttcacacttggccttccctttgccctctttcagtattatgcctacacccaattctgtctgccaggctcagcccgccccattcctgagcctttggtacagttagctgtagacaagggctaccggattgcagagggaaatgaaccgccttggtgcttctgggatgttccactaatatacagctatatccaggatgtctactggaatgttggctttttgaaatactatgagctcaagcaggtgcccaattttctactggctgcaccagtggctatactggttgcctgggcaacttggacatacgtgaccactcacccttggctctgccttacacttgggctgcaaaggagcaagaacaataagaccctagagaagcccgatcttggattcctcagtcctcaggtgtttgtgtacgtggtccacgctgcagtgctgctgctgtttggaggtctgtgcatgcatgttcaggttctcaccaggtttttgggctcctccactcctattatgtactggtttccagctcacttgcttcaggatcaagagccgctgttgagatccttaaagactgtgccttggaagcctcttgcagaggactccccaccaggacaaaaggtccccagaaatcctatcatgggacttttgtatcactggaaaacctgttctccagtcacacgatacattctaggctacttcctgacttactggctcctgggactactcctacattgcaacttcctgccttggacatgacctggactctccagggacaggttggaagccaacttaacccaggggtctgaaagtaaaaatacacattggaactgcctctgctgccctgggatcattactgtgtccattataatctttctctttctctttgaaagctggtcaggaatgggagaagtgtcagacactagagagccccttctggtcctggctagggcaaattttagacaactattttctctgtaagtgaagattgtcgtattccaagtctaaaatacacctggatctgtctagtcaatcaacatagcagagacagtcttaaacctaccattgacctgtgtgtaaatttaaatgtcaatttattgaagtgtaaatttcatcaaaggcattagctgacaggctggtaacagtccacacaagatggtataggcctgaacagtgtagtggcagtaataaagtgggaccattttttccaaa

SEQ ID NO: 297337 - DNA, 2486 bp, Homo sapiens
cccggatggaggagctgaggttcggtccccgccggggaggtcgggacgggcaggggctgaggaccccgcgccagcttgggagccctggagttctggcgggagggaagctgtcaaatggaagccggtagaaatgagacagacgcccggagaagcggggagccccgcccctccgccatagcagcctcgggcgccgcctcttcctttccagcctcccgccctcgtctgcttccggccctgtggcctggtggggctctgcaggctccctcgggagtggtccttgggccgtggcccctctggggtgagcgtggatgattagtacccagaagggactgtgtccaaaaggagccggccagaaacgggttgcggacacggctgggctgacagaaggcagcccccacgaggcctttggctctgaggaccctggaggcctgagggagctcaatcctggtagcaacacccctgaattcctggtggtgaaaggatgtggccccaggacccatcccggaaggaggtgctgaggtttgcagtcagctgccaacaatagaaggcattagaagagaccttccatatgcgcccatcacattcttcagcctacctatgtctgcacctttgtgctttcagtactgaaggccctcttcaatgccatcatcccagatcaccatgcagaagccttctctcctcctcgcctggccccctcaggctttgtggaccaactcgtggaaggtcttctgggcggcctgtctcactgggatgctgaacacttcttgttcattgctgagcatggctacctgtatgagcacaactttgccttctttcctggtttccccttggccctgctggtggggactgaactgttgagacccttacgggggttactgagtctacgcagttgcctgctgatttcggtagcatcactcaatttcttgttcttcatgttggctgcagttgcacttcatgacctgggttgtctggttttgcactgtccccaccagtccttttatgcagctctgcttttctgtctcagccctgccaatgtcttcctggcagctggttactcagaagctttgtttgccctcctgacattcagtgccatggggcagctggagaggggccgagtctggactagtgtactcctctttgcctttgccactggggtacgctccaacgggctggtcagtgttggcttcctcatgcattctcaatgccaaggctttttctcttctctaacgatgctgaatcctctgagacagctctttaagctgatggcctctctgtttctgtcggtgttcacacttggccttccctttgccctctttcagtattatgcctacacccaattctgtctgccaggctcagcccgccccattcctgagcctttggtacagttagctgtagacaagggctaccggattgcagagggaaatgaaccgccttggtgcttctgggatgttccactaatatacagctatatccaggatgtctactggaatgttggctttttgaaatactatgagctcaagcaggtgcccaattttctactggctgcaccagtggctatactggttgcctgggcaacttggacatacgtgaccactcacccttggctctgccttacacttgggctgcaaaggagcaagaacaataagaccctagagaagcccgatcttggattcctcagtcctcaggtgtttgtgtacgtggtccacgctgcagtgctgctgctgtttggaggtctgtgcatgcatgttcaggttctcaccaggtttttgggctcctccactcctattatgtactggtttccagctcacttgcttcaggatcaagagccgctgttgagatccttaaagactgtgccttggaagcctcttgcagaggactccccaccaggacaaaaggtccccagaaatcctatcatgggacttttgtatcactggaaaacctgttctccagtcacacgatacattctaggctacttcctgacttactggctcctgggactactcctacattgcaacttcctgccttggacatgacctggactctccagggacaggttggaagccaacttaacccaggggtctgaaagtaaaaatacacattggaactgcctctgctgccctgggatcattactgtgtccattataatctttctctttctctttgaaagctggtcaggaatgggagaagtgtcagacactagagagccccttctggtcctggctagggcaaattttagacaactattttctctgtaagtgaagattgtcgtattccaagtctaaaatacacctggatctgtctagtcaatcaacatagcagagacagtcttaaacctaccattgacctgtgtgtaaatttaaatgtcaatttattgaagtgtaaatttcatcaaaggcattagctgacaggctggtaacagtccacacaagatggtataggcctgaacagtgtagtggcagtaataaagtgggaccattttttccaaa

SEQ ID NO: 297338 - DNA, 2022 bp, Homo sapiens
cccggatggaggagctgaggttcggtccccgccggggaggtcgggacgggcaggggctgaggaccccgcgccagcttgggagccctggagttctggcgggagggaagctgtcaaatggaagccggtagaaatgagacagacgcccggagaagcggggagccccgcccctccgccatagcagcctcgggcgccgcctcttcctttccagcctcccgccctcgtctgcttccggccctgtggcctggtggggctctgcaggctccctcgggagtggtccttgggccgtggcccctctgggaggcctgagggagctcaatcctggtagcaacacccctgaattcctggtggtgaaaggatgtggccccaggacccatcccggaaggaggtgctgaggtttgcagtcagctgccgtatcctgactctgatgctgcaggccctcttcaatgccatcatcccagatcaccatgcagaagccttctctcctcctcgcctggccccctcaggctttgtggaccaactcgtggaaggtcttctgggcggcctgtctcactgggatgctgaacacttcttgttcattgctgagcatggctacctgtatgagcacaactttgccttctttcctggtttccccttggccctgctggtggggactgaactgttgagacccttacgggggttactgagtctacgcagttgcctgctgatttcggtagcatcactcaatttcttgttcttcatgttggctgcagttgcacttcatgacctgggttgtctggttttgcactgtccccaccagtccttttatgcagctctgcttttctgtctcagccctgccaatgtcttcctggcagctggttactcagaagctttgtttgccctcctgacattcagtgccatggggcagctggagaggggccgagtctggactagtgtactcctctttgcctttgccactggggtacgctccaacgggctggtcagtgttggcttcctcatgcattctcaatgccaaggctttttctcttctctaacgatgctgaatcctctgagacagctctttaagctgatggcctctctgtttctgtcggtgttcacacttggccttccctttgccctctttcagtattatgcctacacccaattctgtctgccaggctcagcccgccccattcctgagcctttggtacagttagctgtagacaagggctaccggattgcagagggaaatgaaccgccttggtgcttctgggatgttccactaatatacagctatatccaggatgtctactggaatgttggctttttgaaatactatgagctcaagcaggtgcccaattttctactggctgcaccagtggctatactggttgcctgggcaacttggacatacgtgaccactcacccttggctctgccttacacttgggctgcaaaggagcaagaacaataagaccctagagaagcccgatcttggattcctcagtcctcaggtgtttgtgtacgtggtccacgctgcagtgctgctgctgtttggaggtctgtgcatgcatgttcaggtgaggtggattcctgactgggataaggatgtgaatacaggcaaaaccccttggccaaggacagggaaggcagctaacatctcccgtttgagtgatccatactgaatttattcaacagtccacacaagatggtataggcctgaacagtgtagtggcagtaataaagtgggaccattttttccaaaaaaaaaaaactcgtgccgaattcggcacgagctcgtgccgaattcggcacgagtctctctatagttctgtgtcataaagctgtcctggccagccttcaagctggtgtggccactcttgatgtgaggcgtgtcagttccagtggggacatgggaggggctgaacagtggcccaaaggcattcttggtttcacctgcaggtgcatttgggtccatttcatggccaagaaagctctggtggctggacttcttaaggcttggcgtaacaataaactttcgaagtcc

SEQ ID NO: 297339 - DNA, 355 bp, Homo sapiens
gtaagtgtcctgccagttaagagtctgtgatttggcaaaggggttgttgggaagtgaggtgggcaattagctgagagggagaattgactagctttgtttttacttggtttacctgtaagcaaagtgtgggctacacacatctgtagtcgctgaggctagagcttgactcgagagaggaaaggaagaatgcaagcatggtcaagtggcagaggtgggttaggtgcttttctgatcccagcttctcttctgcatgcgcgtgggaagccaaggaagaggaaaaaagagtgaattcgccctaggatagggaaggagtagccgcgtgaggttgagtatgcccatttccgtgatttctctc

SEQ ID NO: 297340 - DNA, 784 bp, Homo sapiens
gttcacccagcagtagagaagtccccgggctggtccaatttgagtcagtgacattccagtaaatgtctggatattcccctctcatgatttctaggttctcaccaggtttttgggctcctccactcctattatgtactggtttccagctcacttgcttcaggatcaagagccgctgttgagatccttaaagactgtgccttggaagcctcttgcagaggactccccaccaggacaaaaggtccccagaaatcctatcatgggacttttgtatcactggaaaacctgttctccagtcacacgatacattctaggctacttcctgacttactggctcctgggactactcctacattgcaacttcctgccttggacatgacctggactctccagggacaggttggaagccaacttaacccaggggtctgaaagtaaaaatacacattggaactgcctctgctgccctgggatcattactgtgtccattataatctttctctttctctttgaaagctggtcaggaatgggagaagtgtcagacactagagagccccttctggtcctggctagggcaaattttagacaactattttctctgtaagtgaagattgtcgtattccaagtctaaaatacacctggatctgtctagtcaatcaacatagcagagacagtcttaaacctaccattgacctgtgtgtaaatttaaatgtcaatttattgaagtgtaaatttcatcaaaggcattagctgacaggctggtaacagtccacacaagatggtataggcc

SEQ ID NO: 297341 - DNA, 3141 bp, Homo sapiens
  misc_feature (64)..(64): n is a, c, g, or t
tatagaatttcaaaatgaaattatttgcccgacaagaaggcatcattagttagacttgtttccnctgtagcccgattgaaattctcagtgttaagtttaggacccaaacaccagctgggacgtaagagcaggaccgaatcaaccttgaataaactgtatatagaaaacaattgttagttgattaagtagacattggatgtttgttagaaaggaatgttagttgtaagtgacatgttaagatttatacaattgtcaaaaacttttaggaaagattccagaatgcttttgataaaatttatcgattatggattcacagtgtgataattaagtagggatgttgaagtcttgccaagttttcctggttcccttctcaaactttatcttcccatttctagccctgtctctctatcttacaggcatctacacctcagcaagtcagaaactaaacatcatctgtctctccctgtcttcagaaccccaaccctcataatctccttccagcttccttatttcccttaccaggactggcattttctgggcttggaatttcttggtcatcctctttttttttgttcctcgtgctgttgtcctcgtctcccaacccctaaagcctagtaggtccagtgtcaatgcattaaccacttctgttctgatttccaccacccaagtggaggccttcataacctctcagacgtcacggccatgatgccagttacattacgcctagttaatcttcattcagactggaaggacctgcccccagttgtttctttctgaatagattctactctccttcaacacttccaaagtctcctgccccaaagaggcttagttagtcctgtggctggatgtgactccaacttccttttttgtaccatcacatctttcatatctttctggcatctgccatacatcataagaggctttgaccactgtcctccactgaatagcccattacagctagcacctaatagttactcaggaaataaatacatgtttaacaggccaggtcgtagagattatttttctttctctgccttttcatgtgctgctttcagaacagagggctggattggatagattagtatgatctatcctggagattcatttcttgcattaagagcttattttgtgtgatattatttataatccctgactatgtcaattataaacttttaaattatgtcttatatttgaagttcttacctacatatcagaggaaaatataatgtttatttctaggtggtaaaacaatcttctggattcttttttctttacttgtaaattatcatttaacaagtctatattgaatgccgataattttctggaacaaaacagactacattcccttggtaaagccagacattaaacagatactttcaagcaacagcatgccatgctcagatttaagtttgaaaaatattctagctgcaatggatagcctagcaattttcaaagtttagagaagttattaatattagccctttgtagtactcctgataaatgaataacaccctggactttcaaatagtggcactgggaaaaaagtaagtagaattgagagatggtgaagagataaagtgagcaggacttaacaattgctggactatgggatgagggagcgtagagtcaaggatggctctcagtccctaggtctccaggtctaggaagatggtgttacctttcactaagggagagaactgtaagaactgctgtgagaggaccacaggagtccagttttagcgctgaatctcaggtgactgaaaagcatccaaataggaatgtcagcaaggtaatggaatatatagttctcagagaagtaacacactgtacttgagatgtacacaagttaaaggcaaacattgtatatgaaaagtgatcaaaactacatgcttcaagaaattaaaccttgaagaactcaacagttaatgtcatatatagaaaggcaagtcagttaagagtgtaaatagaaacgggtaaatacagaggagaaaaacagtaagcatggactgtcctagaattcagtggcagagcatactgcaagaaagctgatgtggtcaataatatcaaatgccgctgagatcacataagtacagaatcatgaccttaatggtttgacagtttggaagcaccctggcaacaagccatttcagtggaatggtagaaatggaaaccacgctgggttgagaagtgagtggatgtgaaaatatggggcctctgaatggaggtaacccttgaaaaattccactgtggagaagaaaggagagagagagggctggaatttggaatgaaaggagatatttgggattattttagtaagaaaacagaggtgtcatgacctcagtgtaaccctattagctgcaaaaaattcttcatgggcttgagatggagttagccatattcattattgaaaactatgttctgcacttatacattgttggttggagtgtaaattagttcaaccgctgtggaagacagggtgggtgtttcctcaaaaacctaaagacagaaataccatttgacccagcaatcccataactgggtatgtacccaaaggaatataaattgttctactataaaaacacatgcacacacatgttcactgcaacactatttacaatagcaaagacactggatcagtctaaatgcccatcattgatagaatggataaagaaaatgtggtagaggtacaccatggaatactatgcagccataaaaaagaatgagatcatgtccttttgcaggaacttggatacagctggaggccattatccttagcaaactaatgcagcaacagaaaaccaaataccacatgttctcatttataggtaggagttaaatgatgagaacacatggacatgtagaagggaacaaaatacactgggggctattggagggtgaagggtgaaaggaggaagaggatcaggaaaaataatgagtaccaggcttaatacatgggcgatgaaataatctgtatgacaagcctctctgacacagtttacctatgtaacaaacctgcacagttacccctgaactttaaaaaaaactatgttctatcaaaacctgcctctcatttatgtattaggaatcttgtgacaacggaacagttgaaaaattaaaataaaaattgcctgaaaatgc

SEQ ID NO: 297342 - DNA, 1914 bp, Homo sapiens
  misc_feature (64)..(64): n is a, c, g, or t
tatagaatttcaaaatgaaattatttgcccgacaagaaggcatcattagttagacttgtttccnctgtagcccgattgaaattctcagtgttaagtttaggacccaaacaccagctgggacgtaagagcaggaccgaatcaaccttgaataaactgtatatagaaaacaattgttagttgattaagtagacattggatgtttgttagaaaggaatgttagttgtaagtgacatgttaagatttatacaattgtcaaaaacttttaggaaagattccagaatgcttttgataaaatttatcgattatggattcacagtgtgataattaagtagggatgttgaagtcttgccaagttttcctggttcccttctcaaactttatcttcccatttctagccctgtctctctatcttacaggcatctacacctcagcaagtcagaaactaaacatcatctgtctctccctgtcttcagaaccccaaccctcataatctccttccagcttccttatttcccttaccaggactggcattttctgggcttggaatttcttggtcatcctctttttttttgttcctcgtgctgttgtcctcgtctcccaacccctaaagcctagtaggtccagtgtcaatgcattaaccacttctgttctgatttccaccacccaagtggaggccttcataacctctcagacgtcacggccatgatgccagttacattacgcctagttaatcttcattcagactggaaggacctgcccccagttgtttctttctgaatagattctactctccttcaacacttccaaagtctcctgccccaaagaggcttagttagtcctgtggctggatgtgactccaacttccttttttgtaccatcacatctttcatatctttctggcatctgccatacatcataagaggctttgaccactgtcctccactgaatagcccattacagctagcacctaatagttactcaggaaataaatacatgtttaacaggccaggtcgtagagattatttttctttctctgccttttcatgtgctgctttcagaacagagggctggattggatagattagtatgatctatcctggagattcatttcttgcattaagagcttattttgtgtgatattatttataatccctgactatgtcaattataaacttttaaattatgtcttatatttgaagttcttacctacatatcagaggaaaatataatgtttatttctaggtggtaaaacaatcttctggattcttttttctttacttgtaaattatcatttaacaagtctatattgaatgccgataattttctggaacaaaacagactacattcccttggtaaagccagacattaaacagatactttcaagcaacagcatgccatgctcagatttaagtttgaaaaatattctagctgcaatggatagcctagcaattttcaaagtttagagaagttattaatattagccctttgtagtactcctgataaatgaataacaccctggactttcaaatagtggcactgggaaaaaagtaagtagaattgagagatggtgaagagataaagtgagcaggacttaacaattgctggactatgggatgagggagcgtagagtcaaggatggctctcagtccctaggtctccaggtctaggaagatggtgttacctttcactaagggagagaactgtaagaactgctgtgagaggaccacaggagtccagttttagcgctgaatctcaggtgactgaaaagcatccaaataggaatgtcagcaaggtaatggaatatatagttctcagagaagtaacacactgtactttttttttttttttttttttttttggcatatatatatattttaattgattaaatcttactaatattctgtaagggataaa

SEQ ID NO: 297343 - DNA, 643 bp, Homo sapiens
tgtctgttcctgggtgggctctgagttgatataaggagagggaactgcaataactgaaatgttggagaagcagttagccgttctccgtaaagggtctgccaatcctggttttccatgacttagctatgactgccgatgaattctcaatgctcgtcacttccagggatcttcagatgttaagatgtttggggaaatcacaaagagaagagactgtgttgagacgcattcatccttaagcaaaagctgagagcctgcaaatgctggatgaaagctacaacctttctaaaaaccattaaatacagactttttcaaagagcatccaacaaagtagaatcctgctgtcaagaaaagccaaacttgggcaataggaaaaagtcacgggaaaaatagagtagctcatacaattacagaagtagaatgatttagggattttgagagagtataatccaattattctctaaactattcagggatctattttaatacttgatgatcctgattcttggaggaaagtctcatctgtgcttagttcttgttggtattttttgtttacttggcaacaataatagcaaattggtccttaagagagaacatagagctcttcagggccactgattaagaaggcatattttgaaaaaaaaaa

SEQ ID NO: 297344 - DNA, 434 bp, Homo sapiens
ccggccgcccatcgtctgagatgtggggagcgtctctgccccgccgccccgtctgggatgtgaggagcgcctctgcccggccgggaccccgtctgggagatgaggagcatctctgcccggccgccccgtctgagaagtgaggagaccctccgccctggcaactgccccgtctgagaagtgaggagcccctccgcctggcagccaccccgtctgggaagtctgcctgaacatttccaatattaaagaaaaggtcaaccaaaggtccagatctacaaaatcacctgcatttcatctgaaatgaaattcttgacaatggattcaaatatatacatgctatgatggcaatttttggaaactgccatcacattttcaacaaaattctaagattaatgacatttattaaagaaaaagtaaaagaaataaaaactttctat

SEQ ID NO: 297345 - DNA, 563 bp, Homo sapiens
agataagagtcaggaaagcaccaaatgccgagtgtgaactcattttgctctggaatatatatatgtcccttgcagtttggaatatctttgctctatgccctgctgagccatggggagcaactggtatcgctgcattcttccctagaggaacccaacagtgaccatacagcttggacagacatggtggttctgattgcctgggagatagcccaaatgcctacagcctctctggcagaacccctagctttccccagcaacctacttcccctgttctgtcaccacgtggacaaacaattggttcagcagctggaggccaggatggagtttgcctggatttactgatctgtttgttctggaatacgtgtatgtgggaagttgaatcatcagacactagctacatagactatgtttacagggatccagagagtctgaagacatttcttatgcctttatatattggagaacccttccccattttcatatcctttcttcaaaaatctaaatgatgtgcctaaaaataagacatggcataataaggtataattaaagagataatagaatga

SEQ ID NO: 297346 - DNA, 338 bp, Homo sapiens
ttctatagtgccctagagtttcggtttcttctaggaggcagtataacatagtacctaaggggacaagctttagattttaaaaagacctacgtttgaattctggctgtatcacttactagcaatataactttagggcaagttctttcacttctcacttctcttagtttgtttctttatctacaaactagggatgatggtattaacccctcatagttcttaagattaaatagggaaggggaaatgtgtaaagcactaagcattgcttggcacgtaccaaacatgcaaatgttacctctgaattgctacctgggggtgggggacaatggtagtagtaacgg

SEQ ID NO: 297347 - DNA, 1866 bp, Homo sapiens
gaaaggacagcaacagtcaggtggtttaccttccagaggctggcaatgctgtttcactggaggacacggctaagaaggaagtccaccagcctgccaagatgaattgccttgaaggagagggagagggatcctggcccagctgactttgaatctgagggagggccaagctgccactgccctggatgttggaacacctggtcttgctgcttcctcccaccacctcaaaaacacagaccttggactacctgtcgcccatccctttctggcctacatttcccagcaccagctctccagcacagcactttggacctcggctgccctcaccagacccaactctcttctgcagcctgctgacctcgtggccccctaggttcagtcatctgacccagctccaccctcggcaccaacgaatcttgcagcagcagcagcatagtcaaacaccaagagagccccacttcctgctcaccacactccttaggaagtgccagtggtgggtaagtctaaagggttgttcctcctggcttaaagtcccccagccaagaagccttggtctcagcagccagacccctatgctaacctcatgaccagaaaagagaaggactgggtgataaaagtgcagatggtgcagctgcagagtgcaaaaccccgcctggatgactactattaccaggaatattaccagaagctagagaagaagcaggcagacgaagagctacttggacgaagaaaccgggttgagtccctcaagctggtaacgccttacattccgaaggcagaggcttatgagtccgtggtccgaatcgagggttccctgggccaggtagctgtgtcgacatgcttcagccctcgccgagctattgatgcggtaccccatggaactcaagagcaggatatagaagctgcaagcagtcagaggcttcgggtattataccggattgagaagatgttccttcagttactagaaatagaggaaggctggaagtataggcctccaccgccctgcttttctgagcagcaaagcaaccaggttgagaagctcttccagaccttaaagacccaggagcagaacaacctggaagaggcagcagatggcttcctgcaggtgctctctgtgaggaaggggaaggccctggtggcccggctgctccccttcctgccccaggatcaggctgttaccattcttttggctatcacccaccatctgcccctcctggtccggagggatgtggctgatcaggccctacaaatgttattcaaacctctgggcaaatgtattagtcacttgaccctccacgaactcctccaaggacttcagggattaacgctgttgccacctggctcctcagagcggccagtcaccgtggtgcttcagaatcagtttggaatatctttgctctatgccctgctgagccatggggagcaactggtatcgctgcattcttccctagaggaacccaacagtgaccatacagcttggacagacatggtggttctgattgcctgggagatagcccaaatgcctacagcctctctggcagaacccctagctttccccagcaacctacttcccctgttctgtcaccacgtggacaaacaattggttcagcagctggaggccaggatggagtttgcctggatttactgatctgtttgttctggaatacgtgtatgtgggaagttgaatcatcagacactagctacatagactatgtttacagggatccagagagtctgaagacatttcttatgcctttatatattggagaacccttccccattttcatatcctttcttcaaaaatctaaatgatgtgcctaaaaataagacatggcataataaggtataattaaagagataatagaatga

SEQ ID NO: 297348 - DNA, 2063 bp, Homo sapiens
tggtgatgtcggttgggaagtacttctcttcctgcttctagcctgtgcctcatttctgtccctttgtgggacagctccctagagccgagctgggagggtgggtgtttatggcagtctgagaccccaggtctctctcctcaagaccatggccaaggaattctctaaccatcttgctgggaggattccatggctgttttagggtgccatgtcatccttactgactgaggatggtgcctcttggcctctttcttgtctcaggtttaccttccagaggctggcaatgctgtttcactggaggacacggctaagaaggaagtccaccagcctgccaagatgaattgccttgaagagagctctgcttagctcccctggagtcaaggcccctggtatgctgggaatgtcacttgcctccttgcattttctgtggcagaccttggactacctgtcgcccatccctttctggcctacatttcccagcaccagctctccagcacagcactttggacctcggctgccctcaccagacccaactctcttctgcagcctgctgacctcgtggccccctaggttcagtcatctgacccagctccaccctcggcaccaacgaatcttgcagcagcagcagcatagtcaaacaccaagagagccccacttcctgctcaccacactccttaggaagtgccagtggtgggtaagtctaaagggttgttcctcctggcttaaagtcccccagccaagaagccttggtctcagcagccagacccctatgctaacctcatgaccagaaaagagaaggactgggtgataaaagtgcagatggtgcagctgcagagtgcaaaaccccgcctggatgactactattaccaggaatattaccagaagctagagaagaagcaggcagacgaagagctacttggacgaagaaaccgggttgagtccctcaagctggtaacgccttacattccgaaggcagaggcttatgagtccgtggtccgaatcgagggttccctgggccaggtagctgtgtcgacatgcttcagccctcgccgagctattgatgcggtaccccatggaactcaagagcaggatatagaagctgcaagcagtcagaggcttcgggtattataccggattgagaagatgttccttcagttactagaaatagaggaaggctggaagtataggcctccaccgccctgcttttctgagcagcaaagcaaccaggttgagaagctcttccagaccttaaagacccaggagcagaacaacctggaagaggcagcagatggcttcctgcaggtgctctctgtgaggaaggggaaggccctggtggcccggctgctccccttcctgccccaggatcaggctgttaccattcttttggctatcacccaccatctgcccctcctggtccggagggatgtggctgatcaggccctacaaatgttattcaaacctctgggcaaatgtattagtcacttgaccctccacgaactcctccaaggacttcagggattaacgctgttgccacctggctcctcagagcggccagtcaccgtggtgcttcagaatcagtttggaatatctttgctctatgccctgctgagccatggggagcaactggtatcgctgcattcttccctagaggaacccaacagtgaccatacagcttggacagacatggtggttctgattgcctgggagatagcccaaatgcctacagcctctctggcagaacccctagctttccccagcaacctacttcccctgttctgtcaccacgtggacaaacaattggttcagcagctggaggccaggatggagtttgcctggatttactgatctgtttgttctggaatacgtgtatgtgggaagttgaatcatcagacactagctacatagactatgtttacagggatccagagagtctgaagacatttcttatgcctttatatattggagaacccttccccattttcatatcctttcttcaaaaatctaaatgatgtgcctaaaaataagacatggcataataaggtataattaaagagataatagaatga

SEQ ID NO: 297349 - DNA, 278 bp, Homo sapiens
caggggaaagtcagcattcattaagaccaggaggcaaagccagaattctgaggaaaatgaggatggagcaaattagaacatcaaataaggaatggagagattcaaacggaaaaaaatatcaggagactggaccgtggtaaaggcacaggtgacaacacaaaaagaaagagatgaccaagaggacataatatgaagtattattcaccagtcaaggcttcaaaacagaaatcctatataaatctgaggttcaccctagcctgatgaatggtacagcatgg

SEQ ID NO: 297350 - DNA, 2978 bp, Homo sapiens
  misc_feature (3)..(3): n is a, c, g, or t
  misc_feature (5)..(5): n is a, c, g, or t
ggnanaggcggaatctacaccttcccggccagcggtagcaactgcagaactgcaggagactatctttctagacaaggcagttgaggaggagggagcgcttgagggggactggcctggcgtgcactccgcacctcggggacattattgcgcgtggaacggctgcttttggaagactattgcccagaagaaaagatgtttggttttcacaagccaaagatgtaccgaagtatagagggctgctgtatttgcagagctaagtcctccagttctcgattcactgacagtaaacgctatgaaaaggacttccagagctgttttggattgcatgagactcgttcaggagacatctgcaatgcctgtgtcctgcttgtgaaaagatggaagaagttgccagcaggatcaaaaaaaaactggaatcatgtggtagatgcaagggctggacccagtctaaagactacattgaaaccaaagaaagtgaaaactctatctgggaacaggataaaaagcaaccagatcagtaaactgcagaaggaatttaaacgtcataattctgatgctcacagtaccacctcaagtgcctccccagctcaatctccttgttacagtaaccagtcagatgacggctcagatacagagatggcttctggttctaacagaacaccagttttttcctttttagatctcacttactggaaaagacagaagatatgttgtgggatcatctataaaggccgttttggggaagtcctcattgacacacatctcttcaagccttgctgcagcaataagaaagcagctgctgagaagccagaggagcaggggccagagcctctgcccatctccactcaggagtggtgactgaggtttttatgtagaaggggaacaaaaaaaaaaatatctgaattttgaaaaaccacaaagctacaaactgaccctcttttttttttgagacggagttttgctcttgttacccaggctggagtgcagtggcgtgatcttggctcactgcaacttccgtctcccgggttcaagtgattctcctgcctcagcctcccaagtagctgggtttataggtgcccgccaccagacccggctaattttttagttttagtagagacggggtttcaccacgttggccaggctggtcttaaatgaccctcttatttttaacttggatacctgctattctgccaaaagacaatttctagagtagttttgaatgggttgatttcccccactcccacaaactctgaagccagtgtctagcttactaaaaaaagagttgtatataatatttaagatgctgagtatttcataggaaagctgaatgctgctgtaaagtgctctttaagtcttttttttttttaatccccttctaatgaatgaaactaggggaatttcaggggacagagatgggatttgttgtatgataaactgtatgtagtttttagtctttctgttttgagaagcagtggttggggcatttttaagatggctggctactcttgttttccctcatgataataaatttgtcataactcagtaacatgaacttgcccctagaggtagttgttaataattttgaaatattaaggtcttgccaagcttctgatgattcacacctgtactactgattattaagcaggacagactgagctttctgttgcaaataccttggaggagaaagtaatttctaaatatacagagaggtaacttgactatatatgttgcatcctgtgcctcccttcatattaatatttgataaagattttaatttatgtaaaacttctaaagcagaatcaaagctcctcttggggaaatggcaagtctttaggataggcaagaccctgtatgaatagtaccaaagcattaccgcatggtagagaacacactcgattaaaaatgttaagctatctgaaaaataaaatgtgcaagtcttcaggatggcacaaaacaaaggttaatgcttcttggggcacatttcttagagggcttgctgagtgtgtaaatataatcgacttttgtttgtgttacatgacttctgtgacttcattgaaaatctgcacaattcagtttcagctctggattacttcagttgacctttgtgaaggtttttatctgtgtagaatgggtgtttgacttgttttagcctattaaatttttattttctttcactctgtattaaaagtaaaacttactaaaagaaaagaggtttgtgttcacattaaatggttttggtttggcttcttttagtcaggctttctgaacattgagatatcctgaacttagagctcttcaatcctaagattttcatgaaaagcctctcacttgaacccaaaccagagtactcttactgcctcttttctaaatgttcaggaaaagcattgccagttcagtcttttcaaaatgagggagaaacatttgcctgccttgtaataacaagactcagtgcttattttttaaactgcattttaaaaattggatagtataataacaataaggagtaagccaccttttataggcaccctgtagttttatagttcttaatctaaacattttatatttccttcttttggaaaaaacctacatgctacaagccaccatatgcacagactatacagtgagttgagttggctctcccacagtctttgaggtgaattacaaaagtccagccattatcatcctcctgagttatttgaaatgattttttttgtacattttggctgcagtattggtggtagaatatactataatatggatcatctctacttctgtatttatttatttattactagacctcaaccacagtcttctttttccccttccacctctctttgcctgtaggatgtactgtatgtagtcatgcactttgtattaatatattagaaatctacagatctgttttgtactttttatactgttggatacttataatcaaaacttttactagggtattgaataaatctagtcttactaga

SEQ ID NO: 297351 - DNA, 3120 bp, Homo sapiens
  misc_feature (3)..(3): n is a, c, g, or t
  misc_feature (5)..(5): n is a, c, g, or t
ggnanaggcggaatctacaccttcccggccagcggtagcaactgcagaactgcaggagactatctttctagacaaggcagttgaggaggagggagcgcttgagggggactggcctggcgtgcactccgcacctcggggacattattgcgcgtggaacggctgcttttggaaggcacaacttcctgaatggaccatgactcccaccaaagatccctgtctctgattcaccaaacagcttcaaccctgaaaccaggacgagaagttgacaacatctgagtggacagctaattgacctaagacttcagaccaggcctactattgcccagaagaaaagatgtttggttttcacaagccaaagatgtaccgaagtatagagggctgctgtatttgcagagctaagtcctccagttctcgattcactgacagtaaacgctatgaaaaggacttccagagctgttttggattgcatgagactcgttcaggagacatctgcaatgcctgtgtcctgcttgtgaaaagatggaagaagttgccagcaggatcaaaaaaaaactggaatcatgtggtagatgcaagggctggacccagtctaaagactacattgaaaccaaagaaagtgaaaactctatctgggaacaggataaaaagcaaccagatcagtaaactgcagaaggaatttaaacgtcataattctgatgctcacagtaccacctcaagtgcctccccagctcaatctccttgttacagtaaccagtcagatgacggctcagatacagagatggcttctggttctaacagaacaccagttttttcctttttagatctcacttactggaaaagacagaagatatgttgtgggatcatctataaaggccgttttggggaagtcctcattgacacacatctcttcaagccttgctgcagcaataagaaagcagctgctgagaagccagaggagcaggggccagagcctctgcccatctccactcaggagtggtgactgaggtttttatgtagaaggggaacaaaaaaaaaaatatctgaattttgaaaaaccacaaagctacaaactgaccctcttttttttttgagacggagttttgctcttgttacccaggctggagtgcagtggcgtgatcttggctcactgcaacttccgtctcccgggttcaagtgattctcctgcctcagcctcccaagtagctgggtttataggtgcccgccaccagacccggctaattttttagttttagtagagacggggtttcaccacgttggccaggctggtcttaaatgaccctcttatttttaacttggatacctgctattctgccaaaagacaatttctagagtagttttgaatgggttgatttcccccactcccacaaactctgaagccagtgtctagcttactaaaaaaagagttgtatataatatttaagatgctgagtatttcataggaaagctgaatgctgctgtaaagtgctctttaagtcttttttttttttaatccccttctaatgaatgaaactaggggaatttcaggggacagagatgggatttgttgtatgataaactgtatgtagtttttagtctttctgttttgagaagcagtggttggggcatttttaagatggctggctactcttgttttccctcatgataataaatttgtcataactcagtaacatgaacttgcccctagaggtagttgttaataattttgaaatattaaggtcttgccaagcttctgatgattcacacctgtactactgattattaagcaggacagactgagctttctgttgcaaataccttggaggagaaagtaatttctaaatatacagagaggtaacttgactatatatgttgcatcctgtgcctcccttcatattaatatttgataaagattttaatttatgtaaaacttctaaagcagaatcaaagctcctcttggggaaatggcaagtctttaggataggcaagaccctgtatgaatagtaccaaagcattaccgcatggtagagaacacactcgattaaaaatgttaagctatctgaaaaataaaatgtgcaagtcttcaggatggcacaaaacaaaggttaatgcttcttggggcacatttcttagagggcttgctgagtgtgtaaatataatcgacttttgtttgtgttacatgacttctgtgacttcattgaaaatctgcacaattcagtttcagctctggattacttcagttgacctttgtgaaggtttttatctgtgtagaatgggtgtttgacttgttttagcctattaaatttttattttctttcactctgtattaaaagtaaaacttactaaaagaaaagaggtttgtgttcacattaaatggttttggtttggcttcttttagtcaggctttctgaacattgagatatcctgaacttagagctcttcaatcctaagattttcatgaaaagcctctcacttgaacccaaaccagagtactcttactgcctcttttctaaatgttcaggaaaagcattgccagttcagtcttttcaaaatgagggagaaacatttgcctgccttgtaataacaagactcagtgcttattttttaaactgcattttaaaaattggatagtataataacaataaggagtaagccaccttttataggcaccctgtagttttatagttcttaatctaaacattttatatttccttcttttggaaaaaacctacatgctacaagccaccatatgcacagactatacagtgagttgagttggctctcccacagtctttgaggtgaattacaaaagtccagccattatcatcctcctgagttatttgaaatgattttttttgtacattttggctgcagtattggtggtagaatatactataatatggatcatctctacttctgtatttatttatttattactagacctcaaccacagtcttctttttccccttccacctctctttgcctgtaggatgtactgtatgtagtcatgcactttgtattaatatattagaaatctacagatctgttttgtactttttatactgttggatacttataatcaaaacttttactagggtattgaataaatctagtcttactaga

SEQ ID NO: 297352 - DNA, 2603 bp, Homo sapiens
  misc_feature (3)..(3): n is a, c, g, or t
  misc_feature (5)..(5): n is a, c, g, or t
ggnanaggcggaatctacaccttcccggccagcggtagcaactgcagaactgcaggagactatctttctagacaaggcagttgaggaggagggagcgcttgagggggactggcctggcgtgcactccgcacctcggggacattattgcgcgtggaacggctgcttttggaagattctgatgctcacagtaccacctcaagtgcctccccagctcaatctccttgttacagtaaccagtcagatgacggctcagatacagagatggcttctggttctaacagaacaccagttttttcctttttagatctcacttactggaaaagacagaagatatgttgtgggatcatctataaaggccgttttggggaagtcctcattgacacacatctcttcaagccttgctgcagcaataagaaagcagctgctgagaagccagaggagcaggggccagagcctctgcccatctccactcaggagtggtgactgaggtttttatgtagaaggggaacaaaaaaaaaaatatctgaattttgaaaaaccacaaagctacaaactgaccctcttttttttttgagacggagttttgctcttgttacccaggctggagtgcagtggcgtgatcttggctcactgcaacttccgtctcccgggttcaagtgattctcctgcctcagcctcccaagtagctgggtttataggtgcccgccaccagacccggctaattttttagttttagtagagacggggtttcaccacgttggccaggctggtcttaaatgaccctcttatttttaacttggatacctgctattctgccaaaagacaatttctagagtagttttgaatgggttgatttcccccactcccacaaactctgaagccagtgtctagcttactaaaaaaagagttgtatataatatttaagatgctgagtatttcataggaaagctgaatgctgctgtaaagtgctctttaagtcttttttttttttaatccccttctaatgaatgaaactaggggaatttcaggggacagagatgggatttgttgtatgataaactgtatgtagtttttagtctttctgttttgagaagcagtggttggggcatttttaagatggctggctactcttgttttccctcatgataataaatttgtcataactcagtaacatgaacttgcccctagaggtagttgttaataattttgaaatattaaggtcttgccaagcttctgatgattcacacctgtactactgattattaagcaggacagactgagctttctgttgcaaataccttggaggagaaagtaatttctaaatatacagagaggtaacttgactatatatgttgcatcctgtgcctcccttcatattaatatttgataaagattttaatttatgtaaaacttctaaagcagaatcaaagctcctcttggggaaatggcaagtctttaggataggcaagaccctgtatgaatagtaccaaagcattaccgcatggtagagaacacactcgattaaaaatgttaagctatctgaaaaataaaatgtgcaagtcttcaggatggcacaaaacaaaggttaatgcttcttggggcacatttcttagagggcttgctgagtgtgtaaatataatcgacttttgtttgtgttacatgacttctgtgacttcattgaaaatctgcacaattcagtttcagctctggattacttcagttgacctttgtgaaggtttttatctgtgtagaatgggtgtttgacttgttttagcctattaaatttttattttctttcactctgtattaaaagtaaaacttactaaaagaaaagaggtttgtgttcacattaaatggttttggtttggcttcttttagtcaggctttctgaacattgagatatcctgaacttagagctcttcaatcctaagattttcatgaaaagcctctcacttgaacccaaaccagagtactcttactgcctcttttctaaatgttcaggaaaagcattgccagttcagtcttttcaaaatgagggagaaacatttgcctgccttgtaataacaagactcagtgcttattttttaaactgcattttaaaaattggatagtataataacaataaggagtaagccaccttttataggcaccctgtagttttatagttcttaatctaaacattttatatttccttcttttggaaaaaacctacatgctacaagccaccatatgcacagactatacagtgagttgagttggctctcccacagtctttgaggtgaattacaaaagtccagccattatcatcctcctgagttatttgaaatgattttttttgtacattttggctgcagtattggtggtagaatatactataatatggatcatctctacttctgtatttatttatttattactagacctcaaccacagtcttctttttccccttccacctctctttgcctgtaggatgtactgtatgtagtcatgcactttgtattaatatattagaaatctacagatctgttttgtactttttatactgttggatacttataatcaaaacttttactagggtattgaataaatctagtcttactaga

SEQ ID NO: 297353 - DNA, 1801 bp, Homo sapiens
  misc_feature (3)..(3): n is a, c, g, or t
  misc_feature (5)..(5): n is a, c, g, or t
ggnanaggcggaatctacaccttcccggccagcggtagcaactgcagaactgcaggagactatctttctagacaaggcagttgaggaggagggagcgcttgagggggactggcctggcgtgcactccgcacctcggggacattattgcgcgtggaacggctgcttttggaaggcacaacttcctgaatggaccatgactcccaccaaagatccctgtctctgattcaccaaacagcttcaaccctgaaaccaggacgagaagttgacaacatctgagtggacagctaattgacctaagacttcagaccaggcctgtatgatctcctgtctaaacattcttagagtattatatttactttggggactattggccttgtctgctttgactcagattataggatatataacctggttaatgtttctgtacacatgatggccacctatgtatatacacttgacttttcagggtctctgctggggatggaaaaatagttcattagccaaactctcctaaagtgtggcagatggaggcagtctctcagattgctggatttgtcaccagcttccaagggccattcaagatcattacatgctacttgttgcaccagagattgatttttctgacactccaaatgttaccatatacttacatcagttccctccaaatgtcactttccaaattcaaattcagcttctaaagccaggccatattttcattctgtgcttagtaataagccctaagtctcacccttccccaccgcccccaggtctatctatcagtaagccaattagggacaaattctctaacttatctagaacacaaacttaattcctcatcttttccaggtccctgcacattcctggcctcccaccgttactgtcataactggcaactgaatgtccaaaggagaaaaagcaaagcagattgtgccagcacgtctcatttgttatatatcatgcttatgcaggcctttgtaaggcctgcagtaaaaccaatccatggctcactcatgttttaaacaacttacctattcaaactattatgaatgaatagttaagagatacattttggtatgtggcattgggccacacccaccaactcaaggatgggcacatagtgtaaatagctggcaaaatagctggcaaattgaagggcgcttttttttttttttttttgagggagagtcttgctctttcgcctaggttgtagtgtggtggtgtgatcatggctcactacagccttgacctccctgggctcaggtgatcctcctacctcagcctcccgagtagctgggacaaggagtctgtgcagtagctcacagtgcctgttgcacttacatcgacacctcgggtgaagtagagacttgcacagaaagaatttccaagcaagctaaatggttacaagaggcacaaactactgatcttctcaatgatctatttaattggcttcctatttcttccagtctgcagttcaacccctttttcatgggtaaagtgccgacgtcataacaaggtttgagggaggcacatctcacacgtgtgaatgcccagtcatcacacttacaaatgacaaaaggatctcaaaccttgatatagtctctatcctacttctcttactatcacttaaattactcatggtatttataaccaacttacgtaagtctattgctaaaaccagaattataggtcaggtgcagtggctcacactcaatcctagcacttgggaggccaaggtgggaagactgcttgaggctaggagtttgagaccagtgtgggcaatgcagtgaaaccctatcttgat

SEQ ID NO: 297354 - DNA, 718 bp, Homo sapiens
  misc_feature (3)..(3): n is a, c, g, or t
  misc_feature (5)..(5): n is a, c, g, or t
ggnanaggcggaatctacaccttcccggccagcggtagcaactgcagaactgcaggagactatctttctagacaaggcagttgaggaggagggagcgcttgagggggactggcctggcgtgcactccgcacctcggggacattattgcgcgtggaacggctgcttttggaagactattgcccagaagaaaagatgtttggttttcacaagccaaagatgtaccgaagtatagagggctgctgtatttgcagagctaagtcctccagttctcgattcactgacagtaaacgctatgaaaaggacttccagagctgttttggattgcatgagactcgttcaggagacatctgcaatgcctgtgtcctgcttgtgaaaagatggaagaagttgccagcaggatcattgaaaccaaagaaagtgaaaactctatctgggaacaggataaaaagcaaccagatcagtaaactgcagaaggaatttaaacgtcataattctgatgctcacagtaccacctcaagtgcctccccagctcaatctccttgttacagtaaccagtcagatgacggctcagatacagagatggcttctggttctaacagaacaccagttttttcctttttagatctcacttactggaaaaggggcgacgacatctgttggggcatccatacggcgatggggaggcccttgacacattctgggcttgtcgacatcctct

SEQ ID NO: 297355 - DNA, 374 bp, Homo sapiens
gctgctgagttgtttgagttccttatatattctggatattaaccctttgagaggtgtatagtttacctatattttctgccattctgtaggttgtctctttactctgtccatcatttcctttgctgtgcaaaagctgtttagtttgatgtaatcacatttgtccatttctgtatttatttatttattactagacctcaaccacagtcttctttttccccttccacctctctttgcctgtaggatgtactgtatgtagtcatgcactttgtattaatatattagaaatctacagatctgttttgtactttttatactgttggatacttataatcaaaacttttactagggtattgaataaatctagtcttactaga

SEQ ID NO: 297356 - DNA, 3461 bp, Homo sapiens
  misc_feature (3)..(3): n is a, c, g, or t
  misc_feature (5)..(5): n is a, c, g, or t
  misc_feature (3150)..(3150): n is a, c, g, or t
ggnanaggcggaatctacaccttcccggccagcggtagcaactgcagaactgcaggagactatctttctagacaaggcagttgaggaggagggagcgcttgagggggactggcctggcgtgcactccgcacctcggggacattattgcgcgtggaacggctgcttttggaagactattgcccagaagaaaagatgtttggttttcacaagccaaagatgtaccgaagtatagagggctgctgtatttgcagagctaagtcctccagttctcgattcactgacagtaaacgctatgaaaaggacttccagagctgttttggattgcatgagactcgttcaggagacatctgcaatgcctgtgtcctgcttgtgaaaagatggaagaagttgccagcaggatcaaaaaaaaactggaatcatgtggtagatgcaagggctggacccagtctaaagactacattgaaaccaaagaaagtgaaaactctatctgggaacaggataaaaagcaaccagatcagtaaactgcagaaggaatttaaacgtcataattctgatgctcacagtaccacctcaagtgcctccccagctcaatctccttgttacagtaaccagtcagatgacggctcagatacagagatggcttctggttctaacagaacaccagttttttcctttttagatctcacttactggaaaagacagaagatatgttgtgggatcatctataaaggccgttttggggaagtcctcattgacacacatctcttcaagccttgctgcagcaataagaaagcagctgctgagaagccagaggagcaggggccagagcctctgcccatctccactcaggagtggtgactgaggtttttatgtagaaggggaacaaaaaaaaaaatatctgaattttgaaaaaccacaaagctacaaactgaccctcttttttttttgagacggagttttgctcttgttacccaggctggagtgcagtggcgtgatcttggctcactgcaacttccgtctcccgggttcaagtgattctcctgcctcagcctcccaagtagctgggtttataggtgcccgccaccagacccggctaattttttagttttagtagagacggggtttcaccacgttggccaggctggtcttaaatgaccctcttatttttaacttggatacctgctattctgccaaaagacaatttctagagtagttttgaatgggttgatttcccccactcccacaaactctgaagccagtgtctagcttactaaaaaaagagttgtatataatatttaagatgctgagtatttcataggaaagctgaatgctgctgtaaagtgctctttaagtcttttttttttttaatccccttctaatgaatgaaactaggggaatttcaggggacagagatgggatttgttgtatgataaactgtatgtagtttttagtctttctgttttgagaagcagtggttggggcatttttaagatggctggctactcttgttttccctcatgataataaatttgtcataactcagtaacatgaacttgcccctagaggtagttgttaataattttgaaatattaaggtcttgccaagcttctgatgattcacacctgtactactgattattaagcaggacagactgagctttctgttgcaaataccttggaggagaaagtaatttctaaatatacagagaggtaacttgactatatatgttgcatcctgtgcctcccttcatattaatatttgataaagattttaatttatgtaaaacttctaaagcagaatcaaagctcctcttggggaaatggcaagtctttaggataggcaagaccctgtatgaatagtaccaaagcattaccgcatggtagagaacacactcgattaaaaatgttaagctatctgaaaaataaaatgtgcaagtcttcaggatggcacaaaacaaaggttaatgcttcttggggcacatttcttagagggcttgctgagtgtgtaaatataatcgacttttgtttgtgttacatgacttctgtgacttcattgaaaatctgcacaattcagtttcagctctggattacttcagttgacctttgtgaaggtttttatctgtgtagaatgggtgtttgacttgttttagcctattaaatttttattttctttcactctgtattaaaagtaaaacttactaaaagaaaagaggtttgtgttcacattaaatggttttggtttggcttcttttagtcaggctttctgaacattgagatatcctgaacttagagctcttcaatcctaagattttcatgaaaagcctctcacttgaacccaaaccagagtactcttactgcctcttttctaaatgttcaggaaaagcattgccagttcagtcttttcaaaatgagggagaaacatttgcctgccttgtaataacaagactcagtgcttattttttaaactgcattttaaaaattggatagtataataacaataaggagtaagccaccttttataggcaccctgtagttttatagttcttaatctaaacattttatatttccttcttttggaaaaaacctacatgctacaagccaccatatgcacagactatacagtgagttgagttggctctcccacagtctttgaggtgaattacaaaagtccagccattatcatcctcctgagttatttgaaatgattttttttgtacattttggctgcagtattggtggtagaatatactataatatggatcatctctacttctgtatttatttatttattactagacctcaaccacagtcttctttttccccttccacctctctttgcctgtaggatgtactgtatgtagtcatgcactttgtattaatatattagaaatctacagatctgttttgtactttttatactgttggatacttataatcaaaacttttactagggtattgaataaatctagtcttactagaaaataaaaggagctgttttgtggctttgtttgacaggtcttcagtaagaataatgtttttggctttcacatatactcagtttaagtgcttagtattaataacaagccatgaagggaataaattcctcttcactgagacatagactttggaataaaagacattttaactgaanaaaaagaaaaaaaaaaaaaaaaaaaaaaaaagaaaaaaaaaaacaagagaacagcacaacagaagaaaaacaaaaaacaaaaaagaaacaagaacaaagacaaaacagggaggcccacagacaagagaacatcgacacagccggacagggacccgcgccaaccacagaaccgccggcgcgataaacagaaaacaaacgaagctcgccacccaagagaaacaaccgtataagaaaccacaggcgccaggatagatacataaaaacacacgccaagacacagaaacaacacgacagccaaacaaaaggagaac

SEQ ID NO: 297357 - DNA, 3129 bp, Homo sapiens
tgaattacgtcagggcaaagccatgaggaggaacaagccccggcagcgcggcgtgcgggaggcgcggcctgcgggaggcgccgggccgggctggcgcggggcccgttgttccggcgcaggtgagggaggtggcggcgagcgacgcggttcacctcccgctgccctcgccctcgccccggcgagcggcccccgcaggaactttcctcccgacgcgagatgtcttatttaccaacaaatccaccagggagcattcttacttgctggctcggcgtctctctcggcagtcaccggagtgcccgagggggaagcacgatttacggaagactattgcccagaagaaaagatgtttggttttcacaagccaaagatgtaccgaagtatagagggctgctgtatttgcagagctaagtcctccagttctcgattcactgacagtaaacgctatgaaaaggacttccagagctgttttggattgcatgagactcgttcaggagacatctgcaatgcctgtgtcctgcttgtgaaaagatggaagaagttgccagcaggatcaaaaaaaaactggaatcatgtggtagatgcaagggctggacccagtctaaagactacattgaaaccaaagaaagtgaaaactctatctgggaacaggataaaaagcaaccagatcagtaaactgcagaaggaatttaaacgtcataattctgatgctcacagtaccacctcaagtgcctccccagctcaatctccttgttacagtaaccagtcagatgacggctcagatacagagatggcttctggttctaacagaacaccagttttttcctttttagatctcacttactggaaaagacagaagatatgttgtgggatcatctataaaggccgttttggggaagtcctcattgacacacatctcttcaagccttgctgcagcaataagaaagcagctgctgagaagccagaggagcaggggccagagcctctgcccatctccactcaggagtggtgactgaggtttttatgtagaaggggaacaaaaaaaaaaatatctgaattttgaaaaaccacaaagctacaaactgaccctcttttttttttgagacggagttttgctcttgttacccaggctggagtgcagtggcgtgatcttggctcactgcaacttccgtctcccgggttcaagtgattctcctgcctcagcctcccaagtagctgggtttataggtgcccgccaccagacccggctaattttttagttttagtagagacggggtttcaccacgttggccaggctggtcttaaatgaccctcttatttttaacttggatacctgctattctgccaaaagacaatttctagagtagttttgaatgggttgatttcccccactcccacaaactctgaagccagtgtctagcttactaaaaaaagagttgtatataatatttaagatgctgagtatttcataggaaagctgaatgctgctgtaaagtgctctttaagtcttttttttttttaatccccttctaatgaatgaaactaggggaatttcaggggacagagatgggatttgttgtatgataaactgtatgtagtttttagtctttctgttttgagaagcagtggttggggcatttttaagatggctggctactcttgttttccctcatgataataaatttgtcataactcagtaacatgaacttgcccctagaggtagttgttaataattttgaaatattaaggtcttgccaagcttctgatgattcacacctgtactactgattattaagcaggacagactgagctttctgttgcaaataccttggaggagaaagtaatttctaaatatacagagaggtaacttgactatatatgttgcatcctgtgcctcccttcatattaatatttgataaagattttaatttatgtaaaacttctaaagcagaatcaaagctcctcttggggaaatggcaagtctttaggataggcaagaccctgtatgaatagtaccaaagcattaccgcatggtagagaacacactcgattaaaaatgttaagctatctgaaaaataaaatgtgcaagtcttcaggatggcacaaaacaaaggttaatgcttcttggggcacatttcttagagggcttgctgagtgtgtaaatataatcgacttttgtttgtgttacatgacttctgtgacttcattgaaaatctgcacaattcagtttcagctctggattacttcagttgacctttgtgaaggtttttatctgtgtagaatgggtgtttgacttgttttagcctattaaatttttattttctttcactctgtattaaaagtaaaacttactaaaagaaaagaggtttgtgttcacattaaatggttttggtttggcttcttttagtcaggctttctgaacattgagatatcctgaacttagagctcttcaatcctaagattttcatgaaaagcctctcacttgaacccaaaccagagtactcttactgcctcttttctaaatgttcaggaaaagcattgccagttcagtcttttcaaaatgagggagaaacatttgcctgccttgtaataacaagactcagtgcttattttttaaactgcattttaaaaattggatagtataataacaataaggagtaagccaccttttataggcaccctgtagttttatagttcttaatctaaacattttatatttccttcttttggaaaaaacctacatgctacaagccaccatatgcacagactatacagtgagttgagttggctctcccacagtctttgaggtgaattacaaaagtccagccattatcatcctcctgagttatttgaaatgattttttttgtacattttggctgcagtattggtggtagaatatactataatatggatcatctctacttctgtatttatttatttattactagacctcaaccacagtcttctttttccccttccacctctctttgcctgtaggatgtactgtatgtagtcatgcactttgtattaatatattagaaatctacagatctgttttgtactttttatactgttggatacttataatcaaaacttttactagggtattgaataaatctagtcttactaga

SEQ ID NO: 297358 - DNA, 3271 bp, Homo sapiens
tgaattacgtcagggcaaagccatgaggaggaacaagccccggcagcgcggcgtgcgggaggcgcggcctgcgggaggcgccgggccgggctggcgcggggcccgttgttccggcgcaggtgagggaggtggcggcgagcgacgcggttcacctcccgctgccctcgccctcgccccggcgagcggcccccgcaggaactttcctcccgacgcgagatgtcttatttaccaacaaatccaccagggagcattcttacttgctggctcggcgtctctctcggcagtcaccggagtgcccgagggggaagcacgatttacggaaggcacaacttcctgaatggaccatgactcccaccaaagatccctgtctctgattcaccaaacagcttcaaccctgaaaccaggacgagaagttgacaacatctgagtggacagctaattgacctaagacttcagaccaggcctactattgcccagaagaaaagatgtttggttttcacaagccaaagatgtaccgaagtatagagggctgctgtatttgcagagctaagtcctccagttctcgattcactgacagtaaacgctatgaaaaggacttccagagctgttttggattgcatgagactcgttcaggagacatctgcaatgcctgtgtcctgcttgtgaaaagatggaagaagttgccagcaggatcaaaaaaaaactggaatcatgtggtagatgcaagggctggacccagtctaaagactacattgaaaccaaagaaagtgaaaactctatctgggaacaggataaaaagcaaccagatcagtaaactgcagaaggaatttaaacgtcataattctgatgctcacagtaccacctcaagtgcctccccagctcaatctccttgttacagtaaccagtcagatgacggctcagatacagagatggcttctggttctaacagaacaccagttttttcctttttagatctcacttactggaaaagacagaagatatgttgtgggatcatctataaaggccgttttggggaagtcctcattgacacacatctcttcaagccttgctgcagcaataagaaagcagctgctgagaagccagaggagcaggggccagagcctctgcccatctccactcaggagtggtgactgaggtttttatgtagaaggggaacaaaaaaaaaaatatctgaattttgaaaaaccacaaagctacaaactgaccctcttttttttttgagacggagttttgctcttgttacccaggctggagtgcagtggcgtgatcttggctcactgcaacttccgtctcccgggttcaagtgattctcctgcctcagcctcccaagtagctgggtttataggtgcccgccaccagacccggctaattttttagttttagtagagacggggtttcaccacgttggccaggctggtcttaaatgaccctcttatttttaacttggatacctgctattctgccaaaagacaatttctagagtagttttgaatgggttgatttcccccactcccacaaactctgaagccagtgtctagcttactaaaaaaagagttgtatataatatttaagatgctgagtatttcataggaaagctgaatgctgctgtaaagtgctctttaagtcttttttttttttaatccccttctaatgaatgaaactaggggaatttcaggggacagagatgggatttgttgtatgataaactgtatgtagtttttagtctttctgttttgagaagcagtggttggggcatttttaagatggctggctactcttgttttccctcatgataataaatttgtcataactcagtaacatgaacttgcccctagaggtagttgttaataattttgaaatattaaggtcttgccaagcttctgatgattcacacctgtactactgattattaagcaggacagactgagctttctgttgcaaataccttggaggagaaagtaatttctaaatatacagagaggtaacttgactatatatgttgcatcctgtgcctcccttcatattaatatttgataaagattttaatttatgtaaaacttctaaagcagaatcaaagctcctcttggggaaatggcaagtctttaggataggcaagaccctgtatgaatagtaccaaagcattaccgcatggtagagaacacactcgattaaaaatgttaagctatctgaaaaataaaatgtgcaagtcttcaggatggcacaaaacaaaggttaatgcttcttggggcacatttcttagagggcttgctgagtgtgtaaatataatcgacttttgtttgtgttacatgacttctgtgacttcattgaaaatctgcacaattcagtttcagctctggattacttcagttgacctttgtgaaggtttttatctgtgtagaatgggtgtttgacttgttttagcctattaaatttttattttctttcactctgtattaaaagtaaaacttactaaaagaaaagaggtttgtgttcacattaaatggttttggtttggcttcttttagtcaggctttctgaacattgagatatcctgaacttagagctcttcaatcctaagattttcatgaaaagcctctcacttgaacccaaaccagagtactcttactgcctcttttctaaatgttcaggaaaagcattgccagttcagtcttttcaaaatgagggagaaacatttgcctgccttgtaataacaagactcagtgcttattttttaaactgcattttaaaaattggatagtataataacaataaggagtaagccaccttttataggcaccctgtagttttatagttcttaatctaaacattttatatttccttcttttggaaaaaacctacatgctacaagccaccatatgcacagactatacagtgagttgagttggctctcccacagtctttgaggtgaattacaaaagtccagccattatcatcctcctgagttatttgaaatgattttttttgtacattttggctgcagtattggtggtagaatatactataatatggatcatctctacttctgtatttatttatttattactagacctcaaccacagtcttctttttccccttccacctctctttgcctgtaggatgtactgtatgtagtcatgcactttgtattaatatattagaaatctacagatctgttttgtactttttatactgttggatacttataatcaaaacttttactagggtattgaataaatctagtcttactaga

SEQ ID NO: 297359 - DNA, 2921 bp, Homo sapiens
  misc_feature (3)..(3): n is a, c, g, or t
  misc_feature (5)..(5): n is a, c, g, or t
ggnanaggcggaatctacaccttcccggccagcggtagcaactgcagaactgcaggagactatctttctagacaaggcagttgaggaggagggagcgcttgagggggactggcctggcgtgcactccgcacctcggggacattattgcgcgtggaacggctgcttttggaagactattgcccagaagaaaagatgtttggttttcacaagccaaagatgtaccgaagtatagagggctgctgtatttgcagagctaagtcctccagttctcgattcactgacagtaaacgctatgaaaaggacttccagagctgttttggattgcatgagactcgttcaggagacatctgcaatgcctgtgtcctgcttgtgaaaagatggaagaagttgccagcaggatcattgaaaccaaagaaagtgaaaactctatctgggaacaggataaaaagcaaccagatcagtaaactgcagaaggaatttaaacgtcataattctgatgctcacagtaccacctcaagtgcctccccagctcaatctccttgttacagtaaccagtcagatgacggctcagatacagagatggcttctggttctaacagaacaccagttttttcctttttagatctcacttactggaaaagacagaagatatgttgtgggatcatctataaaggccgttttggggaagtcctcattgacacacatctcttcaagccttgctgcagcaataagaaagcagctgctgagaagccagaggagcaggggccagagcctctgcccatctccactcaggagtggtgactgaggtttttatgtagaaggggaacaaaaaaaaaaatatctgaattttgaaaaaccacaaagctacaaactgaccctcttttttttttgagacggagttttgctcttgttacccaggctggagtgcagtggcgtgatcttggctcactgcaacttccgtctcccgggttcaagtgattctcctgcctcagcctcccaagtagctgggtttataggtgcccgccaccagacccggctaattttttagttttagtagagacggggtttcaccacgttggccaggctggtcttaaatgaccctcttatttttaacttggatacctgctattctgccaaaagacaatttctagagtagttttgaatgggttgatttcccccactcccacaaactctgaagccagtgtctagcttactaaaaaaagagttgtatataatatttaagatgctgagtatttcataggaaagctgaatgctgctgtaaagtgctctttaagtcttttttttttttaatccccttctaatgaatgaaactaggggaatttcaggggacagagatgggatttgttgtatgataaactgtatgtagtttttagtctttctgttttgagaagcagtggttggggcatttttaagatggctggctactcttgttttccctcatgataataaatttgtcataactcagtaacatgaacttgcccctagaggtagttgttaataattttgaaatattaaggtcttgccaagcttctgatgattcacacctgtactactgattattaagcaggacagactgagctttctgttgcaaataccttggaggagaaagtaatttctaaatatacagagaggtaacttgactatatatgttgcatcctgtgcctcccttcatattaatatttgataaagattttaatttatgtaaaacttctaaagcagaatcaaagctcctcttggggaaatggcaagtctttaggataggcaagaccctgtatgaatagtaccaaagcattaccgcatggtagagaacacactcgattaaaaatgttaagctatctgaaaaataaaatgtgcaagtcttcaggatggcacaaaacaaaggttaatgcttcttggggcacatttcttagagggcttgctgagtgtgtaaatataatcgacttttgtttgtgttacatgacttctgtgacttcattgaaaatctgcacaattcagtttcagctctggattacttcagttgacctttgtgaaggtttttatctgtgtagaatgggtgtttgacttgttttagcctattaaatttttattttctttcactctgtattaaaagtaaaacttactaaaagaaaagaggtttgtgttcacattaaatggttttggtttggcttcttttagtcaggctttctgaacattgagatatcctgaacttagagctcttcaatcctaagattttcatgaaaagcctctcacttgaacccaaaccagagtactcttactgcctcttttctaaatgttcaggaaaagcattgccagttcagtcttttcaaaatgagggagaaacatttgcctgccttgtaataacaagactcagtgcttattttttaaactgcattttaaaaattggatagtataataacaataaggagtaagccaccttttataggcaccctgtagttttatagttcttaatctaaacattttatatttccttcttttggaaaaaacctacatgctacaagccaccatatgcacagactatacagtgagttgagttggctctcccacagtctttgaggtgaattacaaaagtccagccattatcatcctcctgagttatttgaaatgattttttttgtacattttggctgcagtattggtggtagaatatactataatatggatcatctctacttctgtatttatttatttattactagacctcaaccacagtcttctttttccccttccacctctctttgcctgtaggatgtactgtatgtagtcatgcactttgtattaatatattagaaatctacagatctgttttgtactttttatactgttggatacttataatcaaaacttttactagggtattgaataaatctagtcttactaga

SEQ ID NO: 297360 - DNA, 2297 bp, Homo sapiens
  misc_feature (3)..(3): n is a, c, g, or t
  misc_feature (5)..(5): n is a, c, g, or t
ggnanaggcggaatctacaccttcccggccagcggtagcaactgcagaactgcaggagactatctttctagacaaggcagttgaggaggagggagcgcttgagggggactggcctggcgtgcactccgcacctcggggacattattgcgcgtggaacggctgcttttggaagactattgcccagaagaaaagatgtttggttttcacaagccaaagatgtaccgaagtatagagggctgctgtatttgcagagctaagtcctccagttctcgattcactgacagtaaacgctatgaaaaggacttccagagctgttttggattgcatgagactcgttcaggagacatctgcaatgcctgtgtcctgcttgtgaaaagatggaagaagttgccagcaggatcaaaaaaaaactggaatcatgtggtagatgcaagggctggacccagtctaaagactacattgaaaccaaagaaagtgaaaactctatctgggaacaggataaaaagcaaccagatcagtaaactgcagaaggaatttaaacgtcataattctgatgctcacagtaccacctcaagtgcctccccagctcaatctccttgttacagtaaccagtcagatgacggctcagatacagagatggcttctggttctaacagaacaccagttttttcctttttagatctcacttactggaaaagacagaagatatgttgtgggatcatctataaaggccgttttggggaagtcctcattgacacacatctcttcaagccttgctgcagcaataagaaagcagctgctgagaagccagaggagcaggggccagagcctctgcccatctccactcaggagtggtgactgaggtttttatgtagaaggggaacaaaaaaaaaaatatctgaattttgaaaaaccacaaagctacaaactgaccctcttttttttttgagacggagttttgctcttgttacccaggctggagtgcagtggcgtgatcttggctcactgcaacttccgtctcccgggttcaagtgattctcctgcctcagcctcccaagtagctgggtttataggtgcccgccaccagacccggctaattttttagttttagtagagacggggtttcaccacgttggccaggctggtcttaaatgaccctcttatttttaacttggatacctgctattctgccaaaagacaatttctagagtagttttgaatgggttgatttcccccactcccacaaactctgaagccagtgtctagcttactaaaaaaagagttgtatataatatttaagatgctgagtatttcataggaaagctgaatgctgctgtaaagtgctctttaagtcttttttttttttaatccccttctaatgaatgaaactaggggaatttcaggggacagagatgggatttgttgtatgataaactgtatgtagtttttagtctttctgttttgagaagcagtggttggggcatttttaagatggctggctactcttgttttccctcatgataataaatttgtcataactcagtaacatgaacttgcccctagaggtagttgttaataattttgaaatattaaggtcttgccaagcttctgatgattcacacctgtactactgattattaagcaggacagactgagctttctgttgcaaataccttggaggagaaagtaatttctaaatatacagagaggtaacttgactatatatgttgcatcctgtgcctcccttcatattaataacaagactcagtgcttattttttaaactgcattttaaaaattggatagtataataacaataaggagtaagccaccttttataggcaccctgtagttttatagttcttaatctaaacattttatatttccttcttttggaaaaaacctacatgctacaagccaccatatgcacagactatacagtgagttgagttggctctcccacagtctttgaggtgaattacaaaagtccagccattatcatcctcctgagttatttgaaatgattttttttgtacattttggctgcagtattggtggtagaatatactataatatggatcatctctacttctgtatttatttatttattactagacctcaaccacagtcttctttttccccttccacctctctttgcctgtaggatgtactgtatgtagtcatgcactttgtattaatatattagaaatctacagatctgttttgtactttttatactgttggatacttataatcaaaacttttactagggtattgaataaatctagtcttactaga

SEQ ID NO: 297361 - DNA, 3082 bp, Homo sapiens
tgaattacgtcagggcaaagccatgaggaggaacaagccccggcagcgcggcgtgcgggaggcgcggcctgcgggaggcgccgggccgggctggcgcggggcccgttgttccggcgcaggtgagggaggtggcggcgagcgacgcggttcacctcccgctgccctcgccctcgccccggcgagcggcccccgcaggaactttcctcccgacgcgagatgtcttatttaccaacaaatccaccagggagcattcttacttgctggctcggcgtctctctcggcagtcaccggagtgcccgagggggaagcacgatttacggaagactattgcccagaagaaaagatgtttggttttcacaagccaaagatgtaccgaagtatagagggctgctgtatttgcagagctaagtcctccagttctcgattcactgacagtaaacgctatgaaaaggacttccagagctgttttggattgcatgagactcgttcaggagacatctgcaatgcctgtgtcctgcttgtgaaaagatggaagaagttgccagcaggatcaaaaaaaaactggaatcatgtggtagatgcaagggctggacccagtctaaagactacattgaaaccaaagaaagtgaaaactctatctgggaacaggataaaaagcaaccagatcagtaaactgcagaaggaatttaaacgtcataattctgatgctcacagtaccacctcaagtgcctccccagctcaatctccttgttacagtaaccagtcagatgacggctcagatacagagatggcttctggttctaacagaacaccagttttttcctttttagatctcacttactggaaaagtcctcattgacacacatctcttcaagccttgctgcagcaataagaaagcagctgctgagaagccagaggagcaggggccagagcctctgcccatctccactcaggagtggtgactgaggtttttatgtagaaggggaacaaaaaaaaaaatatctgaattttgaaaaaccacaaagctacaaactgaccctcttttttttttgagacggagttttgctcttgttacccaggctggagtgcagtggcgtgatcttggctcactgcaacttccgtctcccgggttcaagtgattctcctgcctcagcctcccaagtagctgggtttataggtgcccgccaccagacccggctaattttttagttttagtagagacggggtttcaccacgttggccaggctggtcttaaatgaccctcttatttttaacttggatacctgctattctgccaaaagacaatttctagagtagttttgaatgggttgatttcccccactcccacaaactctgaagccagtgtctagcttactaaaaaaagagttgtatataatatttaagatgctgagtatttcataggaaagctgaatgctgctgtaaagtgctctttaagtcttttttttttttaatccccttctaatgaatgaaactaggggaatttcaggggacagagatgggatttgttgtatgataaactgtatgtagtttttagtctttctgttttgagaagcagtggttggggcatttttaagatggctggctactcttgttttccctcatgataataaatttgtcataactcagtaacatgaacttgcccctagaggtagttgttaataattttgaaatattaaggtcttgccaagcttctgatgattcacacctgtactactgattattaagcaggacagactgagctttctgttgcaaataccttggaggagaaagtaatttctaaatatacagagaggtaacttgactatatatgttgcatcctgtgcctcccttcatattaatatttgataaagattttaatttatgtaaaacttctaaagcagaatcaaagctcctcttggggaaatggcaagtctttaggataggcaagaccctgtatgaatagtaccaaagcattaccgcatggtagagaacacactcgattaaaaatgttaagctatctgaaaaataaaatgtgcaagtcttcaggatggcacaaaacaaaggttaatgcttcttggggcacatttcttagagggcttgctgagtgtgtaaatataatcgacttttgtttgtgttacatgacttctgtgacttcattgaaaatctgcacaattcagtttcagctctggattacttcagttgacctttgtgaaggtttttatctgtgtagaatgggtgtttgacttgttttagcctattaaatttttattttctttcactctgtattaaaagtaaaacttactaaaagaaaagaggtttgtgttcacattaaatggttttggtttggcttcttttagtcaggctttctgaacattgagatatcctgaacttagagctcttcaatcctaagattttcatgaaaagcctctcacttgaacccaaaccagagtactcttactgcctcttttctaaatgttcaggaaaagcattgccagttcagtcttttcaaaatgagggagaaacatttgcctgccttgtaataacaagactcagtgcttattttttaaactgcattttaaaaattggatagtataataacaataaggagtaagccaccttttataggcaccctgtagttttatagttcttaatctaaacattttatatttccttcttttggaaaaaacctacatgctacaagccaccatatgcacagactatacagtgagttgagttggctctcccacagtctttgaggtgaattacaaaagtccagccattatcatcctcctgagttatttgaaatgattttttttgtacattttggctgcagtattggtggtagaatatactataatatggatcatctctacttctgtatttatttatttattactagacctcaaccacagtcttctttttccccttccacctctctttgcctgtaggatgtactgtatgtagtcatgcactttgtattaatatattagaaatctacagatctgttttgtactttttatactgttggatacttataatcaaaacttttactagggtattgaataaatctagtcttactaga

SEQ ID NO: 297362 - DNA, 2083 bp, Homo sapiens
aagcgattctcctgcctcagcctcccgagtagctgggattacaggtgcatgccaccacacccagctaatttttgtatttttagtagagacagagtttcgccatgttggccaggctggtcttgaactcctgacctcagtgattctcctgcctcagcctcccaagtagctgggtttataggtgcccgccaccagacccggctaattttttagttttagtagagacggggtttcaccacgttggccaggctggtcttaaatgaccctcttatttttaacttggatacctgctattctgccaaaagacaatttctagagtagttttgaatgggttgatttcccccactcccacaaactctgaagccagtgtctagcttactaaaaaaagagttgtatataatatttaagatgctgagtatttcataggaaagctgaatgctgctgtaaagtgctctttaagtcttttttttttttaatccccttctaatgaatgaaactaggggaatttcaggggacagagatgggatttgttgtatgataaactgtatgtagtttttagtctttctgttttgagaagcagtggttggggcatttttaagatggctggctactcttgttttccctcatgataataaatttgtcataactcagtaacatgaacttgcccctagaggtagttgttaataattttgaaatattaaggtcttgccaagcttctgatgattcacacctgtactactgattattaagcaggacagactgagctttctgttgcaaataccttggaggagaaagtaatttctaaatatacagagaggtaacttgactatatatgttgcatcctgtgcctcccttcatattaatatttgataaagattttaatttatgtaaaacttctaaagcagaatcaaagctcctcttggggaaatggcaagtctttaggataggcaagaccctgtatgaatagtaccaaagcattaccgcatggtagagaacacactcgattaaaaatgttaagctatctgaaaaataaaatgtgcaagtcttcaggatggcacaaaacaaaggttaatgcttcttggggcacatttcttagagggcttgctgagtgtgtaaatataatcgacttttgtttgtgttacatgacttctgtgacttcattgaaaatctgcacaattcagtttcagctctggattacttcagttgacctttgtgaaggtttttatctgtgtagaatgggtgtttgacttgttttagcctattaaatttttattttctttcactctgtattaaaagtaaaacttactaaaagaaaagaggtttgtgttcacattaaatggttttggtttggcttcttttagtcaggctttctgaacattgagatatcctgaacttagagctcttcaatcctaagattttcatgaaaagcctctcacttgaacccaaaccagagtactcttactgcctcttttctaaatgttcaggaaaagcattgccagttcagtcttttcaaaatgagggagaaacatttgcctgccttgtaataacaagactcagtgcttattttttaaactgcattttaaaaattggatagtataataacaataaggagtaagccaccttttataggcaccctgtagttttatagttcttaatctaaacattttatatttccttcttttggaaaaaacctacatgctacaagccaccatatgcacagactatacagtgagttgagttggctctcccacagtctttgaggtgaattacaaaagtccagccattatcatcctcctgagttatttgaaatgattttttttgtacattttggctgcagtattggtggtagaatatactataatatggatcatctctacttctgtatttatttatttattactagacctcaaccacagtcttctttttccccttccacctctctttgcctgtaggatgtactgtatgtagtcatgcactttgtattaatatattagaaatctacagatctgttttgtactttttatactgttggatacttataatcaaaacttttactagggtattgaataaatctagtcttactaga

SEQ ID NO: 297363 - DNA, 1375 bp, Homo sapiens
taggactataacacttgtgtaaaaagcagctggtacgggtcggaattcccgggctttctgttgcaaataccttggaggagaaagtaatttctaaatatacagagaggtaacttgactatatatgttgcatcctgtgcctcccttcatattaatatttgataaagattttaatttatgtaaaacttctaaagcagaatcaaagctcctcttggggaaatggcaagtctttaggataggcaagaccctgtatgaatagtaccaaagcattaccgcatggtagagaacacactcgattaaaaatgttaagctatctgaaaaataaaatgtgcaagtcttcaggatggcacaaaacaaaggttaatgcttcttggggcacatttcttagagggcttgctgagtgtgtaaatataatcgacttttgtttgtgttacatgacttctgtgacttcattgaaaatctgcacaattcagtttcagctctggattacttcagttgacctttgtgaaggtttttatctgtgtagaatgggtgtttgacttgttttagcctattaaatttttattttctttcactctgtattaaaagtaaaacttactaaaagaaaagaggtttgtgttcacattaaatggttttggtttggcttcttttagtcaggctttctgaacattgagatatcctgaacttagagctcttcaatcctaagattttcatgaaaagcctctcacttgaacccaaaccagagtactcttactgcctcttttctaaatgttcaggaaaagcattgccagttcagtcttttcaaaatgagggagaaacatttgcctgccttgtaataacaagactcagtgcttattttttaaactgcattttaaaaattggatagtataataacaataaggagtaagccaccttttataggcaccctgtagttttatagttcttaatctaaacattttatatttccttcttttggaaaaaacctacatgctacaagccaccatatgcacagactatacagtgagttgagttggctctcccacagtctttgaggtgaattacaaaagtccagccattatcatcctcctgagttatttgaaatgattttttttgtacattttggctgcagtattggtggtagaatatactataatatggatcatctctacttctgtatttatttatttattactagacctcaaccacagtcttctttttccccttccacctctctttgcctgtaggatgtactgtatgtagtcatgcactttgtattaatatattagaaatctacagatctgttttgtactttttatactgttggatacttataatcaaaacttttactagggtattgaataaatctagtcttactaga

SEQ ID NO: 297364 - DNA, 1435 bp, Homo sapiens
agcgggggggcgccccctggcggcgcagggaccgcccccaacctcgcgccgccgccgcccgcctcagcccaacatggcgatgcacaacaaggcggcgccgccgcagatcccggacacccggcgggagctggcggagctcgtgaagcggaagcaggagctggcggaaacattggcaaatttggagcgacagatctatgcttttgagggaagctacctggaagacactcagatgtatggcaatattattcgtggctgggatcggtatctgaccaaccaaaaaaactccaatagcaaaaatgatcgaaggaaccggaagtttaaggaagctgagcggctcttcagtaaatcctcggttacctcagcagctgcagtaagtgcattggcaggagttcaggaccagctcattgaaaagagggagccaggaagtgggacggaaagtgacacttctccagacttccacaatcaggaaaatgagcccagccaggaggaccctgaggatctggatggatctgtgcagggagtgaaacctcagaaggctgcttcttctacttcctcagggagtcaccacagcagccataaaaagcgaaagaataaaaaccggcacaggattgatctgaagttaaacaaaaaaccacgagctgactattagaagacacattagtgcagaagcttccaggctgtagagccctgcttcccttctctgacctcacaaagataaacatccttcacctgagttcgtggccatccacctctgctctcccagacccagtgcctgtgactttgagtagtttgttctaaatgtggtgacaaacaagtcatttctgtaagacattgggtcttactttatgtcatttttagtaacagaactgcaggaagatcaagacaatgttgtaatcccggcaagttgctaactgtgcgtttctcccttcttagaatgaatgtctcccccaaaactggctggcaccagcttcatctgtgatacccttcaagaaatgttctctggttttgttttatgctgaaagtagaacacaagtcacatttcagatggaggctgtaaatatctggcattttcttatattgttttatgttttcttgtttttctcttgttgtttttatcttattttctttggggtttttttgtaatgcctttgtacagctcatactttcctgctgacatatctgatcatctctttcatgcagttgccaatattcataactgaaaataatctggtttatcataagtaaaatgggaaacttgcctctgttttttgcaaggggaggtaaagagtgtttagtaattacctatcttaaatctttctgagttggtagtagattcatgttcaaggaacaggaaaaatggaaaaacataagtttaaatcagttctttttaaataactttttattcttttgtataaataaaatttcacaggcttca

SEQ ID NO: 297365 - DNA, 722 bp, Homo sapiens
  misc_feature (705)..(705): n is a, c, g, or t
agcgggggggcgccccctggcggcgcagggaccgcccccaacctcgcgccgccgccgcccgcctcagcccaacatggcgatgcacaacaaggcggcgccgccgcagatcccggacacccggcgggagctggcggagctcgtgaagcggaagcaggagctggcggaaacattggcaaatttggagcgacagatctatgcttttgagggaagctacctggaagacactcagatgtatggcaatattattcgtggctgggatcggtatctgaccaaccaaaaaaactccaatagcaaaaatgatcgaaggaaccggaagtttaaggaagctgagcggctcttcagtaaatcctcggttacctcagcagctgcagtaagtgcattggcaggagttcaggaccagctcattgaaaagagggagccaggaagtgggacggaaagtgacacttctccagacttccacaatcaggaaaatgagcccagccaggaggaccctgaggatctggatggatctgtgcagggagtgaaacctcagaaggctgcttcttctacttcctcagggagtcaccacagcagccataaaaagcgaaagaataaaaaccggcacagaggatcgaactgaagttaaccatcaccagcttgctataggaagacacatagtgcatacttagctgagttcgtgactccactgtgtcttccagaccagtngctgtgatttgagggtt

SEQ ID NO: 297366 - DNA, 2170 bp, Homo sapiens
agcgggggggcgccccctggcggcgcagggaccgcccccaacctcgcgccgccgccgcccgcctcagcccaacatggcgatgcacaacaaggcggcgccgccgcagatcccggacacccggcgggagctggcggagctcgtgaagcggaagcaggagctggcggaaacattggcaaatttggagcgacagatctatgcttttgagggaagctacctggaagacactcagatgtatggcaatattattcgtggctgggatcggtatctgaccaaccaaaaaaactccaatagcaaaaatgatcgaaggaaccggaagtttaaggaagctgagcggctcttcagtaaatcctcggttacctcagcagctgcagtaagtgcattggcaggagttcaggaccagctcattgaaaagagggagccaggaagtgggacggaaagtgacacttctccagacttccacaatcaggaaaatgagcccagccaggaggaccctgaggatctggatggatctgtgcagggagtgaaacctcagaaggctgcttcttctacttcctcagggagtcaccacagcagccataaaaagcgaaagaataaaaaccggcacaggattgatctgaagttaaacaaaaaaccacgagctgactattagaagacacattagtgcagaagcttccaggctgtagagccctgcttcccttctctgacctcacaaagataaacatccttcacctgagttcgtggccatccacctctgctctcccagacccagtgcctgtgactttgagtagtttgttctaaatgtggtgacaaacaagtcatttctgtaagacattgggtcttactttatgtcatttttagtaacagaactgcaggaagatcaagacaatgttgtaatcccggcaagttgctaactgtgcgtttctcccttcttagaatgaatgtctcccccaaaactggctggcaccagcttcatctgtgatacccttcaagaaatgttctctggttttgttttatgctgaaagtagaacacaagtcacatttcagatggaggctgtaaatatctggcattttcttatattgttttatgttttcttgtttttctcttgttgtttttatcttattttctttggggtttttttgtaatgcctttgtacagctcatactttcctgctgacatatctgatcatctctttcatgcagttgccaatattcataactgaaaataatctggtttatcataagtaaaatgggaaacttgcctctgttttttgcaaggggaggtaaagagtgtttagtaattacctatcttaaatctttctgagttggtagtagattcatgttcaaggaacaggaaaaatggaaaaacataagtttaaatcagttctttttaaataactttttattcttttgtataaataaaatttcacaggcttcaaattctcatgctttacttttaaacccgagattgttttttcacttatttattcatatcatgccttatggaaatttctttttctgtattttctctctttgctggtattcacctgattaaatattgctctaaaaatcacaaaaaatatggaaagtctcaaaattataccaaaagtgataacttatgtcgttcttaagtggagtgaaaggatagcatcagtgagagccagtgttgcccaccaggtctccctttcttggagggcttgttggggctgaggaatctgctagtaatcgttacctgcctctagtgctgtggtgaacttgcgacagggtctggctgcacattggaatcacctgagaagctttaaaatactcatgcctggatcccatccctagagactggggtacagcctagttattgggaatttctttaaaagagttcctgggattctgataagaagccaggttgagaaccactacattagaagactgaatggtttaatttacatcctatgttatgattggtctaagggataagatttggggtctaacctttcctttcactctagttagtcatagtccttgacttatgcctatatctttgtaagaaatagtatgtttcatttgtgatagtattggtagggctgaatatggatggcatctactgtaaaacaagtctaccttgtcagatgtgcaaaagctttcactcttgttctcaaataaacttttgtgggttttt

SEQ ID NO: 297367 - DNA, 2200 bp, Homo sapiens
agcgggggggcgccccctggcggcgcagggaccgcccccaacctcgcgccgccgccgcccgcctcagcccaacatggcgatgcacaacaaggcggcgccgccgcagatcccggacacccggcgggagctggcggagctcgtgaagcggaagcaggagctggcggaaacattggcaaatttggagcgacagatctatgcttttgagggaagctacctggaagacactcagatgtatggcaatattattcgtggctgggatcggtatctgaccaaccaaaaaaactccaatagcaaaaatgatcgaaggaaccggaagtttaaggaagctgagcggctcttcagtaaatcctcggttacctcagcagctgcagtaagtgcattggcaggagttcaggaccagctcattgaaaagagggagccaggaagtgggacggaaagtgacacttctccagacttccacaatcaggaaaatgagcccagccaggaggaccctgaggatctggatggatctgtgcagggagtgaaacctcagaaggctgcttcttctacttcctcagggagtcaccacagcagccataaaaagcgaaagaataaaaaccggcacagcccgtctggcatgtttgattatgactttgagattgatctgaagttaaacaaaaaaccacgagctgactattagaagacacattagtgcagaagcttccaggctgtagagccctgcttcccttctctgacctcacaaagataaacatccttcacctgagttcgtggccatccacctctgctctcccagacccagtgcctgtgactttgagtagtttgttctaaatgtggtgacaaacaagtcatttctgtaagacattgggtcttactttatgtcatttttagtaacagaactgcaggaagatcaagacaatgttgtaatcccggcaagttgctaactgtgcgtttctcccttcttagaatgaatgtctcccccaaaactggctggcaccagcttcatctgtgatacccttcaagaaatgttctctggttttgttttatgctgaaagtagaacacaagtcacatttcagatggaggctgtaaatatctggcattttcttatattgttttatgttttcttgtttttctcttgttgtttttatcttattttctttggggtttttttgtaatgcctttgtacagctcatactttcctgctgacatatctgatcatctctttcatgcagttgccaatattcataactgaaaataatctggtttatcataagtaaaatgggaaacttgcctctgttttttgcaaggggaggtaaagagtgtttagtaattacctatcttaaatctttctgagttggtagtagattcatgttcaaggaacaggaaaaatggaaaaacataagtttaaatcagttctttttaaataactttttattcttttgtataaataaaatttcacaggcttcaaattctcatgctttacttttaaacccgagattgttttttcacttatttattcatatcatgccttatggaaatttctttttctgtattttctctctttgctggtattcacctgattaaatattgctctaaaaatcacaaaaaatatggaaagtctcaaaattataccaaaagtgataacttatgtcgttcttaagtggagtgaaaggatagcatcagtgagagccagtgttgcccaccaggtctccctttcttggagggcttgttggggctgaggaatctgctagtaatcgttacctgcctctagtgctgtggtgaacttgcgacagggtctggctgcacattggaatcacctgagaagctttaaaatactcatgcctggatcccatccctagagactggggtacagcctagttattgggaatttctttaaaagagttcctgggattctgataagaagccaggttgagaaccactacattagaagactgaatggtttaatttacatcctatgttatgattggtctaagggataagatttggggtctaacctttcctttcactctagttagtcatagtccttgacttatgcctatatctttgtaagaaatagtatgtttcatttgtgatagtattggtagggctgaatatggatggcatctactgtaaaacaagtctaccttgtcagatgtgcaaaagctttcactcttgttctcaaataaacttttgtgggttttt

SEQ ID NO: 297368 - DNA, 2228 bp, Homo sapiens
agcgggggggcgccccctggcggcgcagggaccgcccccaacctcgcgccgccgccgcccgcctcagcccaacatggcgatgcacaacaaggcggcgccgccgcagatcccggacacccggcgggagctggcggagctcgtgaagcggaagcaggagctggcggaaacattggcaaatttggagcgacagatctatgcttttgagggaagctacctggaagacactcagatgtatggcaatattattcgtggctgggatcggtatctgaccaaccaaaaaaactccaatagcaaaaatgatcgaaggaaccggaagtttaaggaagctgagcggctcttcagtaaatcctcggttacctcagcagctgcagtaagtgcattggcaggagttcaggaccagctcattgaaaagagggagccaggaagtgggacggaaagtgacacttctccagacttccacaatcaggaaaatgagcccagccaggaggaccctgaggatctggatggatctgtgcagggagtgaaacctcagaaggctgcttcttctacttcctcagggagtcaccacagcagccataaaaagcgaaagaataaaaaccggcacaggtatgtatattaggttaggctgggaagttttttttaaaaacagaaaaacgtgatggaggattgatctgaagttaaacaaaaaaccacgagctgactattagaagacacattagtgcagaagcttccaggctgtagagccctgcttcccttctctgacctcacaaagataaacatccttcacctgagttcgtggccatccacctctgctctcccagacccagtgcctgtgactttgagtagtttgttctaaatgtggtgacaaacaagtcatttctgtaagacattgggtcttactttatgtcatttttagtaacagaactgcaggaagatcaagacaatgttgtaatcccggcaagttgctaactgtgcgtttctcccttcttagaatgaatgtctcccccaaaactggctggcaccagcttcatctgtgatacccttcaagaaatgttctctggttttgttttatgctgaaagtagaacacaagtcacatttcagatggaggctgtaaatatctggcattttcttatattgttttatgttttcttgtttttctcttgttgtttttatcttattttctttggggtttttttgtaatgcctttgtacagctcatactttcctgctgacatatctgatcatctctttcatgcagttgccaatattcataactgaaaataatctggtttatcataagtaaaatgggaaacttgcctctgttttttgcaaggggaggtaaagagtgtttagtaattacctatcttaaatctttctgagttggtagtagattcatgttcaaggaacaggaaaaatggaaaaacataagtttaaatcagttctttttaaataactttttattcttttgtataaataaaatttcacaggcttcaaattctcatgctttacttttaaacccgagattgttttttcacttatttattcatatcatgccttatggaaatttctttttctgtattttctctctttgctggtattcacctgattaaatattgctctaaaaatcacaaaaaatatggaaagtctcaaaattataccaaaagtgataacttatgtcgttcttaagtggagtgaaaggatagcatcagtgagagccagtgttgcccaccaggtctccctttcttggagggcttgttggggctgaggaatctgctagtaatcgttacctgcctctagtgctgtggtgaacttgcgacagggtctggctgcacattggaatcacctgagaagctttaaaatactcatgcctggatcccatccctagagactggggtacagcctagttattgggaatttctttaaaagagttcctgggattctgataagaagccaggttgagaaccactacattagaagactgaatggtttaatttacatcctatgttatgattggtctaagggataagatttggggtctaacctttcctttcactctagttagtcatagtccttgacttatgcctatatctttgtaagaaatagtatgtttcatttgtgatagtattggtagggctgaatatggatggcatctactgtaaaacaagtctaccttgtcagatgtgcaaaagctttcactcttgttctcaaataaacttttgtgggttttt

SEQ ID NO: 297369 - DNA, 2136 bp, Homo sapiens
agcgggggggcgccccctggcggcgcagggaccgcccccaacctcgcgccgccgccgcccgcctcagcccaacatggcgatgcacaacaaggcggcgccgccgcagatcccggacacccggcgggagctggcggagctcgtgaagcggaagcaggagctggcggaaacattggcaaatttggagcgacagatctatgcttttgagggaagctacctggaagacactcagatgtatggcaatattattcgtggctgggatcggtatctgaccaaccaaaaaaactccaatagcaaaaatgatcgaaggaaccggaagtttaaggaagctgagcggctcttcagtaaatcctcggttacctcagcagctgcagtaagtgcattggcaggagttcaggaccagctcattgaaaagagggagccaggaagtgggacggaaagtgacacttctccagacttccacaatcaggaaaatgagcccagccaggaggaccctgaggatctggatggatctgtgcagggagtgaaacctcagaaggctgcttcttctacttcctcagggagtcaccacagcagccataaaaagcgaaagaataaaaaccggcacaggactattagaagacacattagtgcagaagcttccaggctgtagagccctgcttcccttctctgacctcacaaagataaacatccttcacctgagttcgtggccatccacctctgctctcccagacccagtgcctgtgactttgagtagtttgttctaaatgtggtgacaaacaagtcatttctgtaagacattgggtcttactttatgtcatttttagtaacagaactgcaggaagatcaagacaatgttgtaatcccggcaagttgctaactgtgcgtttctcccttcttagaatgaatgtctcccccaaaactggctggcaccagcttcatctgtgatacccttcaagaaatgttctctggttttgttttatgctgaaagtagaacacaagtcacatttcagatggaggctgtaaatatctggcattttcttatattgttttatgttttcttgtttttctcttgttgtttttatcttattttctttggggtttttttgtaatgcctttgtacagctcatactttcctgctgacatatctgatcatctctttcatgcagttgccaatattcataactgaaaataatctggtttatcataagtaaaatgggaaacttgcctctgttttttgcaaggggaggtaaagagtgtttagtaattacctatcttaaatctttctgagttggtagtagattcatgttcaaggaacaggaaaaatggaaaaacataagtttaaatcagttctttttaaataactttttattcttttgtataaataaaatttcacaggcttcaaattctcatgctttacttttaaacccgagattgttttttcacttatttattcatatcatgccttatggaaatttctttttctgtattttctctctttgctggtattcacctgattaaatattgctctaaaaatcacaaaaaatatggaaagtctcaaaattataccaaaagtgataacttatgtcgttcttaagtggagtgaaaggatagcatcagtgagagccagtgttgcccaccaggtctccctttcttggagggcttgttggggctgaggaatctgctagtaatcgttacctgcctctagtgctgtggtgaacttgcgacagggtctggctgcacattggaatcacctgagaagctttaaaatactcatgcctggatcccatccctagagactggggtacagcctagttattgggaatttctttaaaagagttcctgggattctgataagaagccaggttgagaaccactacattagaagactgaatggtttaatttacatcctatgttatgattggtctaagggataagatttggggtctaacctttcctttcactctagttagtcatagtccttgacttatgcctatatctttgtaagaaatagtatgtttcatttgtgatagtattggtagggctgaatatggatggcatctactgtaaaacaagtctaccttgtcagatgtgcaaaagctttcactcttgttctcaaataaacttttgtgggttttt

SEQ ID NO: 297370 - DNA, 2174 bp, Homo sapiens
agcgggggggcgccccctggcggcgcagggaccgcccccaacctcgcgccgccgccgcccgcctcagcccaacatggcgatgcacaacaaggcggcgccgccgcagatcccggacacccggcgggagctggcggagctcgtgaagcggaagcaggagctggcggaaacattggcaaatttggagcgacagatctatgcttttgagggaagctacctggaagacactcagatgtatggcaatattattcgtggctgggatcggtatctgaccaaccaaaaaaactccaatagcaaaaatgatcgaaggaaccggaagtttaaggaagctgagcggctcttcagtaaatcctcggttacctcagcagctgcagtaagtgcattggcaggagttcaggaccagctcattgaaaagagggagccaggaagtgggacggaaagtgacacttctccagacttccacaatcaggaaaatgagcccagccaggaggaccctgaggatctggatggatctgtgcagggagtgaaacctcagaaggctgcttcttctacttcctcagggagtcaccacagcagccataaaaagcgaaagaataaaaaccggcacaggtatgtatattaggttaggctgggaagttttttttaaaaacagaaaaacgtgatggaggattgatctgaagttaaacaaagagccctgcttcccttctctgacctcacaaagataaacatccttcacctgagttcgtggccatccacctctgctctcccagacccagtgcctgtgactttgagtagtttgttctaaatgtggtgacaaacaagtcatttctgtaagacattgggtcttactttatgtcatttttagtaacagaactgcaggaagatcaagacaatgttgtaatcccggcaagttgctaactgtgcgtttctcccttcttagaatgaatgtctcccccaaaactggctggcaccagcttcatctgtgatacccttcaagaaatgttctctggttttgttttatgctgaaagtagaacacaagtcacatttcagatggaggctgtaaatatctggcattttcttatattgttttatgttttcttgtttttctcttgttgtttttatcttattttctttggggtttttttgtaatgcctttgtacagctcatactttcctgctgacatatctgatcatctctttcatgcagttgccaatattcataactgaaaataatctggtttatcataagtaaaatgggaaacttgcctctgttttttgcaaggggaggtaaagagtgtttagtaattacctatcttaaatctttctgagttggtagtagattcatgttcaaggaacaggaaaaatggaaaaacataagtttaaatcagttctttttaaataactttttattcttttgtataaataaaatttcacaggcttcaaattctcatgctttacttttaaacccgagattgttttttcacttatttattcatatcatgccttatggaaatttctttttctgtattttctctctttgctggtattcacctgattaaatattgctctaaaaatcacaaaaaatatggaaagtctcaaaattataccaaaagtgataacttatgtcgttcttaagtggagtgaaaggatagcatcagtgagagccagtgttgcccaccaggtctccctttcttggagggcttgttggggctgaggaatctgctagtaatcgttacctgcctctagtgctgtggtgaacttgcgacagggtctggctgcacattggaatcacctgagaagctttaaaatactcatgcctggatcccatccctagagactggggtacagcctagttattgggaatttctttaaaagagttcctgggattctgataagaagccaggttgagaaccactacattagaagactgaatggtttaatttacatcctatgttatgattggtctaagggataagatttggggtctaacctttcctttcactctagttagtcatagtccttgacttatgcctatatctttgtaagaaatagtatgtttcatttgtgatagtattggtagggctgaatatggatggcatctactgtaaaacaagtctaccttgtcagatgtgcaaaagctttcactcttgttctcaaataaacttttgtgggttttt

SEQ ID NO: 297371 - DNA, 2340 bp, Homo sapiens
agcgggggggcgccccctggcggcgcagggaccgcccccaacctcgcgccgccgccgcccgcctcagcccaacatggcgatgcacaacaaggcggcgccgccgcagatcccggacacccggcgggagctggcggagctcgtgaagcggaagcaggagctggcggtgaggggctaggacaggggttgcacggcatggggctccgcgcccgccccgcctccaggccccaagcccggccgcgctaggccgtttgttactccgggggcgcggcgcggcgggccgggtgctcggcggcctgaggccgggaaacattggcaaatttggagcgacagatctatgcttttgagggaagctacctggaagacactcagatgtatggcaatattattcgtggctgggatcggtatctgaccaaccaaaaaaactccaatagcaaaaatgatcgaaggaaccggaagtttaaggaagctgagcggctcttcagtaaatcctcggttacctcagcagctgcagtaagtgcattggcaggagttcaggaccagctcattgaaaagagggagccaggaagtgggacggaaagtgacacttctccagacttccacaatcaggaaaatgagcccagccaggaggaccctgaggatctggatggatctgtgcagggagtgaaacctcagaaggctgcttcttctacttcctcagggagtcaccacagcagccataaaaagcgaaagaataaaaaccggcacagcccgtctggcatgtttgattatgactttgagattgatctgaagttaaacaaaaaaccacgagctgactattagaagacacattagtgcagaagcttccaggctgtagagccctgcttcccttctctgacctcacaaagataaacatccttcacctgagttcgtggccatccacctctgctctcccagacccagtgcctgtgactttgagtagtttgttctaaatgtggtgacaaacaagtcatttctgtaagacattgggtcttactttatgtcatttttagtaacagaactgcaggaagatcaagacaatgttgtaatcccggcaagttgctaactgtgcgtttctcccttcttagaatgaatgtctcccccaaaactggctggcaccagcttcatctgtgatacccttcaagaaatgttctctggttttgttttatgctgaaagtagaacacaagtcacatttcagatggaggctgtaaatatctggcattttcttatattgttttatgttttcttgtttttctcttgttgtttttatcttattttctttggggtttttttgtaatgcctttgtacagctcatactttcctgctgacatatctgatcatctctttcatgcagttgccaatattcataactgaaaataatctggtttatcataagtaaaatgggaaacttgcctctgttttttgcaaggggaggtaaagagtgtttagtaattacctatcttaaatctttctgagttggtagtagattcatgttcaaggaacaggaaaaatggaaaaacataagtttaaatcagttctttttaaataactttttattcttttgtataaataaaatttcacaggcttcaaattctcatgctttacttttaaacccgagattgttttttcacttatttattcatatcatgccttatggaaatttctttttctgtattttctctctttgctggtattcacctgattaaatattgctctaaaaatcacaaaaaatatggaaagtctcaaaattataccaaaagtgataacttatgtcgttcttaagtggagtgaaaggatagcatcagtgagagccagtgttgcccaccaggtctccctttcttggagggcttgttggggctgaggaatctgctagtaatcgttacctgcctctagtgctgtggtgaacttgcgacagggtctggctgcacattggaatcacctgagaagctttaaaatactcatgcctggatcccatccctagagactggggtacagcctagttattgggaatttctttaaaagagttcctgggattctgataagaagccaggttgagaaccactacattagaagactgaatggtttaatttacatcctatgttatgattggtctaagggataagatttggggtctaacctttcctttcactctagttagtcatagtccttgacttatgcctatatctttgtaagaaatagtatgtttcatttgtgatagtattggtagggctgaatatggatggcatctactgtaaaacaagtctaccttgtcagatgtgcaaaagctttcactcttgttctcaaataaacttttgtgggttttt

SEQ ID NO: 297372 - DNA, 1256 bp, Homo sapiens
agcgggggggcgccccctggcggcgcagggaccgcccccaacctcgcgccgccgccgcccgcctcagcccaacatggcgatgcacaacaaggcggcgccgccgcagatcccggacacccggcgggagctggcggagctcgtgaagcggaagcaggagctggcggaaacattggcaaatttggagcgacagatctatgcttttgagggaagctacctggaagacactcagatgtatggcaatattattcgtggctgggatcggtatctgaccaaccaaaaaaactccaatagcaaaaatgatcgaaggaaccggaagtttaaggaagctgagcggctcttcagtaaatcctcggttacctcagcagctgcagtaagtgcattggcaggagttcaggaccagctcattgaaaagagggagccaggaagtgggacggaaagtgacacttctccagacttccacaatcaggaaaatgagcccagccaggaggaccctgaggatctggatggatctgtgcagggagtgaaacctcagaaggctgcttcttctacttcctcagggagtcaccacagcagccataaaaagcgaaagaataaaaaccggcacagggtcagtggcagggatcccacccccgcagctcccatgaccattgctgtgaagggaattgcctagaataaaaactctttaggattgctgcagactctttctgttgctgatggcaagaaagtcattaggtccaagtgaacgggctaatttgctcaaagggaggaattggtgggcattagagtaaccctcaaggaagactccaggacattcttctcactgtttctagtgtagaatagttttattccataaaaaccttgtttcatatggtgaatatggaatacttttagaagaggaaaaggagaaatagaaatggaatctgtgtaatagtatttgaaaaatgccactggtacttattgggaagctgtaaagtgggataaagtcttctgctggtaattctgatctttgcctactcttatttctttgtggatggagagaactgatttgacatgcctttttttctctttaaatacaagttttttttattgcttgtgatttttctgtttctgtatttctcagcaatatgctgacttcagatactggaggaacagtataaagcctgtaaaatatgagagtgtcttcataggtaacgtgtaacattggtgcaccatgtttttttgcagtacataatgagataggaatgacgtcagtggac

SEQ ID NO: 297373 - DNA, 824 bp, Homo sapiens
agggggacccagtcaccccgtctggactttggaggctggtggggagcgtgttctttttggtactgggagtagatccgttgaatggaggtttttgatagacagggttgtgatgtgtttgggaacatctagaaggtgacaggcgagggagaagaacacattccggagaattcagaattgtgacaggcacccaaggcccaatgcactctggtggctaagctcttcctgcccccgcgtctcggcttgggcacccgggaggcccctctcacctgaagctgcccttctaggtttccatagcaactggcagcccggtgtcggcggcctctcttgagcctgcggggaggggagcgagttgacgctgaaaggctgctcacctttccctctcctggtagcgataccttttgtgcgtgggagtggacatcgcccaagttctgcgttagcctgggctcttgactcatggtttccgtgaatcctctaaagtatatgcaaaatttcgcgtgtgtgtgtatttttctggagacatgctttatacattcaggggtccatcacccccaaaggtctagactgtcttagtcctaaacggctcctcctccccgtatcttccatctctccacagggtggtttagtgtgggcaagcttgcgtttacgagtctaatatcaggatttcattttggccagacttaagtgtttgcatttaaaaggtatcattcatgtccttgtttttcatctctcaggaaacattggcaaatttggagcgacagatctatgcttttgagggaagctacctggaagacactcagatgtatggcaatattattcgtggctgg

SEQ ID NO: 297374 - DNA, 671 bp, Homo sapiens
tcgtgccgaattcggcacgagcggcacgaggcagttctcccaggagaaagccatgttcagttcgagcgccaagatcgtgaagcccaatggcgagaagccggacgagttcgagtccggcatctcccaggctcttctggagctggagatgaactcggacctcaaggctcagctcagggagctgaatattacggcagctaaggaaattgaagttggtggtggtcggaaagctatcataatctttgttcccgttcctcaactgaaatctttccagaaaatccaagtccggctagtacgcgaattggagaaaaagttcagtgggaagcatgtcgtctttatcgctcagaggagaattctgcctaagccaactcgaaaaagccgtacaaaaaataagcaaaagcgtcccaggagccgtactctgacagctgtgcacgatgccatccttgaggacttggtcttcccaagcgaaattgtgggcaagagaatccgcgtcaaactagatggcagccggctcataaaggttcatttggacaaagcacagcagaacaatgtggaacacaaggttgaaactttttctggtgtctataagaagctcacgggcaaggatgttaattttgaattcccagagtttcaattgtaaacaaaaatgactaaataaaaagtatatattcaca

SEQ ID NO: 297375 - DNA, 691 bp, Homo sapiens
  misc_feature (8)..(8): n is a, c, g, or t
  misc_feature (12)..(12): n is a, c, g, or t
gaactagnggancccctttgctgcaggaattcggcacgagggcgctcgtttgagttctcccaggagaaagccatgttcagttcgagcgccaagatcgtgaagcccaatggcgagaagccggacgagttcgagtccggcatctcccaggctcttctggagctggagatgaactcggacctcaaggctcagctcagggagctgaatattacggcagctaaggaaattgaagttggtggtggtcggaaagctatcataatctttgttcccgttcctcaactgaaatctttccagaaaatccaagtccggctagtacgcgaattggagaaaaagttcagtgggaagcatgtcgtctttatcgctcagaggagaattctgcctaagccaactcgaaaaagccgtacaaaaaataagcaaaagcgtcccaggagccgtactctgacagctgtgcacgatgccatccttgaggacttggtcttcccaagcgaaattgtgggcaagagaatccgcgtcaaactagatggcagccggctcataaaggttcatttggacaaagcacagcagaacaatgtggaacacaaggttgaaactttttctggtgtctataagaagctcacgggcaaggatgttaattttgaattcccagagtttcaattgtaaacaaaaatgactaaataaaaagtatatattcaca

SEQ ID NO: 297376 - DNA, 918 bp, Homo sapiens
aagacactcgtccccagagccgcttcctgggactctctagcctcctaccgcttctcagtgatgttccggtttccgccctcctcctcggctgtttccgcctcttgccttcggacgccggattttgacgtgctctcgcgagatttgggtctcttcctaagccggcgctcggcaagttctcccaggagaaagccatgttcagttcgagcgccaagatcgtgaagcccaatggcgagaagccggacgagttcgagtccggcatctcccaggctcttctggagctggagatgaactcggacctcaaggctcagctcagggagctgaatattacggcagctaaggaaattgaagttggtggtggtcggaaagctatcataatctttgttcccgttcctcaactgaaatctttccagaaaatccaagtccggctagtacgcgaattggagaaaaagttcagtgggaagcatgtcgtctttatcgctcagaggagaattctgcctaagccaactcgaaaaagccgtacaaaaaataagcaaaagcgtcccaggagccgtactctgacagctgtgcacgatgccatccttgaggacttggtcttcccaagcgaaattgtgggcaagagaatccgcgtcaaactagatggcagccggctcataaaggttcatttggacaaagcacagcagaacaatgtggaacacaaggttgaaactttttctggtgtctataagaagctcacgggcaaggatgttaattttgaattcccagagtttcaattgtaaacaaaaatgactaaataaaaagtatatattcacatttttccccgggaaaatgagcaagcttatgcatgcgggccgttcagctacctgggccatttgcctttagggagggggttacatcggcccggggttcggcgggctgggg

SEQ ID NO: 297377 - DNA, 896 bp, Homo sapiens
tcgtgccgaattcggcacgagcggcacgaggcagttctcccaggagaaagccatgttcagttcgagcgccaagatcgtgaagcccaatggcgagaagccggacgagttcgagtccggcatctcccaggctcttctggagctggagatgaactcggacctcaaggctcagctcagggagctgaatattacggcagctaaggaaattgaagttggtggtggtcggaaagctatcataatctttgttcccgttcctcaactgaaatctttccagaaaatccaagtccggctagtacgcgaattggagaaaaagttcagtgggaagcatgtcgtctttatcgctcagaggagaattctgcctaagccaactcgaaaaagccgtacaaaaaataagcaaaagcgtcccaggagccgtactctgacagctgtgcacgatgccatccttgaggacttggtcttcccaagcgaaattgtgggcaagagaatccgcgtcaaactagatggcagccggctcataaaggttcatttggacaaagcacagcagaacaatgtggaacacaaggttgaaactttttctggtgtctataagaagctcacgggcaaggatgttaattttgaattcccagagtttcaattgtaaacaaaaatgactaaataaaaagtatatattcacagtaaaacaacaaaaacacaacaaaaaaaaaaaaaaaaacctttgtcggccctcttggcccaataagattaaagcctggaacaagtttcgtccctgcgcccaaattgggggctcattgggccaattcccctaaagggggggccttttaacagtccgggggccggttttaacacaacgtggaatggaaccttgggtgtaccttaagtgcggttgggaacttctcttc

SEQ ID NO: 297378 - DNA, 395 bp, Homo sapiens
ggccttggggcatgcgttgcacctgcccggcccggtggctgcgcctccctcctccacctgaccaacgcgacattcctcccctcacgcctggccggtcccttccagggcaactcccaggatgtggtgacatgcagggttcaagtgttcttggttccaggcacctcccggctcacggggaggtgcctgccaaggtgtgggcaagagaatccgcgtcaaactagatggcagccggctcataaaggttcatttggacaaagcacagcagaacaatgtggaacacaaggttgaaactttttctggtgtctataagaagctcacgggcaaggatgttaattttgaattcccagagtttcaattgtaaacaaaaatgactaaataaaaagtatatattcaca

SEQ ID NO: 297379 - DNA, 617 bp, Homo sapiens
ggcctcctggcctgaacagtctcccttcttggaataaggaaatgtgaaggttggagagagatgagaacatttccgaaggatgcacttatgattaactcaaaactagtattagtttgtagtgcagctacggtgttagtgataaggtcttcttatcctctaatttgaccacaacgtttactttctgaagcagttaacaaagtggatttttgtttttttctttaggaaattgaagttggtggtggtcggaaagctatcataatctttgttcccgttcctcaactgaaatctttccagaaaatccaagtccggctagtacgcgaattggagaaaaagttcagtgggaagcatgtcgtctttatcgctcaggtatctgttctactgttgcagcacgtttctgtttgtgaattttgctaaaattgcttgtatttagactgcattggtagttggagtcatgaaaacaatccttttatgaatccaattgggtagaaagataaagtacaggcagagcgccgtggcttaggcctgtaatcccagcacggggaggtggaggcgggtggatcactgtagagaccagcctgggcaacatggtaagcagcaagcgggtaacctctaggtca

SEQ ID NO: 297380 - DNA, 749 bp, Homo sapiens
gactgctggggtcccctgatggcttccccggtgcagtggtgtacagttctgtcccacagcattggagaagagcttgtccccggtcgtgaagactgctgcagacatgttgtgtgtacttagttgctgaggagaaaaacaatacagggcacaatttcacgaaactattaggttttaagctgagtgtgtatttcaaagttctgtgatgaattctttcttttcttgtaggttgaaactttttctggtgtctataagaagctcacgggcaaggatgttaattttgaattcccagagtttcaattgtaaacaaaaatgactaaataaaaagtatatattcacagtactctgtttcagttatgtttttcaaaatgccaaattcacggatgcgcagctgtcttcattatcagtggcgtcctgtgtgggccagaggatgtcagtaggaggggtgtctgtagccagaaagcttgatgcctgtgaggttctgcttgtattcaggggtacaagtgtcatcacgtgatgctgcagaaatggctgaatattggcacttttgcatggttcaaactaaaaatatagcaggtactttttttattgtgctatacgtaaaatttaccatattacccatttgtaactttacagctcagtagccttaagtgtatctacaaagttgggaaagggaactctgaacttttttattcatcttgtagaactcaaattacccatgacacccagcactccacttctcattctgtcag

SEQ ID NO: 297381 - DNA, 310 bp, Homo sapiens
gcggccgcctactactactaaattcgcggccgcgtcgacagtttgacgcggattctcttgcccacaatttcgcttgggaagaccaatgtgggcaagagaatccgcgtcaaactagatggcagccggctcataaaggttcatttggacaaagcacagcagaacaatgtggaacacaaggttgaaactttttctggtgtctataagaagctcacgggcaaggatgttaattttgaattcccagagtttcaattgtaaacaaaaatgactaaataaaaagtatatattcacaacacacacagaaaaagaatgt

SEQ ID NO: 297382 - DNA, 561 bp, Homo sapiens
  misc_feature (519)..(519): n is a, c, g, or t
aagacactcgtccccagagccgcttcctgggactctctagcctcctaccgcttctcagtgatgttccggtttccgccctcctcctcggctgtttccgcctcttgccttcggacgccggattttgacgtgctctcgcgagatttgggtctcttcctaagccggcgctcggcaggcggctgctctccgacagaacttttcttcttgggttgaggaaaacgcctttggagtcaggccctggaggggcgagccttgctcacagggtggggatcagccgattacccgccctgtgctttccgatggcttctgcggggcgagcggggcctggccggggggtgcgggcgggagggcgagccagcggcgcctgcagcccgggccgcgtaacgctgaccgctgtgccttcagagttctcccaggagaaagccatgttcagttcgagcgccaagatcgtgaagcccaatggcgagaagccggacgagttcgagtccggcatctcccaggtgagagggtttccctggggtntggggtggggggaggcgccccgcccgggaggggaggcggccg

SEQ ID NO: 297383 - DNA, 1115 bp, Homo sapiens
aagacactcgtccccagagccgcttcctgggactctctagcctcctaccgcttctcagtgatgttccggtttccgccctcctcctcggctgtttccgcctcttgccttcggacgccggattttgacgtgctctcgcgagatttgggtctcttcctaagccggcgctcggcaagttctcccaggagaaagccatgttcagttcgagcgccaagatcgtgaagcccaatggcgagaagccggacgagttcgagtccggcatctcccaggctcttctggagctggagatgaactcggacctcaaggctcagctcagggagctgaatattacggcagctaaggaaattgaagttggtggtggtcggaaagctatcataatctttgttcccgttcctcaactgaaatctttccagaaaatccaagtccggctagtacgcgaattggagaaaaagttcagtgggaagcatgtcgtctttatcgctcagaggagaattctgcctaagccaactcgaaaaagccgtacaaaaaataagcaaaagcgtcccaggagccgtactctgacagctgtgcacgatgccatccttgaggacttggtcttcccaagcgaaattgtgggcaagagaatccgcgtcaaactagatggcagccggctcataaaggttcatttggacaaagcacagcagaacaatgtggaacacaaggttgaaactttttctggtgtctataagaagctcacgggcaaggatgttaattttgaattcccagagtttcaattgtaaacaaaaatgactaaataaaaagtatatattcacagtaaaaaaaaaaaaaagaaaaaacaaaaaaaaaaaaaaaaaaaaaaaaaaaaaaaaaaaaaaaaaaaaagaagaaacaaagtaaaacaacaaaaacacaacaaaaaaaaaaaaaaaaacctttgtcggccctcttggcccaataagattaaagcctggaacaagtttcgtccctgcgcccaaattgggggctcattgggccaattcccctaaagggggggccttttaacagtccgggggccggttttaacacaacgtggaatggaaccttgggtgtaccttaagtgcggttgggaacttctcttc

SEQ ID NO: 297384 - DNA, 1346 bp, Homo sapiens
aagacactcgtccccagagccgcttcctgggactctctagcctcctaccgcttctcagtgatgttccggtttccgccctcctcctcggctgtttccgcctcttgccttcggacgccggattttgacgtgctctcgcgagatttgggtctcttcctaagccggcgctcggcaggcggctgctctccgacagaacttttcttcttgggttgaggaaaacgcctttggagtcaggccctggaggggcgagccttgctcacagggtggggatcagccgattacccgccctgtgctttccgatggcttctgcggggcgagcggggcctggccggggggtgcgggcgggagggcgagccagcggcgcctgcagcccgggccgcgtaacgctgaccgctgtgccttcagagttctcccaggagaaagccatgttcagttcgagcgccaagatcgtgaagcccaatggcgagaagccggacgagttcgagtccggcatctcccaggctcttctggagctggagatgaactcggacctcaaggctcagctcagggagctgaatattacggcagctaaggaaattgaagttggtggtggtcggaaagctatcataatctttgttcccgttcctcaactgaaatctttccagaaaatccaagtccggctagtacgcgaattggagaaaaagttcagtgggaagcatgtcgtctttatcgctcagaggagaattctgcctaagccaactcgaaaaagccgtacaaaaaataagcaaaagcgtcccaggagccgtactctgacagctgtgcacgatgccatccttgaggacttggtcttcccaagcgaaattgtgggcaagagaatccgcgtcaaactagatggcagccggctcataaaggttcatttggacaaagcacagcagaacaatgtggaacacaaggttgaaactttttctggtgtctataagaagctcacgggcaaggatgttaattttgaattcccagagtttcaattgtaaacaaaaatgactaaataaaaagtatatattcacagtaaaaaaaaaaaaaagaaaaaacaaaaaaaaaaaaaaaaaaaaaaaaaaaaaaaaaaaaaaaaaaaaagaagaaacaaagtaaaacaacaaaaacacaacaaaaaaaaaaaaaaaaacctttgtcggccctcttggcccaataagattaaagcctggaacaagtttcgtccctgcgcccaaattgggggctcattgggccaattcccctaaagggggggccttttaacagtccgggggccggttttaacacaacgtggaatggaaccttgggtgtaccttaagtgcggttgggaacttctcttc

SEQ ID NO: 297385 - DNA, 810 bp, Homo sapiens
aagacactcgtccccagagccgcttcctgggactctctagcctcctaccgcttctcagtgatgttccggtttccgccctcctcctcggctgtttccgcctcttgccttcggacgccggattttgacgtgctctcgcgagatttgggtctcttcctaagccggcgctcggcaagttctcccaggagaaagccatgttcagttcgagcgccaagatcgtgaagcccaatggcgagaagccggacgagttcgagtccggcatctcccaggctcttctggagctggagatgaactcggacctcaaggctcagctcagggagctgaatattacggcagctaaggaaattgaagttggtggtggtcggaaagctatcataatctttgttcccgttcctcaactgaaatctttccagaaaatccaagtccggctagtacgcgaattggagaaaaagttcagtgggaagcatgtcgtctttatcgctcagaggagaattctgcctaagccaactcgaaaaagccgtacaaaaaataagcaaaagcgtcccaggagccgtactctgacagctgtgcacgatgccatccttgaggacttggtcttcccaagcgaaattgtgggcaagagaatccgcgtcaaactagatggcagccggctcataaaggttcatttggacaaagcacagcagaacaatgtggaacacaaggttgaaactttttctggtgtctataagaagctcacgggcaaggatgttaattttgaattcccagagtttcaattgtaaacaaaaatgactaaataaaaagtatatattcaca

SEQ ID NO: 297386 - DNA, 899 bp, Homo sapiens
aagacactcgtccccagagccgcttcctgggactctctagcctcctaccgcttctcagtgatgttccggtttccgccctcctcctcggctgtttccgcctcttgccttcggacgccggattttgacgtgctctcgcgagatttgggtctcttcctaagccggcgctcggcaggcggctgctctccgacagaacttttcttcttgggttgaggaaaacgcctttggagtcaggccctggaggggcgagccttgctcacaggagttctcccaggagaaagccatgttcagttcgagcgccaagatcgtgaagcccaatggcgagaagccggacgagttcgagtccggcatctcccaggctcttctggagctggagatgaactcggacctcaaggctcagctcagggagctgaatattacggcagctaaggaaattgaagttggtggtggtcggaaagctatcataatctttgttcccgttcctcaactgaaatctttccagaaaatccaagtccggctagtacgcgaattggagaaaaagttcagtgggaagcatgtcgtctttatcgctcagaggagaattctgcctaagccaactcgaaaaagccgtacaaaaaataagcaaaagcgtcccaggagccgtactctgacagctgtgcacgatgccatccttgaggacttggtcttcccaagcgaaattgtgggcaagagaatccgcgtcaaactagatggcagccggctcataaaggttcatttggacaaagcacagcagaacaatgtggaacacaaggttgaaactttttctggtgtctataagaagctcacgggcaaggatgttaattttgaattcccagagtttcaattgtaaacaaaaatgactaaataaaaagtatatattcaca

SEQ ID NO: 297387 - DNA, 1062 bp, Homo sapiens
aagacactcgtccccagagccgcttcctgggactctctagcctcctaccgcttctcagtgatgttccggtttccgccctcctcctcggctgtttccgcctcttgccttcggacgccggattttgacgtgctctcgcgagatttgggtctcttcctaagccggcgctcggcaagttctcccaggagaaagccatgttcagttcgagcgccaagatcgtgaagcccaatggcgagaaactcggacctcaaggctcagctcagggagctgaatattacggcagctaaggaaattgaagttggtggtggtcggaaagctatcataatctttgttcccgttcctcaactgaaatctttccagaaaatccaagtccggctagtacgcgaattggagaaaaagttcagtgggaagcatgtcgtctttatcgctcagaggagaattctgcctaagccaactcgaaaaagccgtacaaaaaataagcaaaagcgtcccaggagccgtactctgacagctgtgcacgatgccatccttgaggacttggtcttcccaagcgaaattgtgggcaagagaatccgcgtcaaactagatggcagccggctcataaaggttcatttggacaaagcacagcagaacaatgtggaacacaaggttgaaactttttctggtgtctataagaagctcacgggcaaggatgttaattttgaattcccagagtttcaattgtaaacaaaaatgactaaataaaaagtatatattcacagtaaaaaaaaaaaaaagaaaaaacaaaaaaaaaaaaaaaaaaaaaaaaaaaaaaaaaaaaaaaaaaaaagaagaaacaaagtaaaacaacaaaaacacaacaaaaaaaaaaaaaaaaacctttgtcggccctcttggcccaataagattaaagcctggaacaagtttcgtccctgcgcccaaattgggggctcattgggccaattcccctaaagggggggccttttaacagtccgggggccggttttaacacaacgtggaatggaaccttgggtgtaccttaagtgcggttgggaacttctcttc

SEQ ID NO: 297388 - DNA, 843 bp, Homo sapiens
  misc_feature (826)..(826): n is a, c, g, or t
aagacactcgtccccagagccgcttcctgggactctctagcctcctaccgcttctcagtgatgttccggtttccgccctcctcctcggctgtttccgcctcttgccttcggacgccggattttgacgtgctctcgcgagatttgggtctcttcctaagccggcgctcggcaagttctcccaggagaaagccatgttcagttcgagcgccaagatcgtgaagcccaatggcgagaagccggacgagttcgagtccggcatctcccaggctcttctggagctggagatgaactcggacctcaaggctcagctcagggagctgaatattacggcagctaaggaaattgaagttggtggtggtcggaaagctatcataatctttgttcccgttcctcaactgaaatctttccagaaaatccaagtccggctagtacgcgaattggagaaaaagttcagtgggaagcatgtcgtctttatcgctcagaggagaattctgcctaagccaactcgaaaaagccgtacaaaaaataagcaaaagcgtcccaggagccgtactctgacagctgtgcacgatgccatccttgaggacttggtcttcccaagcgaaattgtgggcaagagaatccgcgtcaaactagatggcagccggctcataaaggttcatttggacaaagcacagcagaacaatgtggaacacaaggttgaaactttttctggtgtctataagaagctcacgggcaaggatgttaattttgaattcccagagtttcaattgtaaacaaaaatgactaaataaaaagtatatattcacagtaaaaaaaagtcgcncggccgcgaatttagta

SEQ ID NO: 297389 - DNA, 1064 bp, Homo sapiens
aagacactcgtccccagagccgcttcctgggactctctagcctcctaccgcttctcagtgatgttccggtttccgccctcctcctcggctgtttccgcctcttgccttcggacgccggattttgacgtgctctcgcgagatttgggtctcttcctaagccggcgctcggcaagttctcccaggagaaagccatgttcagttcgagcgccaagatcgtgaagcccaatggcgagaagccggacgagttcgagtccggcatctcccaggctcttctggagctggagatgaactcggacctcaaggctcagctcagggagctgaatattacggcagctaaggaaattgaagttggtggtggtcggaaagctatcataatctttgttcccgttcctcaactgaaatctttccagaaaatccaagtccggctagtacgcgaattggagaaaaagttcagtgggaagcatgtcgtctttatcgctcagaggagaattctgcctaagccaactcgaaaaagccgtacaaaaaataagcaaaagcgtcccaggagccgtactctgacagctgtgcacgatgccatccttgaggacttggtcttcccaagcgaaattgtgggcaagagaatccgcgtcaaactagatggcagccggctcataaaggttcatttggacaaagcacagcagaacaatgtggaacacaaggttgaaactttttctggtgtctataagaagctcacgggcaaggatgttaattttgaattcccagagtttcaattgtaaacaaaaatgactaaataaaaagtatatattcacagtgaaaaaagagagatgatggagaaagggaaggagggaaggaagacaaaaaggggcgcgacaaaaaagatcccgagggagccaaagaagcgacacagattttggcaaaagcggcccatagggaggcaatataacgcggacggagcccaggtaaaacacaggagaggaacaagacagcgcaatcagggaggcaccaccggcggggaccatggacacccacgaaaatacgcgagggtacaacaagagagaggacgc

SEQ ID NO: 297390 - DNA, 986 bp, Homo sapiens
aagacactcgtccccagagccgcttcctgggactctctagcctcctaccgcttctcagtgatgttccggtttccgccctcctcctcggctgtttccgcctcttgccttcggacgccggattttgacgtgctctcgcgagatttgggtctcttcctaagccggcgctcggcaagttctcccaggagaaagccatgttcagttcgagcgccaagatcgtgaagcccaatggcgagaagccggacgagttcgagtccggcatctcccaggctcttctggagctggagatgaactcggacctcaaggctcagctcagggagctgaatattacggcagctaaggaaattgaagttggtggtggtcggaaagctatcataatctttgttcccgttcctcaactgaaatctttccagaaaatccaagtccggctagtacgcgaattggagaaaaagttcagtgggaagcatgtcgtctttatcgctcagaggagaattctgcctaagccaactcgaaaaagccgtacaaaaaataagcaaaagcgtcccaggagccgtactctgacagctgtgcacgatgccatccttgaggacttggtcttcccaagcgaaattgtgggcaagagaatccgcgtcaaactagatggcagccggctcataaaggttcatttggacaaagcacagcagaacaatgtggaacacaaggttgaaactttttctggtgtctataagaagctcacgggcaaggatgttaattttgaattcccagagtttcaattgtaaacaaaaatgactaaataaaaagtatatattcacagtaaaacacaagagaaaaactctgaggggggccggtaccaatcgcgcctatagaggccgattacaacacgggcggggtagcgggagggaacccgggtcccaatacccgtgagaaccgtgcgcgggggtaagaaagaggcggtgcccaacaggacggagaaggcaacggctgcgacg

SEQ ID NO: 297391 - DNA, 1035 bp, Homo sapiens
aagacactcgtccccagagccgcttcctgggactctctagcctcctaccgcttctcagtgatgttccggtttccgccctcctcctcggctgtttccgcctcttgccttcggacgccggattttgacgtgctctcgcgagatttgggtctcttcctaagccggcgctcggcaagttctcccaggagaaagccatgttcagttcgagcgccaagatcgtgaagcccaatggcgagaagccggacgagttcgagtccggcatctcccaggctcttctggagctggagatgaactcggacctcaaggctcagctcagggagctgaatattacggcagctaaggaaattgaagttggtggtggtcggaaagctatcataatctttgttcccgttcctcaactgaaatctttccagaaaatccaagtccggctagtacgcgaattggagaaaaagttcagtgggaagcatgtcgtctttatcgctcagaggagaattctgcctaagccaactcgaaaaagccgtacaaaaaataagcaaaagcgtcccaggagccgtactctgacagctgtgcacgatgccatccttgaggacttggtcttcccaagcgaaattgtgggcaagagaatccgcgtcaaactagatggcagccggctcataaaggttcatttggacaaagcacagcagaacaatgtggaacacaaggttgaaactttttctggtgtctataagaagctcacgggcaaggatgttaattttgaattcccagagtttcaattgtaaacaaaaatgactaaataaaaagtatatattcacagtaaaacaacaaaaacacaacaaaaaaaaaaaaaaaaacctttgtcggccctcttggcccaataagattaaagcctggaacaagtttcgtccctgcgcccaaattgggggctcattgggccaattcccctaaagggggggccttttaacagtccgggggccggttttaacacaacgtggaatggaaccttgggtgtaccttaagtgcggttgggaacttctcttc

SEQ ID NO: 297392 - DNA, 863 bp, Homo sapiens
  misc_feature (815)..(815): n is a, c, g, or t
aagacactcgtccccagagccgcttcctgggactctctagcctcctaccgcttctcagtgatgttccggtttccgccctcctcctcggctgtttccgcctcttgccttcggacgccggattttgacgtgctctcgcgagatttgggtctcttcctaagccggcgctcggcaagttctcccaggagaaagccatgttcagttcgagcgccaagatcgtgaagcccaatggcgagaagccggacgagttcgagtccggcatctcccaggctcttctggagctggagatgaactcggacctcaaggctcagctcagggagctgaatattacggcagctaaggaaattgaagttggtggtggtcggaaagctatcataatctttgttcccgttcctcaactgaaatctttccagaaaatccaagtccggctagtacgcgaattggagaaaaagttcagtgggaagcatgtcgtctttatcgctcagaggagaattctgcctaagccaactcgaaaaagccgtacaaaaaataagcaaaagcgtcccaggagccgtactctgacagctgtgcacgatgccatccttgaggacttggtcttcccaagcgaaattgtgggcaagagaatccgcgtcaaactagatggcagccggctcataaaggttcatttggacaaagcacagcagaacaatgtggaacacaaggttgaaactttttctggtgtctataagaagctcacgggcaaggatgttaattttgaattcccagagtttcaattgtaaacaaaaatgactaaataaaaagtatatattcacagtggngaaaaaaagagcctcccacctcgagggggtggccccgggtccccaatt

SEQ ID NO: 297393 - DNA, 784 bp, Homo sapiens
aagacactcgtccccagagccgcttcctgggactctctagcctcctaccgcttctcagtgatgttccggtttccgccctcctcctcggctgtttccgcctcttgccttcggacgccggattttgacgtgctctcgcgagatttgggtctcttcctaagccggcgctcggcaagttctcccaggagaaagccatgttcagttcgagcgccaagatcgtgaagcccaatggcgagaagccggacgagttcgagtccggcatctcccaggctcttctggagctggagatgaactcggacctcaaggctcagctcagggagctgaatattacggcagctaaggaaattgaagttggtggtggtcggaaagctatcataatctttccagaaaatccaagtccggctagtacgcgaattggagaaaaagttcagtgggaagcatgtcgtctttatcgctcagaggagaattctgcctaagccaactcgaaaaagccgtacaaaaaataagcaaaagcgtcccaggagccgtactctgacagctgtgcacgatgccatccttgaggacttggtcttcccaagcgaaattgtgggcaagagaatccgcgtcaaactagatggcagccggctcataaaggttcatttggacaaagcacagcagaacaatgtggaacacaaggttgaaactttttctggtgtctataagaagctcacgggcaaggatgttaattttgaattcccagagtttcaattgtaaacaaaaatgactaaataaaaagtatatattcaca

SEQ ID NO: 297394 - DNA, 715 bp, Homo sapiens
gcggccgcctactactactactactactgctcgaattcaagcttctaacgatgtacggggacatgtcgtctttatcgctcagaggagaattctgcctaagccaactcgaaaaagccgtacaaaaaataagcaaaagcgtcccaggagccgtactctgacagctgtgcacgatgccatccttgaggacttggtcttcccaagcgaaattgtgggcaagagaatccgcgtcaaactagatggcagccggctcataaaggttcatttggacaaagcacagcagaacaatgtggaacacaaggttgaaactttttctggtgtctataagaagctcacgggcaaggatgttaattttgaattcccagagtttcaattgtaaacaaaaatgactaaataaaaagtatatattcacagtaaaaaaaaaaaaaagaaaaaacaaaaaaaaaaaaaaaaaaaaaaaaaaaaaaaaaaaaaaaaaaaaagaagaaacaaagtaaaacaacaaaaacacaacaaaaaaaaaaaaaaaaacctttgtcggccctcttggcccaataagattaaagcctggaacaagtttcgtccctgcgcccaaattgggggctcattgggccaattcccctaaagggggggccttttaacagtccgggggccggttttaacacaacgtggaatggaaccttgggtgtaccttaagtgcggttgggaacttctcttc

SEQ ID NO: 297395 - DNA, 732 bp, Homo sapiens
aagacactcgtccccagagccgcttcctgggactctctagcctcctaccgcttctcagtgatgttccggtttccgccctcctcctcggctgtttccgcctcttgccttcggacgccggattttgacgtgctctcgcgagatttgggtctcttcctaagccggcgctcggcaagttctcccaggagaaagccatgttcagttcgagcgccaagatcgtgaagcccaatggcgagaagccggacgagttcgagtccggcatctcccaggctcttctggagctggagatgaactcggacctcaaggctcagctcagggagctgaatattacggcagctaaggaaattgaagttggtggtggtcggaaagctatcataatctttgttcccgttcctcaactgaaatctttccagaaaatccaagtccggctagtacgcgaattggagaaaaagttcagtgggaagcatgtcgtctttatcgctcagaggagaattctgcctaagccaactcgaaaaagccgtacaaaaaataatgtgggcaagagaatccgcgtcaaactagatggcagccggctcataaaggttcatttggacaaagcacagcagaacaatgtggaacacaaggttgaaactttttctggtgtctataagaagctcacgggcaaggatgttaattttgaattcccagagtttcaattgtaaacaaaaatgactaaataaaaagtatatattcaca

SEQ ID NO: 297396 - DNA, 588 bp, Homo sapiens
aagacactcgtccccagagccgcttcctgggactctctagcctcctaccgcttctcagtgatgttccggtttccgccctcctcctcggctgtttccgcctcttgccttcggacgccggattttgacgtgctctcgcgagatttgggtctcttcctaagccggcgctcggcaagttctcccaggagaaagccatgttcagttcgagcgccaagatcgtgaagcccaatggcgagaagccggacgagttcgagtccggcatctcccaggctcttctggagctggagatgaactcggacctcaaggctcagctcagggagctgaatattacggcagctaaggaaattgaagttggtggtggtcggaaagctatcataatctttgttcccgttcctcaactgaaatctttccagaaaatccaagtccggctagtacgcgaattggagaaaaagttcagtgggaagcatgtcgtctttatcgctcagaggagaattctgcctaagccaaccgtggactagtagccaaccgtggactagtagcaaaccgtggactagtagccaaccgtggactagtagccaaccgtggactagt

SEQ ID NO: 297397 - DNA, 733 bp, Homo sapiens
aagacactcgtccccagagccgcttcctgggactctctagcctcctaccgcttctcagtgatgttccggtttccgccctcctcctcggctgtttccgcctcttgccttcggacgccggattttgacgtgctctcgcgagatttgggtctcttcctaagccggcgctcggcaagttctcccaggagaaagccatgttcagttcgagcgccaagatcgtgaagcccaatggcgagaagccggacgagttcgagtccggcatctcccaggctcttctggagctggagatgaactcggacctcaaggctcagctcagggagctgaatattacggcagctaaggaaattgaagttggtggtggtcggaaagctatcataatctttgttcccgttcctcaactgaaatctttccagaaaatccaagtccggctagtacgcgaattggagaaaaagttcagtgggaagcatgtcgtctttatcgctcaggtatctgttctactgttgcagcacgtttctgtttgtgaattttgctaaaattgcttgtatttagactgcattggtagttggagtcatgaaaacaatccttttatgaatccaattgggtagaaagataaagtacaggcagagcgccgtggcttaggcctgtaatcccagcacggggaggtggaggcgggtggatcactgtagagaccagcctgggcaacatggtaagcagcaagcgggtaacctctaggtca

SEQ ID NO: 297398 - DNA, 277 bp, Homo sapiens
  misc_feature (260)..(260): n is a, c, g, or t
gcggccgcctactactactaaattcgcggccgcgtcgacagtgtgggcaagagaatccgcgtcaaactagatggcagccggctcataaaggttcatttggacaaagcacagcagaacaatgtggaacacaaggttgaaactttttctggtgtctataagaagctcacgggcaaggatgttaattttgaattcccagagtttcaattgtaaacaaaaatgactaaataaaaagtatatattcacagtaaaaaaaagtcgcncggccgcgaatttagta

SEQ ID NO: 297399 - DNA, 1469 bp, Homo sapiens
aaaaaaaaaaaagaaagaaaaaagaaaaagaaaagaacagagctgtgattttcagccaaaatgagcagccctggcccattctgtgtcatcagaggggagaggacggttactgtgggagggggcttcagcttctcagggaggtcctggcggcccccatctagtaaaccagtaaacccatgcctatcctcatgcccacgtcacactcttgtgggtttcaagtcgaacagtaaaaggaatcataagatctgtggggaagctacatgggcactcgtgtttcacaacagggacccttaaaggcgatgtttccagcaaaggatgtgattttttttttttttttttttgagataagttctcactgcgttgcctaggctggagtgcagtggtcattcacagacacacacatagcagactacagactacagccttgaactcctggggctcaagtgatccacccacttctgtatcctgagtccctggaacggcaggtgcacaccaccgcacccggcttggatgtgatcttttgtccacattcttttccaattggttcaaaggtgtaggtgtgccttttgcatacctgggaagggccccattaggctcgactcctcatttttctccattcaccatcagtttgagtctgaattcatagcatggcctggacagatgcagcaaggggccagttccaaggcagaattcagggtgaactcgattcctataggcttgggatgaatggctgctgggacatgaggcttgggtgtgagatgccccgtctgctgctgctcttggttcttagttcagagaaattctgggacccttcctcctcccggcaccacgttttcagtgaatggttctttgaagaggaaccctggtccataggaactgagtgaaagcaaggccaagtatgtccacccatggggacaaacgtcccagcacaaaggggtctcaggcctgcaaggcccaagtggacgctcggacaagggcaggaaggtatttgctgattctccttctccatgtgacgtgtctctcaacccacaccagctaggggagcctcccgcagcttcagttcccctttgacgcccacacagtgttatgcaagcaccgagcccagagtcccgctgggccgtggtgtcctaattgtcttggtgacaaagagcaattttattttaaagcaactgaatcctttccccctgttttgtgtgccagtattttactgtcttcttaattgttttaagcaatgtttactttggatttctggatgttatataaaagccacgaaaaccctggccatgctgtttgtcaggcccacctggctgagtgcaggaagcaagcgcttttcaggagctcactgcaacaccgggcaaacacttcttccgccagggatgcggttaggacaatgccacgtggcgtcacagtatgctgttatttattccaataaagacctcgtgagcatgggcctgtcacaccgtctttgt

SEQ ID NO: 297400 - DNA, 4623 bp, Homo sapiens
ccgcggcggagccagaggctgcaggaagagcccgcgggggcccggagggtgcgattcctcggcccccgcaaaacaatgtgtgttgtgagccaggacgcaacttgccggaggcggcgggggcgcgccgagcccgcctgagaccgcgctgaccttctccccccgccgtccgttgggcccgagcgcccagctcctcgctccccagttcgcgggggccgggccgagccgcggggcggggccgcccctccgtcgccgctgcctcctcccccacccccagccgcggaggatgcggacggcccccggcggcgtctagcggccccgggcccaggcgcgatggtgcagcagcggggcgcgagggccaagcgggacggcgggccgccgcccccgggacccgggccggccgaggagggggcgcgcgagcccggctggtgcaagaccccgagcggccacatcaagaggccgatgaacgcattcatggtgtggtcgcagcacgaacggcggaagatcatggaccagtggcccgacatgcacaacgccgagatctccaagcgcctgggccgccgctggcagctgctgcaggactcggagaagatcccgttcgtgcgggaggcggagcggctgcggctcaagcacatggcggattacccggactacaagtaccggccgcgcaaaaagagcaagggggcgcccgccaaggcgcggccccgcccccccggtggtagcggtggcggcagccggctcaagcccgggccgcagctgcctggccgcgggggccgccgagcagcgggagggcctttggggggcggggcggcggcgcccgaggacgacgatgaagacgacgacgaggagctgctggaagtgcgcctggtcgagaccccggggcgggagctgtggaggatggtcccggcgggacgggccgctcggggacaagcggagccgcgcccaagggccgtcgggcgagggggcggccgccgccgccgccgcctccccgacaccgtcggaggacgaggagccggaggaagaggaggaggaggcggcagcggctgaggaaggtgaagaggagacggtggcgtcgggggaggagtcgctgggctttctgtccaggctgccccctggcccggccggcctggactgcagcgccctggatcgcgacccggacctgcagcctccctcgggcacgtcgcacttcgagttcccggactactgcacccccgaggttaccgagatgatcgcgggggactggcgcccgtctagcatcgcagacctggttttcacctactgagcccaccgtcagcggggcgcgcacgcccccaaaccagctgtttacatacaggaatcaggtattggggcccctcggaggccgaggctggcaccccatctcccgcgcagcctgccccctcctggacgtgcccatcccccctcagatccagacatgcccctcccccgcagacacaccccaaggcagtccaacccccaccccttccccgacacccaagcccctccccacgtcgccccctcctgcacagccaccagcagccagccccctccgatacacctcccgtcctctcctacagacctgcacccctccccccttttgcacacgcccctcctcgtggccggaggaccgccccctcctttgctccggaatctctcctccctcgcccggcccgccttctctgggttaggggggcgatgcggccgggtggcaacgcacgcgcctcctgcgcccctcccttccctggggggaggggcgcaccccttttatccccggagcgctagggcccgcccctccgctggggcccacccccttcgtgcgcatgcttaatgcttctggggaggagggggctggtcccagcggagccgcactcttcgcccgctccgggcaaaagcgggggcgagtgtagagcgatcctgggaaatcctttgatccgggagccctaggtttcctctccagccaacggggcgtcgctgccttaatgggaggagcactcggaagggttggtttgggcctgaaactctcccaagtggcatagccccttttccggtatggggtctcctacacccacgcgcaccacctctccggtcgcgtggctgcctctacagcctacctatacgtccctttttccccccaactgggaattgagaggtaaggtctttctctggaaatccagcagtagaggaagggaccacccaagaaaactaaaaaccaaggcaccttaccagtctgtctggggacaggatccctgctgcaccttccccaccccctcctgggaagtgccccctcacctcagggcacccgcaacctgggctcctccctgagcgcaccggcccttcctgtcacccaggtccaccctcagtactcaagctgcagtatacagcgggaaaaactgaggcactttggtgctaggggtttgggactgaggcgtggagagcagatgtgatggcaggaagactctcgcttttaaacatctggtttgggagagaccatcgacttggccagtgagactgagaatggattccgagtagtgatgggccgtttgcacctcggtttttccacgtgagaaatggggagaacgctgctgttaggaggaagttgtgtccagttcagggtgccctcgggagccctgtccctgttgctgtggcccctctcacgccgccatctctctgccccgccccgcccctccggcctccccacaccccccttgccctcactacctgtatctcaccggcgtgtgttcaccctcccgggtggctcacacactctcattcacacacacaaatctcaggaacaaacggtcccagagtcctccggacccctgcccagggtctctgcaggtctctgccccacgcgttcccgtcgctgacaaagccaccagctgcctcctttaagcttggtgctccggctctgggcctttcttgcgctctattttttttttttttttttttaagaaaaacaacaacaacaaaaaaagacaatgaaaaaaaaaacgtcatgtgagtgaagagatgtcactgtctgtggtcttggagaactagtctcgtagctgaggggtggggtccctctgtctggggcactggcacccacagcaggactccgccagtctgatgccaggactgaataaagtgtatttgccccgaccttgccctgtggttctgcatgtctgtgctcttcctcaaccctccctaaacagtttgccagattcaagtccgtgtgatttgggcccgagctgggtgtcccagggcaagccaccttgcctgtctaggcctctatgtcaggactccctggccttcatgaagaatagcaaactcatccctgtagggaccaggcaggtaacatagacgagtgactctgggtggacagtggtgtcatgacccacttcaaggggcctacctcctgccagttgtgaccctgtggaatgcagtccacagtggccaggtggccagatttttcaagaaaagctggatggatgtttctgagtcatcttaatttcaaaatgagactcatattttaaaatttctgtgggccaaatgaaacaagtatgcaggcaggtctggtccgagggggctggcttggccatgcctttctgtgcctttaatgaggactaagaagcaagattgggccacactgtctggactcaaagcccagctccaccactgagcacccgtgtgactctttccatatgtataacgtggggataataataatagctgcttcacaggatgaaatgaagtttgaggtgagaagcattcaccatggtgcccatcgtgttactccattgtcagaggaggaaacggggtcaggcaggaaagcaacttaaaggagggcctgcaagcagccagggtcagagacagggcttggttctgcttcctggtgaagcatggcttcggggtgctgcctctccctccctgtttgaatctgcagattgtgttaggcccccagctgagggcctggagtggtgggattggtcccagtgcctggcgcacattggcctgcagagtagattaactgaatgaccaaagagcaacagaagtctagtgattcttgtctttgaggttctgactggtgttttacaactgagtccaaggcttttccctcctttgtccctctgacacccctccccctaattctcatctgtcagatccagtgtattcctaagctgggacaaagcctctgttttcccagtaggagccagggctgagtgtggaaattacagtgactgcttcttctcagcttctctggttgaaagcaagctggcgaagtaagaggaggtagagttgagaaggtgtggaagatagggacagctgcccccagaactcccttcaagggaggacttccccagctatgggaagtgccatcagggtggccgcagctgcagagagccacttcacctgagaccacgcccttcctggggcagcctgtatctggtgtctgagtgaggcatggtataaacacctggtcatttcaatccaacatgggacggacactgacagacagtactcccagcaggcccaggccagccagggcttcgtcaggcctgcagcacaatttgacttcctatgcccaggcctgcttcctcttcttcctcttcttttcacaggtgcttattcctaataaacatcttgcaa

SEQ ID NO: 297401 - DNA, 4822 bp, Homo sapiens
ccgcggcggagccagaggctgcaggaagagcccgcgggggcccggagggtgcgattcctcggcccccgcaaaacaatgtgtgttgtgagccaggacgcaacttgccggaggcggcgggggcgcgccgagcccgcctgagaccgcgctgaccttctccccccgccgtccgttgggcccgagcgcccagctcctcgctccccagttcgcgggggccgggccgagccgcggggcggggccgcccctccgtcgccgctgcctcctcccccacccccagccgcggaggatgcggacggcccccggcggcgtctagcggccccgggcccaggcgcgatggtgcagcagcggggcgcgagggccaagcgggacggcgggccgccgcccccgggacccgggccggccgaggagggggcgcgcgagcccggctggtgcaagaccccgagcggccacatcaagaggccgatgaacgcattcatggtgtggtcgcagcacgaacggcggaagatcatggaccagtggcccgacatgcacaacgccgagatctccaagcgcctgggccgccgctggcagctgctgcaggactcggagaagatcccgttcgtgcgggaggcggagcggctgcggctcaagcacatggcggattacccggactacaagtaccggccgcgcaaaaagagcaagggggcgcccgccaaggcgcggccccgcccccccggtggtagcggtggcggcagccggctcaagcccgggccgcagctgcctggccgcgggggccgccgagcagcgggagggcctttggggggcggggcggcggcgcccgaggacgacgatgaagacgacgacgaggagctgctggaagtgcgcctggtcgagaccccggggcgggagctgtggaggatggtcccggcgggacgggccgctcggggacaagcggagccgcgcccaagggccgtcgggcgagggggcggccgccgccgccgccgcctccccgacaccgtcggaggacgaggagccggaggaagaggaggaggaggcggcagcggctgaggaaggtgaagaggagacggtggcgtcgggggaggagtcgctgggctttctgtccaggctgccccctggcccggccggcctggactgcagcgccctggatcgcgacccggacctgcagcctccctcgggcacgtcgcacttcgagttcccggactactgcacccccgaggttaccgagatgatcgcgggggactggcgcccgtctagcatcgcagacctggttttcacctactgagcccaccgtcagcggggcgcgcacgcccccaaaccagctgtttacatacaggaatcaggtattggggcccctcggaggccgaggctggcaccccatctcccgcgcagcctgccccctcctggacgtgcccatcccccctcagatccagacatgcccctcccccgcagacacaccccaaggcagtccaacccccaccccttccccgacacccaagcccctccccacgtcgccccctcctgcacagccaccagcagccagccccctccgatacacctcccgtcctctcctacagacctgcacccctccccccttttgcacacgcccctcctcgtggccggaggaccgccccctcctttgctccggaatctctcctccctcgcccggcccgccttctctgggttaggggggcgatgcggccgggtggcaacgcacgcgcctcctgcgcccctcccttccctggggggaggggcgcaccccttttatccccggagcgctagggcccgcccctccgctggggcccacccccttcgtgcgcatgcttaatgcttctggggaggagggggctggtcccagcggagccgcactcttcgcccgctccgggcaaaagcgggggcgagtgtagagcgatcctgggaaatcctttgatccgggagccctaggtttcctctccagccaacggggcgtcgctgccttaatgggaggagcactcggaagggttggtttgggcctgaaactctcccaagtggcatagccccttttccggtatggggtctcctacacccacgcgcaccacctctccggtcgcgtggctgcctctacagcctacctatacgtccctttttccccccaactgggaattgagaggtaaggtctttctctggaaatccagcagtagaggaagggaccacccaagaaaactaaaaaccaaggcaccttaccagtctgtctggggacaggatccctgctgcaccttccccaccccctcctgggaagtgccccctcacctcagggcacccgcaacctgggctcctccctgagcgcaccggcccttcctgtcacccaggtccaccctcagtactcaagctgcagtatacagcgggaaaaactgaggcactttggtgctaggggtttgggactgaggcgtggagagcagatgtgatggcaggaagactctcgcttttaaacatctggtttgggagagaccatcgacttggccagtgagactgagaatggattccgagtagtgatgggccgtttgcacctcggtttttccacgtgagaaatggggagaacgctgctgttaggaggaagttgtgtccagttcagggtgccctcgggagccctgtccctgttgctgtggcccctctcacgccgccatctctctgccccgccccgcccctccggcctccccacaccccccttgccctcactacctgtatctcaccggcgtgtgttcaccctcccgggtggctcacacactctcattcacacacacaaatctcaggaacaaacggtcccagagtcctccggacccctgcccagggtctctgcaggtctctgccccacgcgttcccgtcgctgacaaagccaccagctgcctcctttaagcttggtgctccggctctgggcctttcttgcgctctattttttttttttttttttttaagaaaaacaacaacaacaaaaaaagacaatgaaaaaaaaaacgtcatgtgagtgaagagatgtcactgtctgtggtcttggagaactagtctcgtagctgaggggtggggtccctctgtctggggcactggcacccacagcaggactccgccagtctgatgccaggactgaataaagtgtatttgccccgaccttgccctgtggttctgcatgtctgtgctcttcctcaaccctccctaaacagtttgccagattcaagtccgtgtgatttgggcccgagctgggtgtcccagggcaagccaccttgcctgtctaggcctctatgtcaggactccctggccttcatgaagaatagcaaactcatccctgtagggaccaggcaggtaacatagacgagtgactctgggtggacagtggtgtcatgacccacttcaaggggcctacctcctgccagttgtgaccctgtggaatgcagtccacagtggccaggtggccagatttttcaagaaaagctggatggatgtttctgagtcatcttaatttcaaaatgagactcatattttaaaatttctgtgggccaaatgaaacaagtatgcaggcaggtctggtccgagggggctggcttggccatgcctttctgtgcctttaatgaggactaagaagcaagattgggccacactgtctggactcaaagcccagctccaccactgagcacccgtgtgactctttccatatgtataacgtggggataataataatagctgcttcacaggatgaaatgaagtttgaggtgagaagcattcaccatggtgcccatcgtgttactccattgtcagaggaggaaacggggtcaggcaggaaagcaacttaaaggagggcctgcaagcagccagggtcagagacagggcttggttctgcttcctggtgaagcatggcttcggggtgctgcctctccctccctgtttgaatctgcagattgtgttaggcccccagctgagggcctggagtggtgggattggtcccagtgcctggcgcacattggcctgcagagtagattaactgaatgaccaaagagcaacagaagtctagtgattcttgtctttgaggttctgactggtgttttacaactgagtccaaggcttttccctcctttgtccctctgacacccctccccctaattctcatctgtcagatccagtgtattcctaagctgggacaaagcctctgttttcccagtaggagccagggctgagtgtggaaattacagtgactgcttcttctcagcttctctggttgaaagcaagctggcgaagtaagaggaggtagagttgagaaggtgtggaagatagggacagctgcccccagaactcccttcaagggaggacttccccagctatgggaagtgccatcagggtggccgcagctgcagagagccacttcacctgagaccacgcccttcctggggcagcctgtatctggtgtctgagtgaggcatggtataaacacctggtcatttcaatccaacatgggacggacactgacagacagtactcccagcaggcccaggccagccagggcttcgtcaggcctgcagcacaatttgacttcctatgcccaggcctgcttcctcttcttcctcttcttttcacaggtgcttattcctaataaacatcttgcaacccaaactcagtctcattgtctgtttctagagaaacccagtctacaacagagggttcaagagactggacaaagggaattgggtcagtggcccagcaactgcagctaggccggtcggatgtatcctaatgtcagaaggttctggtgtgaactttgagttcagaaaagaacaagactcaggtggtgggggtaccagcggag

SEQ ID NO: 297402 - DNA, 3218 bp, Homo sapiens
ccgcggcggagccagaggctgcaggaagagcccgcgggggcccggagggtgcgattcctcggcccccgcaaaacaatgtgtgttgtgagccaggacgcaacttgccggaggcggcgggggcgcgccgagcccgcctgagaccgcgctgaccttctccccccgccgtccgttgggcccgagcgcccagctcctcgctccccagttcgcgggggccgggccgagccgcggggcggggccgcccctccgtcgccgctgcctcctcccccacccccagccgcggaggatgcggacggcccccggcggcgtctagcggccccgggcccaggcgcgatggtgcagcagcggggcgcgagggccaagcgggacggcgggccgccgcccccgggacccgggccggccgaggagggggcgcgcgagcccggctggtgcaagaccccgagcggccacatcaagaggccgatgaacgcattcatggtgtggtcgcagcacgaacggcggaagatcatggaccagtggcccgacatgcacaacgccgagatctccaagcgcctgggccgccgctggcagctgctgcaggactcggagaagatcccgttcgtgcgggaggcggagcggctgcggctcaagcacatggcggattacccggactacaagtaccggccgcgcaaaaagagcaagggggcgcccgccaaggcgcggccccgcccccccggtggtagcggtggcggcagccggctcaagcccgggccgcagctgcctggccgcgggggccgccgagcagcgggagggcctttggggggcggggcggcggcgcccgaggacgacgatgaagacgacgacgaggagctgctggaagtgcgcctggtcgagaccccggggcgggagctgtggaggatggtcccggcgggacgggccgctcggggacaagcggagccgcgcccaagggccgtcgggcgagggggcggccgccgccgccgccgcctccccgacaccgtcggaggacgaggagccggaggaagaggaggaggaggcggcagcggctgaggaaggtgaagaggagacggtggcgtcgggggaggagtcgctgggctttctgtccaggctgccccctggcccggccggcctggactgcagcgccctggatcgcgacccggacctgcagcctccctcgggcacgtcgcacttcgagttcccggactactgcacccccgaggttaccgagatgatcgcgggggactggcgcccgtctagcatcgcagacctggttttcacctactgagcccaccgtcagcggggcgcgcacgcccccaaaccagctgtttacatacaggaatcaggtattggggcccctcggaggccgaggctggcaccccatctcccgcgcagcctgccccctcctggacgtgcccatcccccctcagatccagacatgcccctcccccgcagacacaccccaaggcagtccaacccccaccccttccccgacacccaagcccctccccacgtcgccccctcctgcacagccaccagcagccagccccctccgatacacctcccgtcctctcctacagacctgcacccctccccccttttgcacacgcccctcctcgtggccggaggaccgccccctcctttgctccggaatctctcctccctcgcccggcccgccttctctgggttaggggggcgatgcggccgggtggcaacgcacgcgcctcctgcgcccctcccttccctggggggaggggcgcaccccttttatccccggagcgctagggcccgcccctccgctggggcccacccccttcgtgcgcatgcttaatgcttctggggaggagggggctggtcccagcggagccgcactcttcgcccgctccgggcaaaagcgggggcgagtgtagagcgatcctgggaaatcctttgatccgggagccctaggtttcctctccagccaacggggcgtcgctgccttaatgggaggagcactcggaagggttggtttgggcctgaaactctcccaagtggcatagccccttttccggtatggggtctcctacacccacgcgcaccacctctccggtcgcgtggctgcctctacagcctacctatacgtccctttttccccccaactgggaattgagaggtaaggtctttctctggaaatccagcagtagaggaagggaccacccaagaaaactaaaaaccaaggcaccttaccagtctgtctggggacaggatccctgctgcaccttccccaccccctcctgggaagtgccccctcacctcagggcacccgcaacctgggctcctccctgagcgcaccggcccttcctgtcacccaggtccaccctcagtactcaagctgcagtatacagcgggaaaaactgaggcactttggtgctaggggtttgggactgaggcgtggagagcagatgtgatggcaggaagactctcgcttttaaacatctggtttgggagagaccatcgacttggccagtgagactgagaatggattccgagtagtgatgggccgtttgcacctcggtttttccacgtgagaaatggggagaacgctgctgttaggaggaagttgtgtccagttcagggtgccctcgggagccctgtccctgttgctgtggcccctctcacgccgccatctctctgccccgccccgcccctccggcctccccacaccccccttgccctcactacctgtatctcaccggcgtgtgttcaccctcccgggtggctcacacactctcattcacacacacaaatctcaggaacaaacggtcccagagtcctccggacccctgcccagggtctctgcaggtctctgccccacgcgttcccgtcgctgacaaagccaccagctgcctcctttaagcttggtgctccggctctgggcctttcttgcgctctattttttttttttttttttttaagaaaaacaacaacaacaaaaaaagacaatgaaaaaaaaaacgtcatgtgagtgaagagatgtcactgtctgtggtcttggagaactagtctcgtagctgaggggtggggtccctctgtctggggcactggcacccacagcaggactccgccagtctgatgccaggactgaataaagtgtatttgccccgatcttgcttatattatcataaaaaggcttttttacccttcgggggggggcccggggccccaatttttcccctttaaggggagac

SEQ ID NO: 297403 - DNA, 3279 bp, Homo sapiens
  misc_feature (3159)..(3159): n is a, c, g, or t
ccgcggcggagccagaggctgcaggaagagcccgcgggggcccggagggtgcgattcctcggcccccgcaaaacaatgtgtgttgtgagccaggacgcaacttgccggaggcggcgggggcgcgccgagcccgcctgagaccgcgctgaccttctccccccgccgtccgttgggcccgagcgcccagctcctcgctccccagttcgcgggggccgggccgagccgcggggcggggccgcccctccgtcgccgctgcctcctcccccacccccagccgcggaggatgcggacggcccccggcggcgtctagcggccccgggcccaggcgcgatggtgcagcagcggggcgcgagggccaagcgggacggcgggccgccgcccccgggacccgggccggccgaggagggggcgcgcgagcccggctggtgcaagaccccgagcggccacatcaagaggccgatgaacgcattcatggtgtggtcgcagcacgaacggcggaagatcatggaccagtggcccgacatgcacaacgccgagatctccaagcgcctgggccgccgctggcagctgctgcaggactcggagaagatcccgttcgtgcgggaggcggagcggctgcggctcaagcacatggcggattacccggactacaagtaccggccgcgcaaaaagagcaagggggcgcccgccaaggcgcggccccgcccccccggtggtagcggtggcggcagccggctcaagcccgggccgcagctgcctggccgcgggggccgccgagcagcgggagggcctttggggggcggggcggcggcgcccgaggacgacgatgaagacgacgacgaggagctgctggaagtgcgcctggtcgagaccccggggcgggagctgtggaggatggtcccggcgggacgggccgctcggggacaagcggagccgcgcccaagggccgtcgggcgagggggcggccgccgccgccgccgcctccccgacaccgtcggaggacgaggagccggaggaagaggaggaggaggcggcagcggctgaggaaggtgaagaggagacggtggcgtcgggggaggagtcgctgggctttctgtccaggctgccccctggcccggccggcctggactgcagcgccctggatcgcgacccggacctgcagcctccctcgggcacgtcgcacttcgagttcccggactactgcacccccgaggttaccgagatgatcgcgggggactggcgcccgtctagcatcgcagacctggttttcacctactgagcccaccgtcagcggggcgcgcacgcccccaaaccagctgtttacatacaggaatcaggtattggggcccctcggaggccgaggctggcaccccatctcccgcgcagcctgccccctcctggacgtgcccatcccccctcagatccagacatgcccctcccccgcagacacaccccaaggcagtccaacccccaccccttccccgacacccaagcccctccccacgtcgccccctcctgcacagccaccagcagccagccccctccgatacacctcccgtcctctcctacagacctgcacccctccccccttttgcacacgcccctcctcgtggccggaggaccgccccctcctttgctccggaatctctcctccctcgcccggcccgccttctctgggttaggggggcgatgcggccgggtggcaacgcacgcgcctcctgcgcccctcccttccctggggggaggggcgcaccccttttatccccggagcgctagggcccgcccctccgctggggcccacccccttcgtgcgcatgcttaatgcttctggggaggagggggctggtcccagcggagccgcactcttcgcccgctccgggcaaaagcgggggcgagtgtagagcgatcctgggaaatcctttgatccgggagccctaggtttcctctccagccaacggggcgtcgctgccttaatgggaggagcactcggaagggttggtttgggcctgaaactctcccaagtggcatagccccttttccggtatggggtctcctacacccacgcgcaccacctctccggtcgcgtggctgcctctacagcctacctatacgtccctttttccccccaactgggaattgagaggtaaggtctttctctggaaatccagcagtagaggaagggaccacccaagaaaactaaaaaccaaggcaccttaccagtctgtctggggacaggatccctgctgcaccttccccaccccctcctgggaagtgccccctcacctcagggcacccgcaacctgggctcctccctgagcgcaccggcccttcctgtcacccaggtccaccctcagtactcaagctgcagtatacagcgggaaaaactgaggcactttggtgctaggggtttgggactgaggcgtggagagcagatgtgatggcaggaagactctcgcttttaaacatctggtttgggagagaccatcgacttggccagtgagactgagaatggattccgagtagtgatgggccgtttgcacctcggtttttccacgtgagaaatggggagaacgctgctgttaggaggaagttgtgtccagttcagggtgccctcgggagccctgtccctgttgctgtggcccctctcacgccgccatctctctgccccgccccgcccctccggcctccccacaccccccttgccctcactacctgtatctcaccggcgtgtgttcaccctcccgggtggctcacacactctcattcacacacacaaatctcaggaacaaacggtcccagagtcctccggacccctgcccagggtctctgcaggtctctgccccacgcgttcccgtcgctgacaaagccaccagctgcctcctttaagcttggtgctccggctctgggcctttcttgcgctctattttttttttttttttttttaagaaaaacaacaacaacaaaaaaagacaatgaaaaaaaaaacgtcatgtgagtgaagagatgtcactgtctgtggtcttggagaactagtctcgtagctgaggggtggggtccctctgtctggggcactggcacccacagcaggactccgccagtctgatgccaggactgaataaagtgtatttgccccgagggtgatggcagcaggcgcctgtnatcccagctactcagtaggctgaggcaggagaatggcttgaacccgggaggtggagcttgcagtgggtggagatcgcgccactgcactccagcctgggcgacagagcgagactccgtctg

SEQ ID NO: 297404 - DNA, 4467 bp, Homo sapiens
ccgcggcggagccagaggctgcaggaagagcccgcgggggcccggagggtgcgattcctcggcccccgcaaaacaatgtgtgttgtgagccaggacgcaacttgccggaggcggcgggggcgcgccgagcccgcctgagaccgcgctgaccttctccccccgccgtccgttgggcccgagcgcccagctcctcgctccccagttcgcgggggccgggccgagccgcggggcggggccgcccctccgtcgccgctgcctcctcccccacccccagccgcggaggatgcggacggcccccggcggcgtctagcggccccgggcccaggcgcgatggtgcagcagcggggcgcgagggccaagcgggacggcgggccgccgcccccgggacccgggccggccgaggagggggcgcgcgagcccggctggtgcaagaccccgagcggccacatcaagaggccgatgaacgcattcatggtgtggtcgcagcacgaacggcggaagatcatggaccagtggcccgacatgcacaacgccgagatctccaagcgcctgggccgccgctggcagctgctgcaggactcggagaagatcccgttcgtgcgggaggcggagcggctgcggctcaagcacatggcggattacccggactacaagtaccggccgcgcaaaaagagcaagggggcgcccgccaaggcgcggccccgcccccccggtggtagcggtggcggcagccggctcaagcccgggccgcagctgcctggccgcgggggccgccgagcagcgggagggcctttggggggcggggcggcggcgcccgaggacgacgatgaagacgacgacgaggagctgctggaagtgcgcctggtcgagaccccggggcgggagctgtggaggatggtcccggcgggacgggccgctcggggacaagcggagccgcgcccaagggccgtcgggcgagggggcggccgccgccgccgccgcctccccgacaccgtcggaggacgaggagccggaggaagaggaggaggaggcggcagcggctgaggaaggtgaagaggagacggtggcgtcgggggaggagtcgctgggctttctgtccaggctgccccctggcccggccggcctggactgcagccggggcgcgcacgcccccaaaccagctgtttacatacaggaatcaggtattggggcccctcggaggccgaggctggcaccccatctcccgcgcagcctgccccctcctggacgtgcccatcccccctcagatccagacatgcccctcccccgcagacacaccccaaggcagtccaacccccaccccttccccgacacccaagcccctccccacgtcgccccctcctgcacagccaccagcagccagccccctccgatacacctcccgtcctctcctacagacctgcacccctccccccttttgcacacgcccctcctcgtggccggaggaccgccccctcctttgctccggaatctctcctccctcgcccggcccgccttctctgggttaggggggcgatgcggccgggtggcaacgcacgcgcctcctgcgcccctcccttccctggggggaggggcgcaccccttttatccccggagcgctagggcccgcccctccgctggggcccacccccttcgtgcgcatgcttaatgcttctggggaggagggggctggtcccagcggagccgcactcttcgcccgctccgggcaaaagcgggggcgagtgtagagcgatcctgggaaatcctttgatccgggagccctaggtttcctctccagccaacggggcgtcgctgccttaatgggaggagcactcggaagggttggtttgggcctgaaactctcccaagtggcatagccccttttccggtatggggtctcctacacccacgcgcaccacctctccggtcgcgtggctgcctctacagcctacctatacgtccctttttccccccaactgggaattgagaggtaaggtctttctctggaaatccagcagtagaggaagggaccacccaagaaaactaaaaaccaaggcaccttaccagtctgtctggggacaggatccctgctgcaccttccccaccccctcctgggaagtgccccctcacctcagggcacccgcaacctgggctcctccctgagcgcaccggcccttcctgtcacccaggtccaccctcagtactcaagctgcagtatacagcgggaaaaactgaggcactttggtgctaggggtttgggactgaggcgtggagagcagatgtgatggcaggaagactctcgcttttaaacatctggtttgggagagaccatcgacttggccagtgagactgagaatggattccgagtagtgatgggccgtttgcacctcggtttttccacgtgagaaatggggagaacgctgctgttaggaggaagttgtgtccagttcagggtgccctcgggagccctgtccctgttgctgtggcccctctcacgccgccatctctctgccccgccccgcccctccggcctccccacaccccccttgccctcactacctgtatctcaccggcgtgtgttcaccctcccgggtggctcacacactctcattcacacacacaaatctcaggaacaaacggtcccagagtcctccggacccctgcccagggtctctgcaggtctctgccccacgcgttcccgtcgctgacaaagccaccagctgcctcctttaagcttggtgctccggctctgggcctttcttgcgctctattttttttttttttttttttaagaaaaacaacaacaacaaaaaaagacaatgaaaaaaaaaacgtcatgtgagtgaagagatgtcactgtctgtggtcttggagaactagtctcgtagctgaggggtggggtccctctgtctggggcactggcacccacagcaggactccgccagtctgatgccaggactgaataaagtgtatttgccccgaccttgccctgtggttctgcatgtctgtgctcttcctcaaccctccctaaacagtttgccagattcaagtccgtgtgatttgggcccgagctgggtgtcccagggcaagccaccttgcctgtctaggcctctatgtcaggactccctggccttcatgaagaatagcaaactcatccctgtagggaccaggcaggtaacatagacgagtgactctgggtggacagtggtgtcatgacccacttcaaggggcctacctcctgccagttgtgaccctgtggaatgcagtccacagtggccaggtggccagatttttcaagaaaagctggatggatgtttctgagtcatcttaatttcaaaatgagactcatattttaaaatttctgtgggccaaatgaaacaagtatgcaggcaggtctggtccgagggggctggcttggccatgcctttctgtgcctttaatgaggactaagaagcaagattgggccacactgtctggactcaaagcccagctccaccactgagcacccgtgtgactctttccatatgtataacgtggggataataataatagctgcttcacaggatgaaatgaagtttgaggtgagaagcattcaccatggtgcccatcgtgttactccattgtcagaggaggaaacggggtcaggcaggaaagcaacttaaaggagggcctgcaagcagccagggtcagagacagggcttggttctgcttcctggtgaagcatggcttcggggtgctgcctctccctccctgtttgaatctgcagattgtgttaggcccccagctgagggcctggagtggtgggattggtcccagtgcctggcgcacattggcctgcagagtagattaactgaatgaccaaagagcaacagaagtctagtgattcttgtctttgaggttctgactggtgttttacaactgagtccaaggcttttccctcctttgtccctctgacacccctccccctaattctcatctgtcagatccagtgtattcctaagctgggacaaagcctctgttttcccagtaggagccagggctgagtgtggaaattacagtgactgcttcttctcagcttctctggttgaaagcaagctggcgaagtaagaggaggtagagttgagaaggtgtggaagatagggacagctgcccccagaactcccttcaagggaggacttccccagctatgggaagtgccatcagggtggccgcagctgcagagagccacttcacctgagaccacgcccttcctggggcagcctgtatctggtgtctgagtgaggcatggtataaacacctggtcatttcaatccaacatgggacggacactgacagacagtactcccagcaggcccaggccagccagggcttcgtcaggcctgcagcacaatttgacttcctatgcccaggcctgcttcctcttcttcctcttcttttcacaggtgcttattcctaataaacatcttgcaa

SEQ ID NO: 297405 - DNA, 4362 bp, Homo sapiens
ccgcggcggagccagaggctgcaggaagagcccgcgggggcccggagggtgcgattcctcggcccccgcaaaacaatgtgtgttgtgagccaggacgcaacttgccggaggcggcgggggcgcgccgagcccgcctgagaccgcgctgaccttctccccccgccgtccgttgggcccgagcgcccagctcctcgctccccagttcgcgggggccgggccgagccgcggggcggggccgcccctccgtcgccgctgcctcctcccccacccccagccgcggaggatgcggacggcccccggcggcgtctagcggccccgggcccaggcgcgatggtgcagcagcggggcgcgagggccaagcgggacggcgggccgccgcccccgggacccgggccggccgaggagggggcgcgcgagcccggctggtgcaagaccccgagcggccacatcaagaggccgatgaacgcattcatggtgtggtcgcagcacgaacggcggaagatcatggaccagtggcccgacatgcacaacgccgagatctccaagcgcctgggccgccgctggcagctgctgcaggactcggagaagatcccgttcgtgcgggaggcggagcggctgcggctcaagcacatggcggattacccggactacaagtaccggccgcgcaaaaagagcaagggggcgcccgccaaggcgcggccccgcccccccggtggtagcggtggcggcagccggctcaagcccgggccgcagctgcctggccgcgggggccgccgagcagcgggagggcctttggggggcggggcggcggcgcccgaggacgacgatgaagacgacgacgaggagctgctggaagtgcgcctggtcgagaccccggggcgggagctgtggaggatggtcccggcgggacgggccgctcggggacaagcggagccgcgcccaagggccgtcgggcgagggggcggccgccgccgccgccgcctccccgacaccgtcggaggacgaggagccggaggaagaggaggaggaggcggcagcggctgaggaaggtgaagaggagacggtggcgtcgggggaggagtcgctgggctttctgtccaggctgccccctggcccggccggcctggactgcagcgccctggatcgcgacccggacctgcagcctccctcgggcacgtcgcacttcgagttcccggactactgcacccccgaggttaccgagatgatcgcgggggactggcgcccgtctagcatcgcagacctggttttcacctactgagcccaccgtcagcggggcgcgcacgcccccaaaccagctgtttacatacaggaatcaggtattggggcccctcggaggccgaggctggcaccccatctcccgcgcagcctgccccctcctggacgtgcccatcccccctcagatccagacatgcccctcccccgcagacacaccccaaggcagtccaacccccaccccttccccgacacccaagcccctccccacgtcgccccctcctgcacagccaccagcagccagccccctccgatacacctcccgtcctctcctacagacctgcacccctccccccttttgcacacgcccctcctcgtggccggaggaccgccccctcctttgctccggaatctctcctccctcgcccggcccgccttctctgggttaggggggcgatgcggccgggtggcaacgcacgcgcctcctgcgcccctcccttccctggggggaggggcgcaccccttttatccccggagcgctagggcccgcccctccgctggggcccacccccttcgtgcgcatgcttaatgcttctggggaggagggggctggtcccagcggagccgcactcttcgcccgctccgggcaaaagcgggggcgagtgtagagcgatcctgggaaatcctttgatccgggagccctaggtttcctctccagccaacggggcgtcgctgccttaatgggaggagcactcggaagggttggtttgggcctgaaactctcccaagtggcatagccccttttccggtatggggtctcctacacccacgcgcaccacctctccggtcgcgtggctgcctctacagcctacctatacgtccctttttccccccaactgggaattgagaggtaaggtctttctctggaaatccagcagtagaggaagggaccacccaagaaaactaaaaaccaaggcaccttaccagtctgtctggggacaggatccctgctgcaccttccccaccccctcctgggaagtgccccctcacctcagggcacccgcaacctgggctcctccctgagcgcaccggcccttcctgtcacccaggtccaccctcagtactcaagctgcagtatacagcgggaaaaactgaggcactttggtgctaggggtttgggactgaggcgtggagagcagatgtgatggcaggaagactctcgcttttaaacatctggtttgggagagaccatcgacttggccagtgagactgagaatggattccgagtagtgatgggccgtttgcacctcggtttttccacgtgagaaatggggagaacgctgctgttaggaggaagttgtgtccagttcagggtgccctcgggagccctgtccctgttgctgtggcccctctcacgccgccatctctctgccccgccccgcccctccggcctccccacaccccccttgccctcactacctgtatctcaccggcgtgtgttcaccctcccgggtggctcacacactctcattcacacacacaaatctcaggaacaaacggtccctctgtctggggcactggcacccacagcaggactccgccagtctgatgccaggactgaataaagtgtatttgccccgaccttgccctgtggttctgcatgtctgtgctcttcctcaaccctccctaaacagtttgccagattcaagtccgtgtgatttgggcccgagctgggtgtcccagggcaagccaccttgcctgtctaggcctctatgtcaggactccctggccttcatgaagaatagcaaactcatccctgtagggaccaggcaggtaacatagacgagtgactctgggtggacagtggtgtcatgacccacttcaaggggcctacctcctgccagttgtgaccctgtggaatgcagtccacagtggccaggtggccagatttttcaagaaaagctggatggatgtttctgagtcatcttaatttcaaaatgagactcatattttaaaatttctgtgggccaaatgaaacaagtatgcaggcaggtctggtccgagggggctggcttggccatgcctttctgtgcctttaatgaggactaagaagcaagattgggccacactgtctggactcaaagcccagctccaccactgagcacccgtgtgactctttccatatgtataacgtggggataataataatagctgcttcacaggatgaaatgaagtttgaggtgagaagcattcaccatggtgcccatcgtgttactccattgtcagaggaggaaacggggtcaggcaggaaagcaacttaaaggagggcctgcaagcagccagggtcagagacagggcttggttctgcttcctggtgaagcatggcttcggggtgctgcctctccctccctgtttgaatctgcagattgtgttaggcccccagctgagggcctggagtggtgggattggtcccagtgcctggcgcacattggcctgcagagtagattaactgaatgaccaaagagcaacagaagtctagtgattcttgtctttgaggttctgactggtgttttacaactgagtccaaggcttttccctcctttgtccctctgacacccctccccctaattctcatctgtcagatccagtgtattcctaagctgggacaaagcctctgttttcccagtaggagccagggctgagtgtggaaattacagtgactgcttcttctcagcttctctggttgaaagcaagctggcgaagtaagaggaggtagagttgagaaggtgtggaagatagggacagctgcccccagaactcccttcaagggaggacttccccagctatgggaagtgccatcagggtggccgcagctgcagagagccacttcacctgagaccacgcccttcctggggcagcctgtatctggtgtctgagtgaggcatggtataaacacctggtcatttcaatccaacatgggacggacactgacagacagtactcccagcaggcccaggccagccagggcttcgtcaggcctgcagcacaatttgacttcctatgcccaggcctgcttcctcttcttcctcttcttttcacaggtgcttattcctaataaacatcttgcaa

SEQ ID NO: 297406 - DNA, 3128 bp, Homo sapiens
ccgcggcggagccagaggctgcaggaagagcccgcgggggcccggagggtgcgattcctcggcccccgcaaaacaatgtgtgttgtgagccaggacgcaacttgccggaggcggcgggggcgcgccgagcccgcctgagaccgcgctgaccttctccccccgccgtccgttgggcccgagcgcccagctcctcgctccccagttcgcgggggccgggccgagccgcggggcggggccgcccctccgtcgccgctgcctcctcccccacccccagccgcggaggatgcggacggcccccggcggcgtctagcggccccgggcccaggcgcgatggtgcagcagcggggcgcgagggccaagcgggacggcgggccgccgcccccgggacccgggccggccgaggagggggcgcgcgagcccggctggtgcaagaccccgagcggccacatcaagaggccgatgaacgcattcatggtgtggtcgcagcacgaacggcggaagatcatggaccagtggcccgacatgcacaacgccgagatctccaagcgcctgggccgccgctggcagctgctgcaggactcggagaagatcccgttcgtgcgggaggcggagcggctgcggctcaagcacatggcggattacccggactacaagtaccggccgcgcaaaaagagcaagggggcgcccgccaaggcgcggccccgcccccccggtggtagcggtggcggcagccggctcaagcccgggccgcagctgcctggccgcgggggccgccgagcagcgggagggcctttggggggcggggcggcggcgcccgaggacgacgatgaagacgacgacgaggagctgctggaagtgcgcctggtcgagaccccggggcgggagctgtggaggatggtcccggcgggacgggccgctcggggacaagcggagccgcgcccaagggccgtcgggcgagggggcggccgccgccgccgccgcctccccgacaccgtcggaggacgaggagccggaggaagaggaggaggaggcggcagcggctgaggaaggtgaagaggagacggtggcgtcgggggaggagtcgctgggctttctgtccaggctgccccctggcccggccggcctggactgcagcgccctggatcgcgacccggacctgcagcctccctcgggcacgtcgcacttcgagttcccgacaccccccttgccctcactacctgtatctcaccggcgtgtgttcaccctcccgggtggctcacacactctcattcacacacacaaatctcaggaacaaacggtcccagagtcctccggacccctgcccagggtctctgcaggtctctgccccacgcgttcccgtcgctgacaaagccaccagctgcctcctttaagcttggtgctccggctctgggcctttcttgcgctctattttttttttttttttttttaagaaaaacaacaacaacaaaaaaagacaatgaaaaaaaaaacgtcatgtgagtgaagagatgtcactgtctgtggtcttggagaactagtctcgtagctgaggggtggggtccctctgtctggggcactggcacccacagcaggactccgccagtctgatgccaggactgaataaagtgtatttgccccgaccttgccctgtggttctgcatgtctgtgctcttcctcaaccctccctaaacagtttgccagattcaagtccgtgtgatttgggcccgagctgggtgtcccagggcaagccaccttgcctgtctaggcctctatgtcaggactccctggccttcatgaagaatagcaaactcatccctgtagggaccaggcaggtaacatagacgagtgactctgggtggacagtggtgtcatgacccacttcaaggggcctacctcctgccagttgtgaccctgtggaatgcagtccacagtggccaggtggccagatttttcaagaaaagctggatggatgtttctgagtcatcttaatttcaaaatgagactcatattttaaaatttctgtgggccaaatgaaacaagtatgcaggcaggtctggtccgagggggctggcttggccatgcctttctgtgcctttaatgaggactaagaagcaagattgggccacactgtctggactcaaagcccagctccaccactgagcacccgtgtgactctttccatatgtataacgtggggataataataatagctgcttcacaggatgaaatgaagtttgaggtgagaagcattcaccatggtgcccatcgtgttactccattgtcagaggaggaaacggggtcaggcaggaaagcaacttaaaggagggcctgcaagcagccagggtcagagacagggcttggttctgcttcctggtgaagcatggcttcggggtgctgcctctccctccctgtttgaatctgcagattgtgttaggcccccagctgagggcctggagtggtgggattggtcccagtgcctggcgcacattggcctgcagagtagattaactgaatgaccaaagagcaacagaagtctagtgattcttgtctttgaggttctgactggtgttttacaactgagtccaaggcttttccctcctttgtccctctgacacccctccccctaattctcatctgtcagatccagtgtattcctaagctgggacaaagcctctgttttcccagtaggagccagggctgagtgtggaaattacagtgactgcttcttctcagcttctctggttgaaagcaagctggcgaagtaagaggaggtagagttgagaaggtgtggaagatagggacagctgcccccagaactcccttcaagggaggacttccccagctatgggaagtgccatcagggtggccgcagctgcagagagccacttcacctgagaccacgcccttcctggggcagcctgtatctggtgtctgagtgaggcatggtataaacacctggtcatttcaatccaacatgggacggacactgacagacagtactcccagcaggcccaggccagccagggcttcgtcaggcctgcagcacaatttgacttcctatgcccaggcctgcttcctcttcttcctcttcttttcacaggtgcttattcctaataaacatcttgcaa

SEQ ID NO: 297407 - DNA, 3081 bp, Homo sapiens
ccgcggcggagccagaggctgcaggaagagcccgcgggggcccggagggtgcgattcctcggcccccgcaaaacaatgtgtgttgtgagccaggacgcaacttgccggaggcggcgggggcgcgccgagcccgcctgagaccgcgctgaccttctccccccgccgtccgttgggcccgagcgcccagctcctcgctccccagttcgcgggggccgggccgagccgcggggcggggccgcccctccgtcgccgctgcctcctcccccacccccagccgcggaggatgcggacggcccccggcggcgtctagcggccccgggcccaggcgcgatggtgcagcagcggggcgcgagggccaagcgggacggcgggccgccgcccccgggacccgggccggccgaggagggggcgcgcgagcccggctggtgcaagaccccgagcggccacatcaagaggccgatgaacgcattcatggtgtggtcgcagcacgaacggcggaagatcatggaccagtggcccgacatgcacaacgccgagatctccaagcgcctgggccgccgctggcagctgctgcaggactcggagaagatcccgttcgtgcgggaggcggagcggctgcggctcaagcacatggcggattacccggactacaagtaccggccgcgcaaaaagagcaagggggcgcccgccaaggcgcggccccgcccccccggtggtagcggtggcggcagccggctcaagcccgggccgcagctgcctggccgcgggggccgccgagcagcgggagggcctttggggggcggggcggcggcgcccgaggacgacgatgaagacgacgacgaggagctgctggaagtgcgcctggtcgagaccccggggcgggagctgtggaggatggtcccggcgggacgggccgctcggggacaagcggagccgcgcccaagggccgtcgggcgagggggcggccgccgccgccgccgcctccccgacaccgtcggaggacgaggagccggaggaagaggaggaggaggcggcagcggctgaggaaggtgaagaggagacggtggcgtcgggggaggagtcgctgggctttctgtccaggctgccccctggcccggccggcctggactgcagcgccctggatcgcgacccggacctgcagcctccctcgggcacgtcgcacttcgagttcccgcctcccgggtggctcacacactctcattcacacacacaaatctcaggaacaaacggtcccagagtcctccggacccctgcccagggtctctgcaggtctctgccccacgcgttcccgtcgctgacaaagccaccagctgcctcctttaagcttggtgctccggctctgggcctttcttgcgctctattttttttttttttttttttaagaaaaacaacaacaacaaaaaaagacaatgaaaaaaaaaacgtcatgtgagtgaagagatgtcactgtctgtggtcttggagaactagtctcgtagctgaggggtggggtccctctgtctggggcactggcacccacagcaggactccgccagtctgatgccaggactgaataaagtgtatttgccccgaccttgccctgtggttctgcatgtctgtgctcttcctcaaccctccctaaacagtttgccagattcaagtccgtgtgatttgggcccgagctgggtgtcccagggcaagccaccttgcctgtctaggcctctatgtcaggactccctggccttcatgaagaatagcaaactcatccctgtagggaccaggcaggtaacatagacgagtgactctgggtggacagtggtgtcatgacccacttcaaggggcctacctcctgccagttgtgaccctgtggaatgcagtccacagtggccaggtggccagatttttcaagaaaagctggatggatgtttctgagtcatcttaatttcaaaatgagactcatattttaaaatttctgtgggccaaatgaaacaagtatgcaggcaggtctggtccgagggggctggcttggccatgcctttctgtgcctttaatgaggactaagaagcaagattgggccacactgtctggactcaaagcccagctccaccactgagcacccgtgtgactctttccatatgtataacgtggggataataataatagctgcttcacaggatgaaatgaagtttgaggtgagaagcattcaccatggtgcccatcgtgttactccattgtcagaggaggaaacggggtcaggcaggaaagcaacttaaaggagggcctgcaagcagccagggtcagagacagggcttggttctgcttcctggtgaagcatggcttcggggtgctgcctctccctccctgtttgaatctgcagattgtgttaggcccccagctgagggcctggagtggtgggattggtcccagtgcctggcgcacattggcctgcagagtagattaactgaatgaccaaagagcaacagaagtctagtgattcttgtctttgaggttctgactggtgttttacaactgagtccaaggcttttccctcctttgtccctctgacacccctccccctaattctcatctgtcagatccagtgtattcctaagctgggacaaagcctctgttttcccagtaggagccagggctgagtgtggaaattacagtgactgcttcttctcagcttctctggttgaaagcaagctggcgaagtaagaggaggtagagttgagaaggtgtggaagatagggacagctgcccccagaactcccttcaagggaggacttccccagctatgggaagtgccatcagggtggccgcagctgcagagagccacttcacctgagaccacgcccttcctggggcagcctgtatctggtgtctgagtgaggcatggtataaacacctggtcatttcaatccaacatgggacggacactgacagacagtactcccagcaggcccaggccagccagggcttcgtcaggcctgcagcacaatttgacttcctatgcccaggcctgcttcctcttcttcctcttcttttcacaggtgcttattcctaataaacatcttgcaa

SEQ ID NO: 297408 - DNA, 3556 bp, Homo sapiens
ctaactggcggtgtggacgacacaacttgcagaggattcagtgccgctctgaaaatagtaaaggtgtctactgtttacagtacgatgatgaaaaaattatcagtggcctacgagataattctattaagatatgggataaaaccagcctggaatgtttgaaagtgttaacaggacacacaggctctgtcctctgtctgcagtatgatgagcgtgtcattgtaactggctcttcagattctacggtgagagtgtgggatgtgaacacgggtgaagttcttaacacattgatccaccacaatgaggctgtattgcacttacgcttcagcaatggactgatggtgacctgttccaaggaccgctccattgctgtgtgggacatggcttctgcgaccgacatcactttacgccgtgtcctggttggccaccgggctgccgtcaatgtagtagactttgacgacaagtacatcgtgtctgcctctggtgacaggaccatcaaagtctggagcacgagcacctgtgaatttgttcgtactctcaatgggcacaagcggggcattgcctgtctccagtacagggatcgcctggttgttagtggatcatcagataataccattaggctctgggatattgaatgtggtgcctgtttaagagtcctagagggacatgaagaattggtccgatgcatccggtttgataacaagaggattgtcagtggggcctatgatgggaaaattaaagtttgggacttgcaagctgctcttgaccctcgagccccagcaagcacattgtgtttgcgcacattggtggaacattctggacgtgtgtttcggctccagtttgatgagtttcagatcatcagcagctcccatgatgacactattttgatttgggatttcttaaatgtgcctcccagtgcccagaatgagacccgttctccctccagaacatacacttacatctctagataacagtctgcactttcacccgtttcagggttttctagtcttgaactactggctacgtggctaccaaatgcctaagggagttcgttcacagctgagttatgaagctggaattggttctagacgctgggtagatgcaaagcagcctaactcttcaagtaccgacatttctcacctctgattccggctctcctttgagaaggagaccttagcttccccggcttcaagtagaacagaagcccgtttccttccctcatcagtgaaaaaatctaatgtttcaaatgtaaattgttcatagaaaaggaacatagaatctgttttacagaagtaaatcgaccgtcaagagaagacttggcctctaatttatattgctttgcactttggtttgatattaagaaacagcattcttcttcagtgaaattttgggtgccaaacacctacccagaatgtccagggctttcattttcaaaagttagcattctccttttgaccgtccaagtcattatgaattctgacttgtgtattaggaacatgttggacagtggaaaattttctctggatgttttagtaatatttttgggattatacttcctttctgtaccaatttcttttaatttaaagaactataagtcagttatattatctaccaacaggtaatatagctctttcttttattaactgttctctgtcccccaaccatctcctgatatttggtagagtaacacctttatacgtgtgcttgcctcctaatttaaaatactgtattcgcatgtagatataatgtacataacagtttaacctcaaagttgctggagtcagggccccctgtgcttgagacactaatacagagtgtgttcgcacttagccatgggctgggctcaagaacctgatacctgggttgatgtggattacctagaacccttcctgcagtattcatacagtgtttttattttgttgttgtcattgcgtgtgtgtggtttgtgtgtgtttttaatgagaatcttgttttaaaatgtaatttctaaggtttaacaccaaaatgttttatttgttgtggagtatatattatacaatagagaggtaccttaaacattttttgttcttattctttttctcataagtactcctgagtacaagtggtcacctcccatagtattcatttggcttcgctgtcaaaaatcattattctgtgcagtcgtggccctgggaaggggaaataagaaggccctgttgacgggctgtcttggctctggaattcatgcatcctggccttgccaaggttctggcagggcctgctggtgtgttggagcctgcagggcaggtcaggctggttcagaggcccatgctgaggggtgggtgctctgaagtggagtgaagcctcaagcccatgaatgccaccccagtcatctctggtgtcagctgctgctgtggccccagcaggttctcaaagctcccaagtcctccctacgacacagcccaaatgtgtaaatggcactgttgccctgacagtgcatggaaaggacgttggcatccaattggcactccttctcccttattcaatattaggtttgatttgcccttcgccattgtttccaaagatcaaggaatgtcaataacattttaaaggaccaataaacagcctcctataaagtaaacctcttcccgtggaagcacactctactactaaagggaaggcccctgggctctgatttgtcctttgcattgagaacggtgtggggatcagtgtgtgtgtatgtgatttgtttattgagttggctttgcttttttagtttttcttttaaaaataaaatccttccttcccatgttactaaattaatttatgtttttgagaggttgagtctcaaagtgtaaacaataaacctccattcataaggtggatgttgtaagcttgatggtggttgtgaaagtgatttagctttgaccacttttcatcctacagcttcaatatcaaactggttaggaaagcccagggggaagggagggggcaggggaggaggcaattctgaatgaatgaatggattttttgttgtttttgcatgtttaatatagaagttcccctcgttccttgggagatgatggcctttgaatatgcagacaacctttgaattgtgcctactaaattatagcaggggactttggcacccaaggagttctgactttctgggattataatagtaattcccagccatactctggactttattttgctaaccataactgagcaaatgtaaattactgctatattaatgttttaaagcactgggatagtctaattctaacttgtaattaattatgtttgccaattatctgtttgaaataaatttgtgtctgaacagctattgaaactgttaaattgtacagatattattcatgacagctttgtactgtggaatgtgcttaataaaaaacaaaaaagtttgacttttgtccagtaaattgctaagtaatgtcaataaatcgagtatgggtattatgcagtgcacctaatctggcttcatgcaattgttacttcagctactgattcaaagccaatactcttaataaagtgttgcaatactctgaaaaaaaaaaaa

SEQ ID NO: 297409 - DNA, 2631 bp, Homo sapiens
taagtgtatgttctggagggagaacgggtctcattctgggcactgggaggcactttcacccggttcagggttttctagtcttgaactactggctacgtggctaccaaatgcctaagggagttcgttcacagctgagttatgaagctggaattggttctagacgctgggtagatgcaaagcagcctaactcttcaagtaccgacatttctcacctctgattccggctctcctttgagaaggagaccttagcttccccggcttcaagtagaacagaagcccgtttccttccctcatcagtgaaaaaatctaatgtttcaaatgtaaattgttcatagaaaaggaacatagaatctgttttacagaagtaaatcgaccgtcaagagaagacttggcctctaatttatattgctttgcactttggtttgatattaagaaacagcattcttcttcagtgaaattttgggtgccaaacacctacccagaatgtccagggctttcattttcaaaagttagcattctccttttgaccgtccaagtcattatgaattctgacttgtgtattaggaacatgttggacagtggaaaattttctctggatgttttagtaatatttttgggattatacttcctttctgtaccaatttcttttaatttaaagaactataagtcagttatattatctaccaacaggtaatatagctctttcttttattaactgttctctgtcccccaaccatctcctgatatttggtagagtaacacctttatacgtgtgcttgcctcctaatttaaaatactgtattcgcatgtagatataatgtacataacagtttaacctcaaagttgctggagtcagggccccctgtgcttgagacactaatacagagtgtgttcgcacttagccatgggctgggctcaagaacctgatacctgggttgatgtggattacctagaacccttcctgcagtattcatacagtgtttttattttgttgttgtcattgcgtgtgtgtggtttgtgtgtgtttttaatgagaatcttgttttaaaatgtaatttctaaggtttaacaccaaaatgttttatttgttgtggagtatatattatacaatagagaggtaccttaaacattttttgttcttattctttttctcataagtactcctgagtacaagtggtcacctcccatagtattcatttggcttcgctgtcaaaaatcattattctgtgcagtcgtggccctgggaaggggaaataagaaggccctgttgacgggctgtcttggctctggaattcatgcatcctggccttgccaaggttctggcagggcctgctggtgtgttggagcctgcagggcaggtcaggctggttcagaggcccatgctgaggggtgggtgctctgaagtggagtgaagcctcaagcccatgaatgccaccccagtcatctctggtgtcagctgctgctgtggccccagcaggttctcaaagctcccaagtcctccctacgacacagcccaaatgtgtaaatggcactgttgccctgacagtgcatggaaaggacgttggcatccaattggcactccttctcccttattcaatattaggtttgatttgcccttcgccattgtttccaaagatcaaggaatgtcaataacattttaaaggaccaataaacagcctcctataaagtaaacctcttcccgtggaagcacactctactactaaagggaaggcccctgggctctgatttgtcctttgcattgagaacggtgtggggatcagtgtgtgtgtatgtgatttgtttattgagttggctttgcttttttagtttttcttttaaaaataaaatccttccttcccatgttactaaattaatttatgtttttgagaggttgagtctcaaagtgtaaacaataaacctccattcataaggtggatgttgtaagcttgatggtggttgtgaaagtgatttagctttgaccacttttcatcctacagcttcaatatcaaactggttaggaaagcccagggggaagggagggggcaggggaggaggcaattctgaatgaatgaatggattttttgttgtttttgcatgtttaatatagaagttcccctcgttccttgggagatgatggcctttgaatatgcagacaacctttgaattgtgcctactaaattatagcaggggactttggcacccaaggagttctgactttctgggattataatagtaattcccagccatactctggactttattttgctaaccataactgagcaaatgtaaattactgctatattaatgttttaaagcactgggatagtctaattctaacttgtaattaattatgtttgccaattatctgtttgaaataaatttgtgtctgaacagctattgaaactgttaaattgtacagatattattcatgacagctttgtactgtggaatgtgcttaataaaaaacaaaaaagtttgacttttgtccagtaaattgctaagtaatgtcaataaatcgagtatgggtattatgcagtgcacctaatctggcttcatgcaattgttacttcagctactgattcaaagccaatactcttaataaagtgttgcaatactctgaaaaaaaaaaaa

SEQ ID NO: 297410 - DNA, 1798 bp, Homo sapiens
ctaactggcggtgtggacgacacaacttgcagaggattcagtgccgctctgaaaatagtaaaggtgtctactgtttacagtacgatgatgaaaaaattatcagtggcctacgagataattctattaagatatgggataaaaccagcctggaatgtttgaaagtgttaacaggacacacaggctctgtcctctgtctgcagtatgatgagcgtgtcattgtaactggctcttcagattctacggtgagagtgtgggatgtgaacacgggtgaagttcttaacacattgatccaccacaatgaggctgtattgcacttacgcttcagcaatggactgatggtgacctgttccaaggaccgctccattgctgtgtgggacatggcttctgcgaccgacatcactttacgccgtgtcctggttggccaccgggctgccgtcaatgtagtagactttgacgacaagtacatcgtgtctgcctctggtgacaggaccatcaaagtctggagcacgagcacctgtgaatttgttcgtactctcaatgggcacaagcggggcattgcctgtctccagtacagggatcgcctggttgttagtggatcatcagataataccattaggctctgggatattgaatgtggtgcctgtttaagagtcctagagggacatgaagaattggtccgatgcatccggtttgataacaagaggattgtcagtggggcctatgatgggaaaattaaagtttgggacttgcaagctgctcttgaccctcgagccccagcaagcacattgtgtttgcgcacattggtggaacattctggacgtgtgtttcggctccagtttgatgagtttcagatcatcagcagctcccatgatgacactattttgatttgggatttcttaaatgtgcctcccagtgcccagaatgagacccgttctccctccagaacatacacttacatctctagataacagtctgcactttcacccgtttcaggtgagtactatcctctccccttccaattttgctgattgaattcaccttccctttggggaaattttgtgatttgggttccttggtgatgtgtgaaccaaggtctctcttagacgtgtcaacttttgcagagttcaagtgtaaggctggatctttatagtcacatccatacaaggcttgagttggaatcctgcctattgtgtgggttttcatcttggcagatgatgaacatggttcctgtttttaaaaactgttcctaaatgatttcttaggtcataatcaatttaacaccagtaaaatgtcttgaattttattttggggtacaagaatcttctttttctctttctttcctgtccttcagttcttttattaaaaaaaaaaaaaaaatcaccatctgacaaaacattcaaaatccctctcttccccactaccacaatccacccaccaccatcctttcctcaaggatgaatcagagaagagtatctgttgagagacccctaaaacctattctgcttccatgaaacacaacagatacactgagaagcaaagtcctttcctctggttacaggaacactgaaagtcattataaccattgatgacagaatgttttgattattactaagcgtgttcagtctggaagatgagaagtcttacttggctgtgtcctaggaactgatgacttaggaacagtattgacaactctgtgttctgctgagggccagtgaattctatacacattaaactttgtagattgaataaatgtttacatataaacatactactatggatatatgtatataaagactgt

SEQ ID NO: 297411 - DNA, 247 bp, Homo sapiens
gagacagagcccagaggaaaagggtcatatagaagaggctaccttgagaagatcagtaatataaccagctcagggtgaccttgcagagaaaggggcaggggaacgtacaccctgacctcattctttcttccaatcttctagttggatttccaatttaaaaaaaacaaaaactggaagccaaaggactcatttattggtgtgggtatctatgggacagatgtataattgtgataataaatgtgagaat

SEQ ID NO: 297412 - DNA, 674 bp, Homo sapiens
ccgggcgtggtggcacgcgcctgtaatcccagctactcaggaggctgaggcaggagaattgcttgaacccaggaggcagaggttgcagtgagctgagatcacgccactgcattccagcctggccgacagagcgagactccgtctcaaaaaaaaaaaaaaaaaaagaacaaaagaaatactttaattacttgttagcctgacagcagatttttgcaataaagcaaaattataattaccatagtgcagatatcttactagacctcttcaagtactacatgaaatttatcatcaacattatcatcatatcattatcagtattaagtttgcattgtgtataggacactatacgaggagtgccagatgatataatgtagtgcttttgccctgaaaggattttccctccagctgtggggataggatacaaaattaatagtgattacggttagtatatcctgagtgccctgatggtttgtgttgataatattgttccagtccttgtttctgtccaaaagaacttcatttctatgtgatttcactgcctgctttatgtcattgactagatgttttgtcatctcagcatttgaaatgctaaactggaaacccagctctcacaatgcaatgctttcttctgactacctccaacaaagaatgtcagagaaggaacaaatgcctga

SEQ ID NO: 297413 - DNA, 3356 bp, Homo sapiens
agcagaggcgggaccagaacctagagggcctcgggattgcggaagtttggtggggagggtcggagctctggtggagagagtgttgtctaaaacaagttccggaagggaggctgcccttcgcggtccgagaaccaccggcctccccagtttgagggctgttaccccgtgcgcgcttcgacgttgctgctgttggctctcctcgcccctcgttcccttgggaaccgcctgggaactccgccatgtcatccacttcgcccaacctccagaaagcgatagatctggctagcaaagcagcgcaagaagacaaggctgggaactacgaagaagcccttcagctctatcagcatgctgtgcagtattttcttcatgtcgttaaatatgaagcacagggtgataaagccaagcaaagtatcagggcaaagtgtacagaatatcttgatagagcagaaaaactaaaggagtacctgaaaaataaagagaaaaaagcacagaagccagtgaaagaaggacagccgagtccagcagatgagaaggggaatgacagtgatggggaaggagaatctgatgatcctgaaaaaaagaaactacagaatcaacttcaaggtgccattgttatagaacgaccaaatgtgaaatggagtgacgttgctggacttgaaggagccaaagaagcactgaaagaggctgtgatactgcctattaaatttcctcatctttttacaggcaagagaacaccttggaggggaatcctattatttgggccgcctggaacaggaaagtcctacttagccaaagctgtagcaacagaagccaacaactcaacatttttttcaatatcttcctctgatcttgtttctaagtggctaggtgaaagtgaaaaactggttaagaatttattccaacttgccagagagaacaagccctccattatcttcattgatgaaattgattctctctgtggttcaagaagtgaaaatgaaagtgaagccgcacgtagaattaagacggagttcctagtgcaaatgcaaggggttggtgtagacaatgatggaattttggttctgggagctacaaatataccctgggttctggattctgccattaggcgaagatttgagaaacgaatttatattcccttgccggaaccccatgcccgagcagcaatgtttaaactgcacctagggaccactcagaacagtctcacggaagcagactttcgggaacttgggaggaaaacagatggttattcaggggcagatataagtatcattgtacgtgatgcccttatgcagcctgttaggaaagtacagtcagctactcattttaaaaaggttcgcggaccttcccgagctgatcctaaccatcttgtagatgatctgctaacaccttgctctccaggtgaccctggtgccattgaaatgacatggatggatgtccctggagataaacttttggagccagttgtttccatgtcggatatgttgcggtcactatctaacacaaaacctacagtcaatgaacatgacttgttgaaattaaagaagtttacagaagattttggtcaagaaggctaagccaaagacaaggaagatgcttaccatatgtattctttctttcatagatatttttgtctatttggatcgcattaattgtttccagtaaaactcttttaccacagggaaatacacatctcacttcagagttccattaggttttatattgtacttttcctccattacttattaaatactcctattaacaaaaggtacaaaataacaggttatgaggaaatgagcgatatatgaacggcataaaaacagaaattacccagtaaaaaggatgtcagaaattgacatacaaatatttacaatttttatgaatggtggtctttgcaaagagcatttatattttcttttttttttactaaaatgatatagggtttattttatattttcaaaaaaattgttaaacatcattcttatcaatgtaaaatttacgttattaaaaaattacaaatgatagaatctttactcagggatgggcaataaaacagcaaagagctttgtgattgggtttgaaagattttgaattatagacagtgctcttaatagtttttaataagttgatatttttttctgtgtagatttaaataatttctttaaaagcgtaagctttggctgggcatggtggcttatgcctgtaatcccagcactttgggaggctacgatgggtggatcacctgaggtcaggagttcaagaccagtctggccaacatggtgaaatgccgtctctactaaaaatacaaaaattagctgggcatgatggcgagtgtctgtaatcccagctactcaggaggctgaggcgggagaatcacttgaacctgggaggcagaggttgcagtgagctgagatcgcgctactgcattccagcctgggcgccgagatagcgccattgcactccagcctgggcgactgaataaaactctgtctcaaaaaaaaacaaaaacggtaagcttttatatttaattaactgatacctttcactgtgcaatctcaagaggaagattttctaaattagacattgtctttaccttaaagaagaaaattgtctatttcagtgtcttttttagcaagattgaccaaaacaggtggtaggtgtgtaatttttaactgtcatgaaatactgtaatgcgcacctttgctaataaggaaatggtctccctttgaattatgggaagtttcttgtctgtgatatggggtgtctgtgtacatatatgtatatttccttttttaatacaggataataatatggggtcttgtccttcaccttttaagttcagggaacagtttgtcctgaccacacatatgttatcagtgtaatgctttatgaagctttagaaatgagctcatgactcattaaaaaataataaacatgatgctattttaatattttcaaataaataatctgaggatgtgtttcatactttagcatcaacgctgagttgtgccttgtagaattgcattgtctatacatgcaaaagactattaagttaggatgaactagattccctaattacagtgaaattctatcttgcaaatgctatagaataacttgcattttaaagtgtatttgcacattttacatatgctatgtggttgcctttgggttttctgtacagattgtttttgttattaaatggaaaaggcctgaattatgctcttatgtgaagtaaattgatataacctattgactgtattctgtgtattattctttattttgggaccttctgtgtaaaagaaaatattacctaaattggttagatacaaagaaatcattaaaattattaatgtatatat

SEQ ID NO: 297414 - DNA, 597 bp, Homo sapiens
agcagaggcgggaccagaacctagagggcctcgggattgcggaagtttggtggggagggtcggagctctggtggagagagtgttgtctaaaacaagttccggaagggaggctgcccttcgcggtccgagaaccaccggcctccccagtttgagggctgttaccccgtgcgcgcttcgacgttgctgctgttggctctcctcgcccctcgttcccttgggaaccgcctgggaactccgccatgtcatccacttcgcccaacctccagaaagcgatagatctggctagcaaagcagcgcaagaagacaaggctgggaactacgaagaagcccttcagctctatcagcatgctgtgcagtattttcttcatgtcgttaaatatgaagcacagggtgataaagccaagcaaagtatcagggcaaagtgtacagaatatcttgatagagcagaaaaactaaaggagtacctgaaaaataaagagaaaaaagcacagaagccagtgaaagaaggacagccgagtccagcagatgagaaggggatgacagtgatgggaggagaatctgatgatctggctacggatcacttcaggtgccattgtt

SEQ ID NO: 297415 - DNA, 3246 bp, Homo sapiens
agcagaggcgggaccagaacctagagggcctcgggattgcggaagtttggtggggagggtcggagctctggtggagagagtgttgtctaaaacaagttccggaagggaggctgcccttcgcggtccgagaaccaccggcctccccagtttgagggctgttaccccgtgcgcgcttcgacgttgctgctgttggctctcctcgcccctcgttcccttgggaaccgcctgggaactccgccatgtcatccacttcgcccaacctccagaaagcgatagatctggctagcaaagcagcgcaagaagacaaggctgggaactacgaagaagcccttcagctctatcagcatgctgtgcagtattttcttcatgtcgttaaatatgaagcacagggtgataaagccaagcaaagtatcagggcaaagtgtacagaatatcttgatagagcagaaaaactaaaggagtacctgaaaaataaagagaaaaaagcacagaagccagtgaaagaaggacagccgagtccagcagatgagaaggggaatgacagtgatggggaaggagaatctgatgatcctgaaaaaaagaaactacagaatcaacttcaaggtgccattgttatagaacgaccaaatgtgaaatggagtgacgttgctggacttgaaggagccaaagaagcactgaaagaggctgtgatactgcctattaaatttcctcatctttttacaggcaagagaacaccttggaggggaatcctattatttgggccgcctggaacaggaaagtcctacttagccaaagctgtagcaacagaagccaacaactcaacatttttttcaatatcttcctctgatcttgtttctaagtggctaggtgaaagtgaaaaactggttaagaatttattccaacttgccagagagaacaagccctccattatcttcattgatgaaattgattctctctgtggttcaagaagtgaaaatgaaagtgaagccgcacgtagaattaagacggagttcctagtgcaaatgcaaggggttggtgtagacaatgatggaattttggttctgggagctacaaatataccctgggttctggattctgccattaggcgaagatttgagaaacgaatttatattcccttgccggaaccccatgcccgagcagcaatgtttaaactgcacctagggaccactcagaacagtctcacggaagcagactttcgggaacttgggaggaaaacagatggttattcaggggcagatataagtatcattgtacgtgatgcccttatgcagcctgttaggaaagtacagtcagctactcattttaaaaaggttcgcggaccttcccgagctgatcctaaccatcttgtagatgatctgctaacaccttgctctccaggtgaccctggtgccattgaaatgacatggatggatgtccctggagataaacttttggagccagttgtttccatgtcggatatgttgcggtcactatctaacacaaaacctacagtcaatgaacatgacttgttgaaattaaagaagtttacagaagattttggtcaagaaggctaagccaaagacaaggaagatgcttaccatatgtattctttctttcatagatatttttgtctatttggatcgcattaattgtttccagtaaaactcttttaccacagggaaatacacatctcacttcagagttccattaggttttatattgtacttttcctccattacttattaaatactcctattaacaaaaggtacaaaataacaggttatgaggaaatgagcgatatatgaacggcataaaaacagaaattacccagtaaaaaggatgtcagaaattgacatacaaatatttacaatttttatgaatggtggtctttgcaaagagcatttatattttcttttttttttactaaaatgatatagggtttattttatattttcaaaaaaattgttaaacatcattcttatcaatgtaaaatttacgttattaaaaaattacaaatgatagaatctttactcagggatgggcaataaaacagcaaagagctttgtgattgggtttgaaagattttgaattatagacagtgctcttaatagtttttaataagttgatatttttttctgtgtagatttaaataatttctttaaaagcgtaagctttggctgggcatggtggcttatgcctgtaatcccagcactttgggaggctacgatgggtggatcacctgaggtcaggagttcaagaccagtctggccaacatggtgaaatgccgtctctactaaaaatacaaaaattagctgggcatgatggcgagtgtctgtaatcccagctactcaggaggctgaggcgggagaatcacttgaacctgggaggcagaggttgcagtgagctgagatcgcgctactgcattccagcctgggcgccgagatagcgccattgcactccagcctgggcgactgaataaaactctgtctcaaaaaaaaacaaaaacggtaagcttttatatttaattaactgatacctttcactgtgcaatctcaagaggaagattttctaaattagacattgtctttaccttaaagaagaaaattgtctatttcagtgtcttttttagcaagattgaccaaaacaggtggtaggtgtgtaatttttaactgtcatgaaatactgtaatgcgcacctttgctaataaggaaatggtctccctttgaattatgggaagtttcttgtctgtgatatggggtgtctgtgtacatatatgtatatttccttttttaatacaggataataatatggggtcttgtccttcaccttttaagttcagggaacagtttgtcctgaccacacatatgttatcagtgtaatgctttatgaagctttagaaatgagctcatgactcattaaaaaataataaacatgatgctattttaatattttcaaataaataatctgaggatgtgtttcatactttagcatcaacgctgagttgtgccttgtagaattgcattgtctatacatgcaaaagactattaagttaggatgaactagattccctaattacagtgaaattctatcttgcaaatgctatagaataacttgcattttaaagtgtatttgcacattttacatatgctatgtggttgcctttgggttttctgtacagattgtttttgttattaaatggaaaaggcctgaattatgctcttatgtgaagtaaattgatataaccta

SEQ ID NO: 297416 - DNA, 3589 bp, Homo sapiens
agcagaggcgggaccagaacctagagggcctcgggattgcggaagtttggtggggagggtcggagctctggtggagagagtgttgtctaaaacaagttccggaagggaggctgcccttcgcggtccgagaaccaccggcctccccagtttgagggctgttaccccgtgcgcgcttcgacgttgctgctgttggctctcctcgcccctcgttcccttgggaaccgcctgggaactccgccatgtcatccacttcgcccaacctccagaaagcgatagatctggctagcaaagcagcgcaagaagacaaggctgggaactacgaagaagcccttcagctctatcagcatgctgtgcagtattttcttcatgtcgttaaatatgaagcacagggtgataaagccaagcaaagtatcagggcaaagtgtacagaatatcttgatagagcagaaaaactaaaggagtacctgaaaaataaagagaaaaaagcacagaagccagtgaaagaaggacagccgagtccagcagatgagaaggggaatgacagtgatggggaaggagaatctgatgatcctgaaaaaaagaaactacagaatcaacttcaaggtgccattgttatagaacgaccaaatgtgaaatggagtgacgttgctggacttgaaggagccaaagaagcactgaaagaggctgtgatactgcctattaaatttcctcatctttttacaggcaagagaacaccttggaggggaatcctattatttgggccgcctggaacaggaaagtcctacttagccaaagctgtagcaacagaagccaacaactcaacatttttttcaatatcttcctctgatcttgtttctaagtggctaggtgaaagtgaaaaactggttaagaatttattccaacttgccagagagaacaagccctccattatcttcattgatgaaattgattctctctgtggttcaagaagtgaaaatgaaagtgaagccgcacgtagaattaagacggagttcctagtgcaaatgcaaggggttggtgtagacaatgatggaattttggttctgggagctacaaatataccctgggttctggattctgccattaggcgaagatttgagaaacgaatttatattcccttgccggaaccccatgcccgagcagcaatgtttaaactgcacctagggaccactcagaacagtctcacggaagcagactttcgggaacttgggaggaaaacagatggttattcaggggcagatataagtatcattgtacgtgatgcccttatgcagcctgttaggaaagtacagtcagctactcattttaaaaaggttcgcggaccttcccgagctgatcctaaccatcttgtagatgatctgctaacaccttgctctccaggtgaccctggtgccattgaaatgacatggatggatgtccctggagataaacttttggagccagttgtttccatgtcggatatgttgcggtcactatctaacacaaaacctacagtcaatgaacatgacttgttgaaattaaagaagtttacagaagattttggtcaagaaggctaagccaaagacaaggaagatgcttaccatatgtattctttctttcatagatatttttgtctatttggatcgcattaattgtttccagtaaaactcttttaccacagggaaatacacatctcacttcagagttccattaggttttatattgtacttttcctccattacttattaaatactcctattaacaaaaggtacaaaataacaggttatgaggaaatgagcgatatatgaacggcataaaaacagaaattacccagtaaaaaggatgtcagaaattgacatacaaatatttacaatttttatgaatggtggtctttgcaaagagcatttatattttcttttttttttactaaaatgatatagggtttattttatattttcaaaaaaattgttaaacatcattcttatcaatgtaaaatttacgttattaaaaaattacaaatgatagaatctttactcagggatgggcaataaaacagcaaagagctttgtgattgggtttgaaagattttgaattatagacagtgctcttaatagtttttaataagttgatatttttttctgtgtagatttaaataatttctttaaaagcgtaagctttggctgggcatggtggcttatgcctgtaatcccagcactttgggaggctacgatgggtggatcacctgaggtcaggagttcaagaccagtctggccaacatggtgaaatgccgtctctactaaaaatacaaaaattagctgggcatgatggcgagtgtctgtaatcccagctactcaggaggctgaggcgggagaatcacttgaacctgggaggcagaggttgcagtgagctgagatcgcgctactgcattccagcctgggcgccgagatagcgccattgcactccagcctgggcgactgaataaaactctgtctcaaaaaaaaacaaaaacggtaagcttttatatttaattaactgatacctttcactgtgcaatctcaagaggaagattttctaaattagacattgtctttaccttaaagaagaaaattgtctatttcagtgtcttttttagcaagattgaccaaaacaggtggtaggtgtgtaatttttaactgtcatgaaatactgtaatgcgcacctttgctaataaggaaatggtctccctttgaattatgggaagtttcttgtctgtgatatggggtgtctgtgtacatatatgtatatttccttttttaatacaggataataatatggggtcttgtccttcaccttttaagttcagggaacagtttgtcctgaccacacatatgttatcagtgtaatgctttatgaagctttagaaatgagctcatgactcattaaaaaataataaacatgatgctattttaatattttcaaataaataatctgaggatgtgtttcatactttagcatcaacgctgagttgtgccttgtagaattgcattgtctatacatgcaaaagactattaagttaggatgaactagattccctaattacagtgaaattctatcttgcaaatgctatagaataacttgcattttaaagtgtatttgcacattttacatatgctatgtggttgcctttgggttttctgtacagattgtttttgttattaaatggaaaaggcctgaattatgctcttatgtgaagtaaattgatataacctattgactgtattctgtgtattattctttattttgggaccttctgtgtaaaagaaaatattacctaaattggttagatacaaagaaatcattaaaattattaatgtatatattgcaaaaaaaaaaaaaaaaaacaaacccaaaaacaaactgtgtgtgcgggcgctcggccccagaaaaacttttctaaacaccactccgtgggggccgcgggccagaggttacggaaccggccacacgggcccaagaaaccgggccagactcgggtgtgtctcccaataaaaaccccggccccgggtctcggaccacccaggggccgggcacgggtccacccgggcaaggggat

SEQ ID NO: 297417 - DNA, 2852 bp, Homo sapiens
aacaactaactacatgtcatcttagaacaggctgcttcatagtttatagtggaacagtttccatattctagaaaattagaaaagcttttgataaaagagaactagaaaatttgtcagtaggctatattaaaagacatccttcttggactcttactgcaataattgctttggcttttgaatatactgcattcagaagctaaatcttccctgtgccattgttatagaacgaccaaatgtgaaatggagtgacgttgctggacttgaaggagccaaagaagcactgaaagaggctgtgatactgcctattaaatttcctcatctttttacaggcaagagaacaccttggaggggaatcctattatttgggccgcctggaacaggaaagtcctacttagccaaagctgtagcaacagaagccaacaactcaacatttttttcaatatcttcctctgatcttgtttctaagtggctaggtgaaagtgaaaaactggttaagaatttattccaacttgccagagagaacaagccctccattatcttcattgatgaaattgattctctctgtggttcaagaagtgaaaatgaaagtgaagccgcacgtagaattaagacggagttcctagtgcaaatgcaaggggttggtgtagacaatgatggaattttggttctgggagctacaaatataccctgggttctggattctgccattaggcgaagatttgagaaacgaatttatattcccttgccggaaccccatgcccgagcagcaatgtttaaactgcacctagggaccactcagaacagtctcacggaagcagactttcgggaacttgggaggaaaacagatggttattcaggggcagatataagtatcattgtacgtgatgcccttatgcagcctgttaggaaagtacagtcagctactcattttaaaaaggttcgcggaccttcccgagctgatcctaaccatcttgtagatgatctgctaacaccttgctctccaggtgaccctggtgccattgaaatgacatggatggatgtccctggagataaacttttggagccagttgtttccatgtcggatatgttgcggtcactatctaacacaaaacctacagtcaatgaacatgacttgttgaaattaaagaagtttacagaagattttggtcaagaaggctaagccaaagacaaggaagatgcttaccatatgtattctttctttcatagatatttttgtctatttggatcgcattaattgtttccagtaaaactcttttaccacagggaaatacacatctcacttcagagttccattaggttttatattgtacttttcctccattacttattaaatactcctattaacaaaaggtacaaaataacaggttatgaggaaatgagcgatatatgaacggcataaaaacagaaattacccagtaaaaaggatgtcagaaattgacatacaaatatttacaatttttatgaatggtggtctttgcaaagagcatttatattttcttttttttttactaaaatgatatagggtttattttatattttcaaaaaaattgttaaacatcattcttatcaatgtaaaatttacgttattaaaaaattacaaatgatagaatctttactcagggatgggcaataaaacagcaaagagctttgtgattgggtttgaaagattttgaattatagacagtgctcttaatagtttttaataagttgatatttttttctgtgtagatttaaataatttctttaaaagcgtaagctttggctgggcatggtggcttatgcctgtaatcccagcactttgggaggctacgatgggtggatcacctgaggtcaggagttcaagaccagtctggccaacatggtgaaatgccgtctctactaaaaatacaaaaattagctgggcatgatggcgagtgtctgtaatcccagctactcaggaggctgaggcgggagaatcacttgaacctgggaggcagaggttgcagtgagctgagatcgcgctactgcattccagcctgggcgccgagatagcgccattgcactccagcctgggcgactgaataaaactctgtctcaaaaaaaaacaaaaacggtaagcttttatatttaattaactgatacctttcactgtgcaatctcaagaggaagattttctaaattagacattgtctttaccttaaagaagaaaattgtctatttcagtgtcttttttagcaagattgaccaaaacaggtggtaggtgtgtaatttttaactgtcatgaaatactgtaatgcgcacctttgctaataaggaaatggtctccctttgaattatgggaagtttcttgtctgtgatatggggtgtctgtgtacatatatgtatatttccttttttaatacaggataataatatggggtcttgtccttcaccttttaagttcagggaacagtttgtcctgaccacacatatgttatcagtgtaatgctttatgaagctttagaaatgagctcatgactcattaaaaaataataaacatgatgctattttaatattttcaaataaataatctgaggatgtgtttcatactttagcatcaacgctgagttgtgccttgtagaattgcattgtctatacatgcaaaagactattaagttaggatgaactagattccctaattacagtgaaattctatcttgcaaatgctatagaataacttgcattttaaagtgtatttgcacattttacatatgctatgtggttgcctttgggttttctgtacagattgtttttgttattaaatggaaaaggcctgaattatgctcttatgtgaagtaaattgatataaccta

SEQ ID NO: 297418 - DNA, 2279 bp, Homo sapiens
atgtgttctggatattatccctttaacctaaatatatatgtttaaccttggcacatacaggcccacttaacttagtatctgtttcttcttggaaatatcctaattttcaattaaatatattcttgatgtaatttctcttttaagatttgagaaacgaatttatattcccttgccggaaccccatgcccgagcagcaatgtttaaactgcacctagggaccactcagaacagtctcacggaagcagactttcgggaacttgggaggaaaacagatggttattcaggggcagatataagtatcattgtacgtgatgcccttatgcagcctgttaggaaagtacagtcagctactcattttaaaaaggttcgcggaccttcccgagctgatcctaaccatcttgtagatgatctgctaacaccttgctctccaggtgaccctggtgccattgaaatgacatggatggatgtccctggagataaacttttggagccagttgtttccatgtcggatatgttgcggtcactatctaacacaaaacctacagtcaatgaacatgacttgttgaaattaaagaagtttacagaagattttggtcaagaaggctaagccaaagacaaggaagatgcttaccatatgtattctttctttcatagatatttttgtctatttggatcgcattaattgtttccagtaaaactcttttaccacagggaaatacacatctcacttcagagttccattaggttttatattgtacttttcctccattacttattaaatactcctattaacaaaaggtacaaaataacaggttatgaggaaatgagcgatatatgaacggcataaaaacagaaattacccagtaaaaaggatgtcagaaattgacatacaaatatttacaatttttatgaatggtggtctttgcaaagagcatttatattttcttttttttttactaaaatgatatagggtttattttatattttcaaaaaaattgttaaacatcattcttatcaatgtaaaatttacgttattaaaaaattacaaatgatagaatctttactcagggatgggcaataaaacagcaaagagctttgtgattgggtttgaaagattttgaattatagacagtgctcttaatagtttttaataagttgatatttttttctgtgtagatttaaataatttctttaaaagcgtaagctttggctgggcatggtggcttatgcctgtaatcccagcactttgggaggctacgatgggtggatcacctgaggtcaggagttcaagaccagtctggccaacatggtgaaatgccgtctctactaaaaatacaaaaattagctgggcatgatggcgagtgtctgtaatcccagctactcaggaggctgaggcgggagaatcacttgaacctgggaggcagaggttgcagtgagctgagatcgcgctactgcattccagcctgggcgccgagatagcgccattgcactccagcctgggcgactgaataaaactctgtctcaaaaaaaaacaaaaacggtaagcttttatatttaattaactgatacctttcactgtgcaatctcaagaggaagattttctaaattagacattgtctttaccttaaagaagaaaattgtctatttcagtgtcttttttagcaagattgaccaaaacaggtggtaggtgtgtaatttttaactgtcatgaaatactgtaatgcgcacctttgctaataaggaaatggtctccctttgaattatgggaagtttcttgtctgtgatatggggtgtctgtgtacatatatgtatatttccttttttaatacaggataataatatggggtcttgtccttcaccttttaagttcagggaacagtttgtcctgaccacacatatgttatcagtgtaatgctttatgaagctttagaaatgagctcatgactcattaaaaaataataaacatgatgctattttaatattttcaaataaataatctgaggatgtgtttcatactttagcatcaacgctgagttgtgccttgtagaattgcattgtctatacatgcaaaagactattaagttaggatgaactagattccctaattacagtgaaattctatcttgcaaatgctatagaataacttgcattttaaagtgtatttgcacattttacatatgctatgtggttgcctttgggttttctgtacagattgtttttgttattaaatggaaaaggcctgaattatgctcttatgtgaagtaaattgatataaccta

SEQ ID NO: 297419 - DNA, 2334 bp, Homo sapiens
agagtttcagaaccaagatcacccactgcacttagcctagtgacagagcgaactctgcctcaatcaatcaatcaatcaataaaaaataaggctgggcgtggtggctcacgcctgttatcccagcactttgggaggctgaggcaggtgtatcacctgaggtcaggagtttgagaccagcctggccaacatggtgaaatcccatctctactaaaaatacaaaaattagccaggcatggtggtgggtgcctgtaatcccagccactggggaggctgaggcaggagaatcacatgaacctgggaggcagagattgcagtgagccaagatggcgccattgcactccagtctgggcgacaagagtgagactccatctcaaaagaaaaaagaaaaatcaaaaaaaaaaaaaaagaatagggagtttatcgttagtatcttatggcagactgcaaatattcatatttaaacttaggttaaagttcatagcaataatgataatatgacggttttttattttgttaactctattattaatatcctccctacccttctttttccctgacagtcggatatgttgcggtcactatctaacacaaaacctacagtcaatgaacatgacttgttgaaattaaagaagtttacagaagattttggtcaagaaggctaagccaaagacaaggaagatgcttaccatatgtattctttctttcatagatatttttgtctatttggatcgcattaattgtttccagtaaaactcttttaccacagggaaatacacatctcacttcagagttccattaggttttatattgtacttttcctccattacttattaaatactcctattaacaaaaggtacaaaataacaggttatgaggaaatgagcgatatatgaacggcataaaaacagaaattacccagtaaaaaggatgtcagaaattgacatacaaatatttacaatttttatgaatggtggtctttgcaaagagcatttatattttcttttttttttactaaaatgatatagggtttattttatattttcaaaaaaattgttaaacatcattcttatcaatgtaaaatttacgttattaaaaaattacaaatgatagaatctttactcagggatgggcaataaaacagcaaagagctttgtgattgggtttgaaagattttgaattatagacagtgctcttaatagtttttaataagttgatatttttttctgtgtagatttaaataatttctttaaaagcgtaagctttggctgggcatggtggcttatgcctgtaatcccagcactttgggaggctacgatgggtggatcacctgaggtcaggagttcaagaccagtctggccaacatggtgaaatgccgtctctactaaaaatacaaaaattagctgggcatgatggcgagtgtctgtaatcccagctactcaggaggctgaggcgggagaatcacttgaacctgggaggcagaggttgcagtgagctgagatcgcgctactgcattccagcctgggcgccgagatagcgccattgcactccagcctgggcgactgaataaaactctgtctcaaaaaaaaacaaaaacggtaagcttttatatttaattaactgatacctttcactgtgcaatctcaagaggaagattttctaaattagacattgtctttaccttaaagaagaaaattgtctatttcagtgtcttttttagcaagattgaccaaaacaggtggtaggtgtgtaatttttaactgtcatgaaatactgtaatgcgcacctttgctaataaggaaatggtctccctttgaattatgggaagtttcttgtctgtgatatggggtgtctgtgtacatatatgtatatttccttttttaatacaggataataatatggggtcttgtccttcaccttttaagttcagggaacagtttgtcctgaccacacatatgttatcagtgtaatgctttatgaagctttagaaatgagctcatgactcattaaaaaataataaacatgatgctattttaatattttcaaataaataatctgaggatgtgtttcatactttagcatcaacgctgagttgtgccttgtagaattgcattgtctatacatgcaaaagactattaagttaggatgaactagattccctaattacagtgaaattctatcttgcaaatgctatagaataacttgcattttaaagtgtatttgcacattttacatatgctatgtggttgcctttgggttttctgtacagattgtttttgttattaaatggaaaaggcctgaattatgctcttatgtgaagtaaattgatataaccta

SEQ ID NO: 297420 - DNA, 1590 bp, Homo sapiens
  misc_feature (21)..(21): n is a, c, g, or t
  misc_feature (30)..(30): n is a, c, g, or t
  misc_feature (39)..(39): n is a, c, g, or t
gtgttgcgggtgatctagagntcccgtcantttctacgnttcagagttccattaggttttatattgtacttttcctccattacttattaaatactcctattaacaaaaggtacaaaataacaggttatgaggaaatgagcgatatatgaacggcataaaaacagaaattacccagtaaaaaggatgtcagaaattgacatacaaatatttacaatttttatgaatggtggtctttgcaaagagcatttatattttcttttttttttactaaaatgatatagggtttattttatattttcaaaaaaattgttaaacatcattcttatcaatgtaaaatttacgttattaaaaaattacaaatgatagaatctttactcagggatgggcaataaaacagcaaagagctttgtgattgggtttgaaagattttgaattatagacagtgctcttaatagtttttaataagttgatatttttttctgtgtagatttaaataatttctttaaaagcgtaagctttggctgggcatggtggcttatgcctgtaatcccagcactttgggaggctacgatgggtggatcacctgaggtcaggagttcaagaccagtctggccaacatggtgaaatgccgtctctactaaaaatacaaaaattagctgggcatgatggcgagtgtctgtaatcccagctactcaggaggctgaggcgggagaatcacttgaacctgggaggcagaggttgcagtgagctgagatcgcgctactgcattccagcctgggcgccgagatagcgccattgcactccagcctgggcgactgaataaaactctgtctcaaaaaaaaacaaaaacggtaagcttttatatttaattaactgatacctttcactgtgcaatctcaagaggaagattttctaaattagacattgtctttaccttaaagaagaaaattgtctatttcagtgtcttttttagcaagattgaccaaaacaggtggtaggtgtgtaatttttaactgtcatgaaatactgtaatgcgcacctttgctaataaggaaatggtctccctttgaattatgggaagtttcttgtctgtgatatggggtgtctgtgtacatatatgtatatttccttttttaatacaggataataatatggggtcttgtccttcaccttttaagttcagggaacagtttgtcctgaccacacatatgttatcagtgtaatgctttatgaagctttagaaatgagctcatgactcattaaaaaataataaacatgatgctattttaatattttcaaataaataatctgaggatgtgtttcatactttagcatcaacgctgagttgtgccttgtagaattgcattgtctatacatgcaaaagactattaagttaggatgaactagattccctaattacagtgaaattctatcttgcaaatgctatagaataacttgcattttaaagtgtatttgcacattttacatatgctatgtggttgcctttgggttttctgtacagattgtttttgttattaaatggaaaaggcctgaattatgctcttatgtgaagtaaattgatataaccta

SEQ ID NO: 297421 - DNA, 1254 bp, Homo sapiens
  misc_feature (21)..(21): n is a, c, g, or t
  misc_feature (30)..(30): n is a, c, g, or t
  misc_feature (39)..(39): n is a, c, g, or t
gtgttgcgggtgatctagagntcccgtcantttctacgntcagggatgggcaataaaacagcaaagagctttgtgattgggtttgaaagattttgaattatagacagtgctcttaatagtttttaataagttgatatttttttctgtgtagatttaaataatttctttaaaagcgtaagctttggctgggcatggtggcttatgcctgtaatcccagcactttgggaggctacgatgggtggatcacctgaggtcaggagttcaagaccagtctggccaacatggtgaaatgccgtctctactaaaaatacaaaaattagctgggcatgatggcgagtgtctgtaatcccagctactcaggaggctgaggcgggagaatcacttgaacctgggaggcagaggttgcagtgagctgagatcgcgctactgcattccagcctgggcgccgagatagcgccattgcactccagcctgggcgactgaataaaactctgtctcaaaaaaaaacaaaaacggtaagcttttatatttaattaactgatacctttcactgtgcaatctcaagaggaagattttctaaattagacattgtctttaccttaaagaagaaaattgtctatttcagtgtcttttttagcaagattgaccaaaacaggtggtaggtgtgtaatttttaactgtcatgaaatactgtaatgcgcacctttgctaataaggaaatggtctccctttgaattatgggaagtttcttgtctgtgatatggggtgtctgtgtacatatatgtatatttccttttttaatacaggataataatatggggtcttgtccttcaccttttaagttcagggaacagtttgtcctgaccacacatatgttatcagtgtaatgctttatgaagctttagaaatgagctcatgactcattaaaaaataataaacatgatgctattttaatattttcaaataaataatctgaggatgtgtttcatactttagcatcaacgctgagttgtgccttgtagaattgcattgtctatacatgcaaaagactattaagttaggatgaactagattccctaattacagtgaaattctatcttgcaaatgctatagaataacttgcattttaaagtgtatttgcacattttacatatgctatgtggttgcctttgggttttctgtacagattgtttttgttattaaatggaaaaggcctgaattatgctcttatgtgaagtaaattgatataaccta

SEQ ID NO: 297422 - DNA, 187 bp, Homo sapiens
tgctctccaggtgaccctggtgccattgaaatgacatggatggatgtccctggagataaacttttggagccagttgtttccatggtttgaaattttgtttgtttttaagaaaatattttaaaacattatacttcataattttcagttatataagatttgctggaaaatcttagtataaacaggtgta

SEQ ID NO: 297423 - DNA, 288 bp, Homo sapiens
aatttctcttttaagatttgagaaacgaatttatattcccttgccggaaccccatgcccgagcagcaatgtttaaactgcacctagggaccactcagaacagtctcacggaagcagactttcgggaacttgggaggaaaacagatggttattcaggggcagatataagtatcattgtacgtgatgcccttatgcagcctgttaggaaagtacagtcagctactcattttaaaaaggtaagtcatttttatctatcctttcctatcttttttttttttttttgagacag

SEQ ID NO: 297424 - DNA, 2800 bp, Homo sapiens
agcagaggcgggaccagaacctagagggcctcgggattgcggaagtttggtggggagggtcggagctctggtggagagagtgttgtctaaaacaagttccggaagggaggctgcccttcgcggtccgagaaccaccggcctccccagtttgagggctgttaccccgtgcgcgcttcgacgttgctgctgttggctctcctcgcccctcgttcccttgggaaccgcctgggaactccgccatgtcatccacttcgcccaacctccagaaagcgatagatctggctagcaaagcagcgcaagaagacaaggctgggaactacgaagaagcccttcagctctatcagcatgctgtgcagtattttcttcatgtcgttaaatatgaagcacagggtgataaagccaagcaaagtatcagggcaaagtgtacagaatatcttgatagagcagaaaaactaaaggagtacctgaaaaataaagagaaaaaagcacagaagccagtgaaagaaggacagccgagtccagcagatgagaaggggaatgacagtgatggggaaggagaatctgatgatcctgaaaaaaagaaactacagaatcaacttcaaggtgccattgttatagaacgaccaaatgtgaaatggagtgacgttgctggacttgaaggagccaaagaagcactgaaagaggctgtgatactgcctattaaatttcctcatctttttacaggcaagagaacaccttggaggggaatcctattatttgggccgcctggaacaggaaagtcctacttagccaaagctgtagcaacagaagccaacaactcaacatttttttcaatatcttcctctgatcttgtttctaagtggctaggtgaaagtgaaaaactggttaagaatttattccaacttgccagagagaacaagccctccattatcttcattgatgaaattgattctctctgtggttcaagaagtgaaaatgaaagtgaagccgcacgtagaattaagacggagttcctagtgcaaatgcaaggggttggtgtagacaatgatggaattttggttctgggagctacaaatataccctgggttctggattctgccattaggcgaagatttgagaaacgaatttatattcccttgccggaaccccatgcccgagcagcaatgtttaaactgcacctagggaccactcagaacagtctcacggaagcagactttcgggaacttgggaggaaaacagatggttattcaggggcagatataagtatcattgtacgtgatgcccttatgcagcctgttaggaaagtacagtcagctactcattttaaaaaggttcgcggaccttcccgagctgatcctaaccatcttgtagatgatctgctaacaccttgctctccaggtgaccctggtgccattgaaatgacatggatggatgtccctggagataaacttttggagccagttgtttccatgtcggatatgttgcggtcactatctaacacaaaacctacagtcaatgaacatgacttgttgaaattaaagaagtttacagaagattttggtcaagaaggctaagccaaagacaaggaagatgcttaccatatgtattctttctttcatagatatttttgtctatttggatcgcattaattgtttccagtaaaactcttttaccacagggaaatacacatctcacttcagagttccattaggttttatattgtacttttcctccattacttattaaatactcctattaacaaaaggtacaaaataacaggttatgaggaaatgagcgatatatgaacggcataaaaacagaaattacccagtaaaaaggatgtcagaaattgacatacaaatatttacaatttttatgaatggtggtctttgcaaagagcatttatattttcttttttttttactaaaatgatatagggtttattttatattttcaaaaaaattgttaaacatcattcttatcaatgtaaaatttacgttattaaaaaattacaaatgatagaatctttactcagggatgggcaataaaacagcaaagagctttgtgattgggtttgaaagattttgaattatagacagtgctcttaatagtttttaataagttgatatttttttctgtgtagatttaaataatttctttaaaagcgtaagctttggctgggcatggtggcttatgcctgtaatcccagcactttgggaggctacgatgggtggatcacctgaggtcaggagttcaagaccagtctggccaacatggtgaaatgccgtctctactaaaaatacaaaaattagctgggcatgatggcgagtgtctgtaatcccagctactcagcctcccgagtagctgggattacaggcgacaccacagcctggtaatttgtatattgatagagacggggttcaccatgttgaccaggctggtcttgatcttctggcttaggtgatccactttggcttgggcctccccaaaagtgcctgggaatgcaggcatgagccactacccccgggctcgggggtggtatgtgaaatagctgaaaccgggtatccgggagggaccaatgctgtaagtggccgacacataattttcaggttaacgggatgtcaaattacgggacgactcagtgggaccagaggtcaaacactgcatgggacgtaactaaacggatgaggccttgacaaggggggaagaccctgcctggggtacggacaactcaaggcacatacaacgaacacggttacggggtgtgtcacaattgctcgccccgacgtggcttaaaaaa

SEQ ID NO: 297425 - DNA, 5677 bp, Homo sapiens
aactgagcggcggcggcggggcgctggggcggagactgcgacccggagccgcccggactgacggagcccactgcggtgcgggcgttggcgcgggcacggaggacccgggcaggcatcgcaagcgaccccgagcggagccccggagccatggccctgagcgagctggcgctggtccgctggctgcaggagagccgccgctcgcggaagctcatcctgttcatcgtgttcctggcgctgctgctggacaacatgctgctcactgtcgtggtccccatcatcccaagttatctgtacagcattaagcatgagaagaatgctacagaaatccagacggccaggccagtgcacactgcctccatctcagacagcttccagagcatcttctcctattatgataactcgactatggtcaccgggaatgctaccagagacctgacacttcatcagaccgccacacagcacatggtgaccaacgcgtccgctgttccttccgactgtcccagtgaagacaaagacctcctgaatgaaaacgtgcaagttggtctgttgtttgcctcgaaagccaccgtccagctcatcaccaaccctttcataggactactgaccaacagaattggctatccaattcccatatttgcgggattctgcatcatgtttgtctcaacaattatgtttgccttctccagcagctatgccttcctgctgattgccaggtcgctgcagggcatcggctcgtcctgctcctctgtggctgggatgggcatgcttgccagtgtctacacagatgatgaagagagaggcaacgtcatgggaatcgccttgggaggcctggccatgggggtcttagtgggcccccccttcgggagtgtgctctatgagtttgtggggaagacggctccgttcctggtgctggccgccctggtactcttggatggagctattcagctctttgtgctccagccgtcccgggtgcagccagagagtcagaaggggacacccctaaccacgctgctgaaggacccgtacatcctcattgctgcaggctccatctgctttgcaaacatgggcatcgccatgctggagccagccctgcccatctggatgatggagaccatgtgttcccgaaagtggcagctgggcgttgccttcttgccagctagtatctcttatctcattggaaccaatatttttgggatacttgcacacaaaatggggaggtggctttgtgctcttctgggaatgataattgttggagtcagcattttatgtattccatttgcaaaaaacatttatggactcatagctccgaactttggagttggttttgcaattggaatggtggattcgtcaatgatgcctatcatgggctacctcgtagacctgcggcacgtgtccgtctatgggagtgtgtacgccattgcggatgtggcattttgtatggggtatgctataggtccttctgctggtggtgctattgcaaaggcaattggatttccatggctcatgacaattattgggataattgatattctttttgcccctctctgcttttttcttcgaagtccacctgccaaagaagaaaaaatggctattctcatggatcacaactgccctattaaaacaaaaatgtacactcagaataatatccagtcatatccgataggtgaagatgaagaatctgaaagtgactgagatgagatcctcaaaaatcatcaaagtgtttaattgtataaaacagtgtttccagtgacacaactcatccagaactgtcttagtcataccatccatccctggtgaaagagtaaaaccaaaggttattatttcctttccatggttatggtcgattgccaacagccttataaagaaaaagaagcttttctaggggtttgtataaatagtgttgaaactttattttatgtatttaattttattaaatatcatacaatatattttgatgaaataggtattgtgtaaatctataaatatttgaatccaaaccaaatataattttttaacttacattaacaaacatttgggcaaaaatcatattggtaatgagtgtttaaaattaaagcacacattatctctgagactcttccaacaaagagaaactagaatgaagtctgaaaaacagaatcaagtaagacagcatgttatatagtgacactgaatgttatttaacttgtagttactatcaatatatttatgcgttaaacagctagttctctcaagtgtagaggacaagaacttgtgtcagttatcttttgaatccataaatcttagctggcattagttttctatgtaatcacctacctagagagagttgtaaattatatgttaacatgttatctggttggcagcaaacactaaagccaataaaggaaaaacagtaaatgttccgaaagcagagaaaagcaaccaaacatattgttatgaactaaaagctttccctttaagatgcatacttgtcttactggatgaagaaaattgagggtacatgtaccttatactgtcaaggttgtttaaacatgataaggttaatcgccatctacttcaagttttagaaaaggaaacaagaagctaaaaacagctgctctgactttaatatctgactatatctttgatctgtttgcaggtcatccaagtgttttctaggaatatatttattttaggttgtctgaaactactattttttagactcctgaaagttgttcacatcaatgtgaagacaaattttaaatgaaaatgaagaatgaaattatgtcttgaatcatatattaagaagtaaaaataatagtgatcaggcagaaaagaaaaatggaacatctaaaaatgtatgtgctaactatatcatccagtgtgcagtgttgtgtatttttctaagcatgacaacattgatgtgccttttcagtgtaacagcaaatactgttagtgaacattgtcaatttatgtcattttgttaagagatatgactggagtgtgcagtgtggaatgtctctaatactacttgagaatcctgcagttctataatcataaacaaaaattacttagtttcgttaagctaagattgtgtttgtgttaacttcgacatcaaggagcaaagaactttagaacagactcctcaatcttgtgactttcttattctctaggaaagtaacacttcgtttcatgaagcttttctgtggggcttcgattatttcaagtctggtttctaagtgcagtgtgtttgaagcaaacgaacttccaactcacttatttggcattgggcaacttggccaagtctgctactttggaagatggctctggaggaaactctcatatggctaaaaaggcaggctagtttcttacttctacaggggtagagccttaaaaaagaacgtgctacaaattggttctctttgagggtttctggttctccctgcccccaataccatatactttattgcaattttatttttgcctttacggctctgtgtctttctgcaagaaggcctggcaaaggtatgcctgctgttggtccctcgggataagataaaatataaataaaaccttcagaactgttttggagcaaaagatagcttgtacttggggaaaaaaattctaagttcttttatatgactaatattcttggttagcaagactggaaagaggtgtttttttaaaatgtacataccagaacaaagaacatacagctctctgaacatttattttttgaacagaggtggtttttatgtttggacctggtaatacagatacaaaaactttaatgaggtagcaatgaatattcaactgtttgactgctaagtgtatctgtccatattttagcaagtttacttaataaatcttctgaaccatgttttgtgcctgtttgtattcctttataaaccaaatgttgttggaataaaatacataaggtatcattttgactgtggatatttaattaaaaactatttttctgtgcttgtaggcatcaggtaaaagccaccccaggttagcttgaccatacttttttggctttccacaatttattttaaattgagatatgtaactagccacattcaatgtggaaaaaacccaggaagttatccttccatctataaacattgttgtcctgatggttgtcaacaaataaccatatctgatgaaaacagctgtaatatccacccatttgacttaatcccgggggagtttgtaaaaccgttgaaatctgatacattttgaatggtgtgcccatgggtatcttcctgcggtgaaagtccacatctttaatcagatcctaaaagcggatctatggcccaaaaggaattaggggaacctctccttcttttggtaagaaaagcaattatgtcaatttagaagacagtatttttaaaagtaggtatttaaaatttattcacttttaggggacttaacattttattatttatcttatttttaagagccaaatatttccaaattgctttaaaaaaaattcagctatacatttagaacttgatagtacccctcaaaatttttaggttgtgttttctcctcccagcatcacaaaatagccacttatttcaagtacttctgatattgaatataaggcttgatatgaagaagtatagcctattatgattgctaataatgctaaaatgttgctcagtttgtctaagccattcactcagctaatactaatgtagaaaatatattttaaagtctaattactaatacatagccaaaggaaacccataaacttgataatccataaggaaacaatagtaaaaaaatgttttggggcagtctgcaaaacagcaattttgtttaggaaaagtggactttgttatgcttttctgcatggccaaattataccagaagataattccatagagatgcagcaatcaccttttttaaagatttcattaaatgaagatattcttgttttctgtggtagtctttattattattttttagctattgatacatagcatggcagcaagattacatcagtaatgtaatataatacagcttttttcattgaagctttgtaccttactatactctaggctatttggagtgttcccccacttgcactaaagtacaactatgatgtctctactgcctctcccagtgaaatataaaaatattgcactacattacagatatagtttacaaatgtcattagcagcattactgagctttctataattgtggtctacagagttaaatacttttaaaacatgagtagattcttataaaaccaaagttttgcattatttcaacagctctttcaaatgcatcagtttcagcaacatgcttgggtatcatgaaaacttccatggtttaatcaataaacaccagctacttacaagtagtccaccttccaggttatcaatggtaagttattttttataaagtggttacacactgagcagattgcctcaagtgtaagttatggaacaatactttagctttcagggaatttggtgtgtaaattcttctatagcagtgttcttttaaaataagatcacgtggccgggcgtggtggctcacacctgtaatcccagcactttgggaggccgaggcaggtggatcacgaggtcaggagatcgagaccatcctggctaacatggtgaaaccccgtctctactaaaaatacaaaaaattagccgcgcctgtactcccagctactccggag

SEQ ID NO: 297426 - DNA, 5624 bp, Homo sapiens
aactgagcggcggcggcggggcgctggggcggagactgcgacccggagccgcccggactgacggagcccactgcggtgcgggcgttggcgcgggcacggaggacccgggcaggcatcgcaagcgaccccgagcggagccccggagccatggccctgagcgagctggcgctggtccgctggctgcaggagagccgccgctcgcggaagctcatcctgttcatcgtgttcctggcgctgctgctggacaacatgctgctcactgtcgtggtccccatcatcccaagttatctgtacagcattaagcatgagaagaatgctacagaaatccagacggccaggccagtgcacactgcctccatctcagacagcttccagagcatcttctcctattatgataactcgactatggtcaccgggaatgctaccagagacctgacacttcatcagaccgccacacagcacatggtgaccaacgcgtccgctgttccttccgactgtcccagtgaagacaaagacctcctgaatgaaaacgtgcaagttggtctgttgtttgcctcgaaagccaccgtccagctcatcaccaaccctttcataggactactgaccaacagaattggctatccaattcccatatttgcgggattctgcatcatgtttgtctcaacaattatgtttgccttctccagcagctatgccttcctgctgattgccaggtcgctgcagggcatcggctcgtcctgctcctctgtggctgggatgggcatgcttgccagtgtctacacagatgatgaagagagaggcaacgtcatgggaatcgccttgggaggcctggccatgggggtcttagtgggcccccccttcgggagtgtgctctatgagtttgtggggaagacggctccgttcctggtgctggccgccctggtactcttggatggagctattcagctctttgtgctccagccgtcccgggtgcagccagagagtcagaaggggacacccctaaccacgctgctgaaggacccgtacatcctcattgctgcaggctccatctgctttgcaaacatgggcatcgccatgctggagccagccctgcccatctggatgatggagaccatgtgttcccgaaagtggcagctgggcgttgccttcttgccagctagtatctcttatctcattggaaccaatatttttgggatacttgcacacaaaatggggaggtggctttgtgctcttctgggaatgataattgttggagtcagcattttatgtattccatttgcaaaaaacatttatggactcatagctccgaactttggagttggttttgcaattggaatggtggattcgtcaatgatgcctatcatgggctacctcgtagacctgcggcacgtgtccgtctatgggagtgtgtacgccattgcggatgtggcattttgtatggggtatgctataggtccttctgctggtggtgctattgcaaaggcaattggatttccatggctcatgacaattattgggataattgatattctttttgcccctctctgcttttttcttcgaagtccacctgccaaagaagaaaaaatggctattctcatggatcacaactgccctattaaaacaaaaatgtacactcagaataatatccagtcatatccgataggtgaagatgaagaatctgaaagtgactgagatgagatcctcaaaaatcatcaaagtgtttaattgtataaaacagtgtttccagtgacacaactcatccagaactgtcttagtcataccatccatccctggtgaaagagtaaaaccaaaggttattatttcctttccatggttatggtcgattgccaacagccttataaagaaaaagaagcttttctaggggtttgtataaatagtgttgaaactttattttatgtatttaattttattaaatatcatacaatatattttgatgaaataggtattgtgtaaatctataaatatttgaatccaaaccaaatataattttttaacttacattaacaaacatttgggcaaaaatcatattggtaatgagtgtttaaaattaaagcacacattatctctgagactcttccaacaaagagaaactagaatgaagtctgaaaaacagaatcaagtaagacagcatgttatatagtgacactgaatgttatttaacttgtagttactatcaatatatttatgcgttaaacagctagttctctcaagtgtagaggacaagaacttgtgtcagttatcttttgaatccataaatcttagctggcattagttttctatgtaatcacctacctagagagagttgtaaattatatgttaacatgttatctggttggcagcaaacactaaagccaataaaggaaaaacagtaaatgttccgaaagcagagaaaagcaaccaaacatattgttatgaactaaaagctttccctttaagatgcatacttgtcttactggatgaagaaaattgagggtacatgtaccttatactgtcaaggttgtttaaacatgataaggttaatcgccatctacttcaagttttagaaaaggaaacaagaagctaaaaacagctgctctgactttaatatctgactatatctttgatctgtttgcaggtcatccaagtgttttctaggaatatatttattttaggttgtctgaaactactattttttagactcctgaaagttgttcacatcaatgtgaagacaaattttaaatgaaaatgaagaatgaaattatgtcttgaatcatatattaagaagtaaaaataatagtgatcaggcagaaaagaaaaatggaacatctaagcatgacaacattgatgtgccttttcagtgtaacagcaaatactgttagtgaacattgtcaatttatgtcattttgttaagagatatgactggagtgtgcagtgtggaatgtctctaatactacttgagaatcctgcagttctataatcataaacaaaaattacttagtttcgttaagctaagattgtgtttgtgttaacttcgacatcaaggagcaaagaactttagaacagactcctcaatcttgtgactttcttattctctaggaaagtaacacttcgtttcatgaagcttttctgtggggcttcgattatttcaagtctggtttctaagtgcagtgtgtttgaagcaaacgaacttccaactcacttatttggcattgggcaacttggccaagtctgctactttggaagatggctctggaggaaactctcatatggctaaaaaggcaggctagtttcttacttctacaggggtagagccttaaaaaagaacgtgctacaaattggttctctttgagggtttctggttctccctgcccccaataccatatactttattgcaattttatttttgcctttacggctctgtgtctttctgcaagaaggcctggcaaaggtatgcctgctgttggtccctcgggataagataaaatataaataaaaccttcagaactgttttggagcaaaagatagcttgtacttggggaaaaaaattctaagttcttttatatgactaatattcttggttagcaagactggaaagaggtgtttttttaaaatgtacataccagaacaaagaacatacagctctctgaacatttattttttgaacagaggtggtttttatgtttggacctggtaatacagatacaaaaactttaatgaggtagcaatgaatattcaactgtttgactgctaagtgtatctgtccatattttagcaagtttacttaataaatcttctgaaccatgttttgtgcctgtttgtattcctttataaaccaaatgttgttggaataaaatacataaggtatcattttgactgtggatatttaattaaaaactatttttctgtgcttgtaggcatcaggtaaaagccaccccaggttagcttgaccatacttttttggctttccacaatttattttaaattgagatatgtaactagccacattcaatgtggaaaaaacccaggaagttatccttccatctataaacattgttgtcctgatggttgtcaacaaataaccatatctgatgaaaacagctgtaatatccacccatttgacttaatcccgggggagtttgtaaaaccgttgaaatctgatacattttgaatggtgtgcccatgggtatcttcctgcggtgaaagtccacatctttaatcagatcctaaaagcggatctatggcccaaaaggaattaggggaacctctccttcttttggtaagaaaagcaattatgtcaatttagaagacagtatttttaaaagtaggtatttaaaatttattcacttttaggggacttaacattttattatttatcttatttttaagagccaaatatttccaaattgctttaaaaaaaattcagctatacatttagaacttgatagtacccctcaaaatttttaggttgtgttttctcctcccagcatcacaaaatagccacttatttcaagtacttctgatattgaatataaggcttgatatgaagaagtatagcctattatgattgctaataatgctaaaatgttgctcagtttgtctaagccattcactcagctaatactaatgtagaaaatatattttaaagtctaattactaatacatagccaaaggaaacccataaacttgataatccataaggaaacaatagtaaaaaaatgttttggggcagtctgcaaaacagcaattttgtttaggaaaagtggactttgttatgcttttctgcatggccaaattataccagaagataattccatagagatgcagcaatcaccttttttaaagatttcattaaatgaagatattcttgttttctgtggtagtctttattattattttttagctattgatacatagcatggcagcaagattacatcagtaatgtaatataatacagcttttttcattgaagctttgtaccttactatactctaggctatttggagtgttcccccacttgcactaaagtacaactatgatgtctctactgcctctcccagtgaaatataaaaatattgcactacattacagatatagtttacaaatgtcattagcagcattactgagctttctataattgtggtctacagagttaaatacttttaaaacatgagtagattcttataaaaccaaagttttgcattatttcaacagctctttcaaatgcatcagtttcagcaacatgcttgggtatcatgaaaacttccatggtttaatcaataaacaccagctacttacaagtagtccaccttccaggttatcaatggtaagttattttttataaagtggttacacactgagcagattgcctcaagtgtaagttatggaacaatactttagctttcagggaatttggtgtgtaaattcttctatagcagtgttcttttaaaataagatcacgtggccgggcgtggtggctcacacctgtaatcccagcactttgggaggccgaggcaggtggatcacgaggtcaggagatcgagaccatcctggctaacatggtgaaaccccgtctctactaaaaatacaaaaaattagccgcgcctgtactcccagctactccggag

SEQ ID NO: 297427 - DNA, 4703 bp, Homo sapiens
aactgagcggcggcggcggggcgctggggcggagactgcgacccggagccgcccggactgacggagcccactgcggtgcgggcgttggcgcgggcacggaggacccgggcaggcatcgcaagcgaccccgagcggagccccggagccatggccctgagcgagctggcgctggtccgctggctgcaggagagccgccgctcgcggaagctcatcctgttcatcgtgttcctggcgctgctgctggacaacatgctgctcactgtcgtggtccccatcatcccaagttatctgtacagcattaagcatgagaagaatgctacagaaatccagacggccaggccagtgcacactgcctccatctcagacagcttccagagcatcttctcctattatgataactcgactatggtcaccgggaatgctaccagagacctgacacttcatcagaccgccacacagcacatggtgaccaacgcgtccgctgttccttccgactgtcccagtgaagacaaagacctcctgaatgaaaacgtgcaagttggtctgttgtttgcctcgaaagccaccgtccagctcatcaccaaccctttcataggactactgaccaacagaattggctatccaattcccatatttgcgggattctgcatcatgtttgtctcaacaattatgtttgccttctccagcagctatgccttcctgctgattgccaggtcgctgcagggcatcggctcgtcctgctcctctgtggctgggatgggcatgcttgccagtgtctacacagatgatgaagagagaggcaacgtcatgggaatcgccttgggaggcctggccatgggggtcttagtgggcccccccttcgggagtgtgctctatgagtttgtggggaagacggctccgttcctggtgctggccgccctggtactcttggatggagctattcagctctttgtgctccagccgtcccgggtgcagccagagagtcagaaggggacacccctaaccacgctgctgaaggacccgtacatcctcattgctgcaggctccatctgctttgcaaacatgggcatcgccatgctggagccagccctgcccatctggatgatggagaccatgtgttcccgaaagtggcagctgggcgttgccttcttgccagctagtatctcttatctcattggaaccaatatttttgggatacttgcacacaaaatggggaggtggctttgtgctcttctgggaatgataattgttggagtcagcattttatgtattccatttgcaaaaaacatttatggactcatagctccgaactttggagttggttttgcaattggaatggtggattcgtcaatgatgcctatcatgggctacctcgtagacctgcggcacgtgtccgtctatgggagtgtgtacgccattgcggatgtggcattttgtatggggtatgctataggtccttctgctggtggtgctattgcaaaggcaattggatttccatggctcatgacaattattgggataattgatattctttttgcccctctctgcttttttcttcgaagtccacctgccaaagaagaaaaaatggctattctcatggatcacaactgccctattaaaacaaaaatgtacactcagaataatatccagtcatatccgataggtgaagatgaagaatctgaaagtgactgagatgagatcctcaaaaatcatcaaagtgtttaattgtataaaacagtgtttccagtgacacaactcatccagaactgtcttagtcataccatccatccctggtgaaagagtaaaaccaaaggttattatttcctttccatggttatggtcgattgccaacagccttataaagaaaaagaagcttttctaggggtttgtataaatagtgttgaaactttattttatgtatttaattttattaaatatcatacaatatattttgatgaaataggtattgtgtaaatctataaatatttgaatccaaaccaaatataattttttaacttacattaacaaacatttgggcaaaaatcatattggtaatgagtgtttaaaattaaagcacacattatctctgagactcttccaacaaagagaaactagaatgaagtctgaaaaacagaatcaagtaagacagcatgttatatagtgacactgaatgttatttaacttgtagttactatcaatatatttatgcgttaaacagctagttctctcaagtgtagaggacaagaacttgtgtcagttatcttttgaatccataaatcttagctggcattagttttctatgtaatcacctacctagagagagttgtaaattatatgttaacatgttatctggttggcagcaaacactaaagccaataaaggaaaaacagtaaatgttccgaaagcagagaaaagcaaccaaacatattgttatgaactaaaagctttccctttaagatgcatacttgtcttactggatgaagaaaattgagggtacatgtaccttatactgtcaaggttgtttaaacatgataaggttaatcgccatctacttcaagttttagaaaaggaaacaagaagctaaaaacagctgctctgactttaatatctgactatatctttgatctgtttgcaggtcatccaagtgttttctaggaatatatttattttaggttgtctgaaactactattttttagactcctgaaagttgttcacatcaatgtgaagacaaattttaaatgaaaatgaagaatgaaattatgtcttgaatcatatattaagaagtaaaaataatagtgatcaggcagaaaagaaaaatggaacatctaaaaatgtatgtgctaactatatcatccagtgtgcagtgttgtgtatttttctaagcatgacaacattgatgtgccttttcagtgtaacagcaaatactgttagtgaacattgtcaatttatgtcattttgttaagagatatgactggagtgtgcagtgtggaatgtctctaatactacttgagaatcctgcagttctataatcataaacaaaaattacttagtttcgttaagctaagattgtgtttgtgttaacttcgacatcaaggagcaaagaactttagaacagactcctcaatcttgtgactttcttattctctaggaaagtaacacttcgtttcatgaagcttttctgtggggcttcgattatttcaagtctggtttctaagtgcagtgtgtttgaagcaaacgaacttccaactcacttatttggcattgggcaacttggccaagtctgctactttggaagatggctctggaggaaactctcatatggctaaaaaggcaggctagtttcttacttctacaggggtagagccttaaaaaagaacgtgctacaaattggttctctttgagggtttctggttctccctgcccccaataccatatactttattgcaattttatttttgcctttacggctctgtgtctttctgcaagaaggcctggcaaaggtatgcctgctgttggtccctcgggataagataaaatataaataaaaccttcagaactgttttggagcaaaagatagcttgtacttggggaaaaaaattctaagttcttttatatgactaatattcttggttagcaagactggaaagaggtgtttttttaaaatgtacataccagaacaaagaacatacagctctctgaacatttattttttgaacagaggtggtttttatgtttggacctggtaatacagatacaaaaactttaatgaggtagcaatgaatattcaactgtttgactgctaagtgtatctgtccatattttagcaagtttacttaataaatcttctgaaccatgttttgtgcctgtttgtattcctttataaaccaaatgttgttggaataaaatacataaggtatcattttgactgtggatatttaattaaaaactatttttctgtgcttgtaggcatcaggtaaaagccaccccaggttagcttgaccatacttttttggctttccacaatttattttaaattgagatatgtaactagccacattcaatgtggaaaaaacccaggaagttatccttccatctataaacattgttgtcctgatggttgtcaacaaataaccatatctgatgaaaacagctgtaatatccacccatttgacttaatcccgggggagtttgtaaaaccgttgaaatctgatacattttgaatggtgtgcccatgggtatcttcctgcggtgaaagtccacatctttaatcagatcctaaaagcggatctatggcccaaaaggaattaggggaacctctccttcttttggtaagaaaagcaattatgtcaatttagaagacagtatttttaaaagtaggtatttaaaatttattcacttttaggggacttaacattttattatttatcttatttttaagagccaaatatttccaaattgctttaaaaaaaattcagctatacatttagaacttgatagtacccctcaaaatttttaggttgtgttttctcctcccagcatcacaaaatagccacttatttcaagtacttctgatattgaatataaggcttgatatgaagaagtatagcctattatgattgctaataatgctaaaatgtatagctgaatttttttaaagcaatttggaaatatttggctcttaaaaataagacaaagggaaaca

SEQ ID NO: 297428 - DNA, 4970 bp, Homo sapiens
aaattttttacgtttgagtttgttgatgttttattacagctttcattttattctaattttttatcatcttaaaaatgtttggacaagactttccaaggagtgtattttcattttatgtcagaaattatttaaaatgttttatttcacagtttaacttttcccctgcatcatcttaagcttgacagtgtcttaaacacttcaggacaaccaacctgaaacaatagcaagatgtttttctagaataaaatctcttctaccaatggccaatatccatccctcatgaggcctacttgttcttgtcaaaacttgagggtggactaggctgatctttcacatatgccggtgacaagtttttcatggtggtcataaaactcgtttcaagctttgacttttaaagatttggagggtccggttcttcacaaaccccacccttcttcctcctgttttcttcagaagggaacaggcataccacgctcagagaaaacacaagttcaagactttacgagatgatttagagttggatctcttgttattttagcataatgtttatttcctcttacagattccatttgcaaaaaacatttatggactcatagctccgaactttggagttggttttgcaattggaatggtggattcgtcaatgatgcctatcatgggctacctcgtagacctgcggcacgtgtccgtctatgggagtgtgtacgccattgcggatgtggcattttgtatggggtatgctataggtccttctgctggtggtgctattgcaaaggcaattggatttccatggctcatgacaattattgggataattgatattctttttgcccctctctgcttttttcttcgaagtccacctgccaaagaagaaaaaatggctattctcatggatcacaactgccctattaaaacaaaaatgtacactcagaataatatccagtcatatccgataggtgaagatgaagaatctgaaagtgactgagatgagatcctcaaaaatcatcaaagtgtttaattgtataaaacagtgtttccagtgacacaactcatccagaactgtcttagtcataccatccatccctggtgaaagagtaaaaccaaaggttattatttcctttccatggttatggtcgattgccaacagccttataaagaaaaagaagcttttctaggggtttgtataaatagtgttgaaactttattttatgtatttaattttattaaatatcatacaatatattttgatgaaataggtattgtgtaaatctataaatatttgaatccaaaccaaatataattttttaacttacattaacaaacatttgggcaaaaatcatattggtaatgagtgtttaaaattaaagcacacattatctctgagactcttccaacaaagagaaactagaatgaagtctgaaaaacagaatcaagtaagacagcatgttatatagtgacactgaatgttatttaacttgtagttactatcaatatatttatgcgttaaacagctagttctctcaagtgtagaggacaagaacttgtgtcagttatcttttgaatccataaatcttagctggcattagttttctatgtaatcacctacctagagagagttgtaaattatatgttaacatgttatctggttggcagcaaacactaaagccaataaaggaaaaacagtaaatgttccgaaagcagagaaaagcaaccaaacatattgttatgaactaaaagctttccctttaagatgcatacttgtcttactggatgaagaaaattgagggtacatgtaccttatactgtcaaggttgtttaaacatgataaggttaatcgccatctacttcaagttttagaaaaggaaacaagaagctaaaaacagctgctctgactttaatatctgactatatctttgatctgtttgcaggtcatccaagtgttttctaggaatatatttattttaggttgtctgaaactactattttttagactcctgaaagttgttcacatcaatgtgaagacaaattttaaatgaaaatgaagaatgaaattatgtcttgaatcatatattaagaagtaaaaataatagtgatcaggcagaaaagaaaaatggaacatctaaaaatgtatgtgctaactatatcatccagtgtgcagtgttgtgtatttttctaagcatgacaacattgatgtgccttttcagtgtaacagcaaatactgttagtgaacattgtcaatttatgtcattttgttaagagatatgactggagtgtgcagtgtggaatgtctctaatactacttgagaatcctgcagttctataatcataaacaaaaattacttagtttcgttaagctaagattgtgtttgtgttaacttcgacatcaaggagcaaagaactttagaacagactcctcaatcttgtgactttcttattctctaggaaagtaacacttcgtttcatgaagcttttctgtggggcttcgattatttcaagtctggtttctaagtgcagtgtgtttgaagcaaacgaacttccaactcacttatttggcattgggcaacttggccaagtctgctactttggaagatggctctggaggaaactctcatatggctaaaaaggcaggctagtttcttacttctacaggggtagagccttaaaaaagaacgtgctacaaattggttctctttgagggtttctggttctccctgcccccaataccatatactttattgcaattttatttttgcctttacggctctgtgtctttctgcaagaaggcctggcaaaggtatgcctgctgttggtccctcgggataagataaaatataaataaaaccttcagaactgttttggagcaaaagatagcttgtacttggggaaaaaaattctaagttcttttatatgactaatattcttggttagcaagactggaaagaggtgtttttttaaaatgtacataccagaacaaagaacatacagctctctgaacatttattttttgaacagaggtggtttttatgtttggacctggtaatacagatacaaaaactttaatgaggtagcaatgaatattcaactgtttgactgctaagtgtatctgtccatattttagcaagtttacttaataaatcttctgaaccatgttttgtgcctgtttgtattcctttataaaccaaatgttgttggaataaaatacataaggtatcattttgactgtggatatttaattaaaaactatttttctgtgcttgtaggcatcaggtaaaagccaccccaggttagcttgaccatacttttttggctttccacaatttattttaaattgagatatgtaactagccacattcaatgtggaaaaaacccaggaagttatccttccatctataaacattgttgtcctgatggttgtcaacaaataaccatatctgatgaaaacagctgtaatatccacccatttgacttaatcccgggggagtttgtaaaaccgttgaaatctgatacattttgaatggtgtgcccatgggtatcttcctgcggtgaaagtccacatctttaatcagatcctaaaagcggatctatggcccaaaaggaattaggggaacctctccttcttttggtaagaaaagcaattatgtcaatttagaagacagtatttttaaaagtaggtatttaaaatttattcacttttaggggacttaacattttattatttatcttatttttaagagccaaatatttccaaattgctttaaaaaaaattcagctatacatttagaacttgatagtacccctcaaaatttttaggttgtgttttctcctcccagcatcacaaaatagccacttatttcaagtacttctgatattgaatataaggcttgatatgaagaagtatagcctattatgattgctaataatgctaaaatgttgctcagtttgtctaagccattcactcagctaatactaatgtagaaaatatattttaaagtctaattactaatacatagccaaaggaaacccataaacttgataatccataaggaaacaatagtaaaaaaatgttttggggcagtctgcaaaacagcaattttgtttaggaaaagtggactttgttatgcttttctgcatggccaaattataccagaagataattccatagagatgcagcaatcaccttttttaaagatttcattaaatgaagatattcttgttttctgtggtagtctttattattattttttagctattgatacatagcatggcagcaagattacatcagtaatgtaatataatacagcttttttcattgaagctttgtaccttactatactctaggctatttggagtgttcccccacttgcactaaagtacaactatgatgtctctactgcctctcccagtgaaatataaaaatattgcactacattacagatatagtttacaaatgtcattagcagcattactgagctttctataattgtggtctacagagttaaatacttttaaaacatgagtagattcttataaaaccaaagttttgcattatttcaacagctctttcaaatgcatcagtttcagcaacatgcttgggtatcatgaaaacttccatggtttaatcaataaacaccagctacttacaagtagtccaccttccaggttatcaatggtaagttattttttataaagtggttacacactgagcagattgcctcaagtgtaagttatggaacaatactttagctttcagggaatttggtgtgtaaattcttctatagcagtgttcttttaaaataagatcacgtggccgggcgtggtggctcacacctgtaatcccagcactttgggaggccgaggcaggtggatcacgaggtcaggagatcgagaccatcctggctaacatggtgaaaccccgtctctactaaaaatacaaaaaattagccgcgcctgtactcccagctactccggag

SEQ ID NO: 297429 - DNA, 3704 bp, Homo sapiens
ccgttattgatatactacaccgcgaccgcgcctgagtttttttttttgagggtgtgtgtgtgcaaaattgtggtcttacccccgtttttgctacacacgctgggcaatatatggagggtttagcgcccttttttggggcttctcacaggtgttgattggttgaagcagatccttcagcccctgtttatatgggacccggatgttatagcgtggagtacctatcaatatatttatgcgttaaacagctagttctctcaagtgtagaggacaagaacttgtgtcagttatcttttgaatccataaatcttagctggcattagttttctatgtaatcacctacctagagagagttgtaaattatatgttaacatgttatctggttggcagcaaacactaaagccaataaaggaaaaacagtaaatgttccgaaagcagagaaaagcaaccaaacatattgttatgaactaaaagctttccctttaagatgcatacttgtcttactggatgaagaaaattgagggtacatgtaccttatactgtcaaggttgtttaaacatgataaggttaatcgccatctacttcaagttttagaaaaggaaacaagaagctaaaaacagctgctctgactttaatatctgactatatctttgatctgtttgcaggtcatccaagtgttttctaggaatatatttattttaggttgtctgaaactactattttttagactcctgaaagttgttcacatcaatgtgaagacaaattttaaatgaaaatgaagaatgaaattatgtcttgaatcatatattaagaagtaaaaataatagtgatcaggcagaaaagaaaaatggaacatctaaaaatgtatgtgctaactatatcatccagtgtgcagtgttgtgtatttttctaagcatgacaacattgatgtgccttttcagtgtaacagcaaatactgttagtgaacattgtcaatttatgtcattttgttaagagatatgactggagtgtgcagtgtggaatgtctctaatactacttgagaatcctgcagttctataatcataaacaaaaattacttagtttcgttaagctaagattgtgtttgtgttaacttcgacatcaaggagcaaagaactttagaacagactcctcaatcttgtgactttcttattctctaggaaagtaacacttcgtttcatgaagcttttctgtggggcttcgattatttcaagtctggtttctaagtgcagtgtgtttgaagcaaacgaacttccaactcacttatttggcattgggcaacttggccaagtctgctactttggaagatggctctggaggaaactctcatatggctaaaaaggcaggctagtttcttacttctacaggggtagagccttaaaaaagaacgtgctacaaattggttctctttgagggtttctggttctccctgcccccaataccatatactttattgcaattttatttttgcctttacggctctgtgtctttctgcaagaaggcctggcaaaggtatgcctgctgttggtccctcgggataagataaaatataaataaaaccttcagaactgttttggagcaaaagatagcttgtacttggggaaaaaaattctaagttcttttatatgactaatattcttggttagcaagactggaaagaggtgtttttttaaaatgtacataccagaacaaagaacatacagctctctgaacatttattttttgaacagaggtggtttttatgtttggacctggtaatacagatacaaaaactttaatgaggtagcaatgaatattcaactgtttgactgctaagtgtatctgtccatattttagcaagtttacttaataaatcttctgaaccatgttttgtgcctgtttgtattcctttataaaccaaatgttgttggaataaaatacataaggtatcattttgactgtggatatttaattaaaaactatttttctgtgcttgtaggcatcaggtaaaagccaccccaggttagcttgaccatacttttttggctttccacaatttattttaaattgagatatgtaactagccacattcaatgtggaaaaaacccaggaagttatccttccatctataaacattgttgtcctgatggttgtcaacaaataaccatatctgatgaaaacagctgtaatatccacccatttgacttaatcccgggggagtttgtaaaaccgttgaaatctgatacattttgaatggtgtgcccatgggtatcttcctgcggtgaaagtccacatctttaatcagatcctaaaagcggatctatggcccaaaaggaattaggggaacctctccttcttttggtaagaaaagcaattatgtcaatttagaagacagtatttttaaaagtaggtatttaaaatttattcacttttaggggacttaacattttattatttatcttatttttaagagccaaatatttccaaattgctttaaaaaaaattcagctatacatttagaacttgatagtacccctcaaaatttttaggttgtgttttctcctcccagcatcacaaaatagccacttatttcaagtacttctgatattgaatataaggcttgatatgaagaagtatagcctattatgattgctaataatgctaaaatgttgctcagtttgtctaagccattcactcagctaatactaatgtagaaaatatattttaaagtctaattactaatacatagccaaaggaaacccataaacttgataatccataaggaaacaatagtaaaaaaatgttttggggcagtctgcaaaacagcaattttgtttaggaaaagtggactttgttatgcttttctgcatggccaaattataccagaagataattccatagagatgcagcaatcaccttttttaaagatttcattaaatgaagatattcttgttttctgtggtagtctttattattattttttagctattgatacatagcatggcagcaagattacatcagtaatgtaatataatacagcttttttcattgaagctttgtaccttactatactctaggctatttggagtgttcccccacttgcactaaagtacaactatgatgtctctactgcctctcccagtgaaatataaaaatattgcactacattacagatatagtttacaaatgtcattagcagcattactgagctttctataattgtggtctacagagttaaatacttttaaaacatgagtagattcttataaaaccaaagttttgcattatttcaacagctctttcaaatgcatcagtttcagcaacatgcttgggtatcatgaaaacttccatggtttaatcaataaacaccagctacttacaagtagtccaccttccaggttatcaatggtaagttattttttataaagtggttacacactgagcagattgcctcaagtgtaagttatggaacaatactttagctttcagggaatttggtgtgtaaattcttctatagcagtgttcttttaaaataagatcacgtggccgggcgtggtggctcacacctgtaatcccagcactttgggaggccgaggcaggtggatcacgaggtcaggagatcgagaccatcctggctaacatggtgaaaccccgtctctactaaaaatacaaaaaattagccgcgcctgtactcccagctactccggag

SEQ ID NO: 297430 - DNA, 2878 bp, Homo sapiens
agctcggtaccccacaccacctgagtcctaaaaatgtatgtgctaactatatcatccagtgtgcagtgttgtgtatttttctaagcatgacaacattgatgtgccttttcagtgtaacagcaaatactgttagtgaacattgtcaatttatgtcattttgttaagagatatgactggagtgtgcagtgtggaatgtctctaatactacttgagaatcctgcagttctataatcataaacaaaaattacttagtttcgttaagctaagattgtgtttgtgttaacttcgacatcaaggagcaaagaactttagaacagactcctcaatcttgtgactttcttattctctaggaaagtaacacttcgtttcatgaagcttttctgtggggcttcgattatttcaagtctggtttctaagtgcagtgtgtttgaagcaaacgaacttccaactcacttatttggcattgggcaacttggccaagtctgctactttggaagatggctctggaggaaactctcatatggctaaaaaggcaggctagtttcttacttctacaggggtagagccttaaaaaagaacgtgctacaaattggttctctttgagggtttctggttctccctgcccccaataccatatactttattgcaattttatttttgcctttacggctctgtgtctttctgcaagaaggcctggcaaaggtatgcctgctgttggtccctcgggataagataaaatataaataaaaccttcagaactgttttggagcaaaagatagcttgtacttggggaaaaaaattctaagttcttttatatgactaatattcttggttagcaagactggaaagaggtgtttttttaaaatgtacataccagaacaaagaacatacagctctctgaacatttattttttgaacagaggtggtttttatgtttggacctggtaatacagatacaaaaactttaatgaggtagcaatgaatattcaactgtttgactgctaagtgtatctgtccatattttagcaagtttacttaataaatcttctgaaccatgttttgtgcctgtttgtattcctttataaaccaaatgttgttggaataaaatacataaggtatcattttgactgtggatatttaattaaaaactatttttctgtgcttgtaggcatcaggtaaaagccaccccaggttagcttgaccatacttttttggctttccacaatttattttaaattgagatatgtaactagccacattcaatgtggaaaaaacccaggaagttatccttccatctataaacattgttgtcctgatggttgtcaacaaataaccatatctgatgaaaacagctgtaatatccacccatttgacttaatcccgggggagtttgtaaaaccgttgaaatctgatacattttgaatggtgtgcccatgggtatcttcctgcggtgaaagtccacatctttaatcagatcctaaaagcggatctatggcccaaaaggaattaggggaacctctccttcttttggtaagaaaagcaattatgtcaatttagaagacagtatttttaaaagtaggtatttaaaatttattcacttttaggggacttaacattttattatttatcttatttttaagagccaaatatttccaaattgctttaaaaaaaattcagctatacatttagaacttgatagtacccctcaaaatttttaggttgtgttttctcctcccagcatcacaaaatagccacttatttcaagtacttctgatattgaatataaggcttgatatgaagaagtatagcctattatgattgctaataatgctaaaatgttgctcagtttgtctaagccattcactcagctaatactaatgtagaaaatatattttaaagtctaattactaatacatagccaaaggaaacccataaacttgataatccataaggaaacaatagtaaaaaaatgttttggggcagtctgcaaaacagcaattttgtttaggaaaagtggactttgttatgcttttctgcatggccaaattataccagaagataattccatagagatgcagcaatcaccttttttaaagatttcattaaatgaagatattcttgttttctgtggtagtctttattattattttttagctattgatacatagcatggcagcaagattacatcagtaatgtaatataatacagcttttttcattgaagctttgtaccttactatactctaggctatttggagtgttcccccacttgcactaaagtacaactatgatgtctctactgcctctcccagtgaaatataaaaatattgcactacattacagatatagtttacaaatgtcattagcagcattactgagctttctataattgtggtctacagagttaaatacttttaaaacatgagtagattcttataaaaccaaagttttgcattatttcaacagctctttcaaatgcatcagtttcagcaacatgcttgggtatcatgaaaacttccatggtttaatcaataaacaccagctacttacaagtagtccaccttccaggttatcaatggtaagttattttttataaagtggttacacactgagcagattgcctcaagtgtaagttatggaacaatactttagctttcagggaatttggtgtgtaaattcttctatagcagtgttcttttaaaataagatcacgtggccgggcgtggtggctcacacctgtaatcccagcactttgggaggccgaggcaggtggatcacgaggtcaggagatcgagaccatcctggctaacatggtgaaaccccgtctctactaaaaatacaaaaaattagccgcgcctgtactcccagctactccggag

SEQ ID NO: 297431 - DNA, 1558 bp, Homo sapiens
aaattttttacgtttgagtttgttgatgttttattacagctttcattttattctaattttttatcatcttaaaaatgtttggacaagactttccaaggagtgtattttcattttatgtcagaaattatttaaaatgttttatttcacagtttaacttttcccctgcatcatcttaagcttgacagtgtcttaaacacttcaggacaaccaacctgaaacaatagcaagatgtttttctagaataaaatctcttctaccaatggccaatatccatccctcatgaggcctacttgttcttgtcaaaacttgagggtggactaggctgatctttcacatatgccggtgacaagtttttcatggtggtcataaaactcgtttcaagctttgacttttaaagatttggagggtccggttcttcacaaaccccacccttcttcctcctgttttcttcagaagggaacaggcataccacgctcagagaaaacacaagttcaagactttacgagatgatttagagttggatctcttgttattttagcataatgtttatttcctcttacagattccatttgcaaaaaacatttatggactcatagctccgaactttggagttggttttgcaattggtaagtcacacgaaccttgtgcctacatttaaaaccgcttttccactaggaagggttcttcttcctctggtagactgtagttcctcaacctaaatttccagaatcttagaaggaggctgcaggcagcttagctaaattacagcctgtcgattctccgtgtaaatacacctgcttctatgcactagtcatttatttcctgaaaaccagtattttttaaaagctgatatttacagaaggaaactgatgctccactgctggggctgggcaaacaaaggaatcccttgcacagagctcatttttgtggactcctccctatgagcaggtcttctcatgaggctgggggcaaaggcttcacatatgtattttgaagaggttttagtacagacaaagcagactaatgtgttgatgaccgcctgtgctgcaggaattcccatgggcaaggagatgggcttttgtaatgttaagaatgataatatgttaggaaaaatctgtcactattttgagtgaatggtatacttttgtctcttatttataatataccaattgatcatgataaaaataagtgctcagtccacccctgtagaagcaggaacgcaacctttgagtggtacagtggcacagcatggctttcactgaggacagatggtagaaggctgctgaggctggggtagaactcagtatggtactctaggtccttctcaggtgaccgtttgcctgtcctctgccttgcctccccttgtcctccactgtctggttggcccatctttttagggagggtgctagtcctctggcggctccccttgccattctgcaggtctggcagagttgcaggttgctaactgtacggcccctggcctgcatccttttggtgctttcctgctttgctgttttctggttcacttgtccctcaccactcagcacacctgcatgcc

SEQ ID NO: 297432 - DNA, 5623 bp, Homo sapiens
aactgagcggcggcggcggggcgctggggcggagactgcgacccggagccgcccggactgacggagcccactgcggtgcgggcgttggcgcgggcacggaggacccgggcaggcatcgcaagcgaccccgagcggagccccggagccatggccctgagcgagctggcgctggtccgctggctgcaggagagccgccgctcgcggaagctcatcctgttcatcgtgttcctggcgctgctgctggacaacatgctgctcactgtcgtggtccccatcatcccaagttatctgtacagcattaagcatgagaagaatgctacagaaatccagacggccaggccagtgcacactgcctccatctcagacagcttccagagcatcttctcctattatgataactcgactatggtcaccgggaatgctaccagagacctgacacttcatcagaccgccacacagcacatggtgaccaacgcgtccgctgttccttccgactgtcccagtgaagacaaagacctcctgaatgaaaacgtgcaagttggtctgttgtttgcctcgaaagccaccgtccagctcatcaccaaccctttcataggactactgaccaacagaattggctatccaattcccatatttgcgggattctgcatcatgtttgtctcaacaattatgtttgccttctccagcagctatgccttcctgctgattgccaggtcgctgcagggcatcggctcgtcctgctcctctgtggctgggatgggcatgcttgccagtgtctacacagatgatgaagagagaggcaacgtcatgggaatcgccttgggaggcctggccatgggggtcttagtgggcccccccttcgggagtgtgctctatgagtttgtggggaagacggctccgttcctggtgctggccgccctggtactcttggatggagctattcagctctttgtgctccagccgtcccgggtgcagccagagagtcagaaggggacacccctaaccacgctgctgaaggacccgtacatcctcattgctgcaggctccatctgctttgcaaacatgggcatcgccatgctggagccagccctgcccatctggatgatggagaccatgtgttcccgaaagtggcagctgggcgttgccttcttgccagctagtatctcttatctcattggaaccaatatttttgggatacttgcacacaaaatggggaggtggctttgtgctcttctgggaatgataattgttggagtcagcattttatgtattccatttgcaaaaaacatttatggactcatagctccgaactttggagttggttttgcaattggaatggtggattcgtcaatgatgcctatcatgggctacctcgtagacctgcggcacgtgtccgtctatgggagtgtgtacgccattgcggatgtggcattttgtatggggtatgctataggtccttctgctggtggtgctattgcaaaggcaattggatttccatggctcatgacaattattgggataattgatattctttttgcccctctctgcttttttcttcgaagtccacctgccaaagaagaaaaaatggctattctcatggatcacaactgccctattaaaacaaaaatgtacactcagaataatatccagtcatatccgataggtgaagatgaagaatctgaaagtgactgagatgagatcctcaaaaatcatcaaagtgtttaattgtataaaacagtgtttccagtgacacaactcatccagaactgtcttagtcataccatccatccctggtgaaagagtaaaaccaaaggttattatttcctttccatggttatggtcgattgccaacagccttataaagaaaaagaagcttttctaggggtttgtataaatagtgttgaaactttattttatgtatttaattttattaaatatcatacaatatattttgatgaaataggtattgtgtaaatctataaatatttgaatccaaaccaaatataattttttaacttacattaacaaacatttgggcaaaaatcatattggtaatgagtgtttaaaattaaagcacacattatctctgagactcttccaacaaagagaaactagaatgaagtctgaaaaacagaatcaagtaagacagcatgttatatagtgacactgaatgttatttaacttgtagttactatcaatatatttatgcgttaaacagctagttctctcaagtgtagaggacaagaacttgtgtcagttatcttttgaatccataaatcttagctggcattagttttctatgtaatcacctacctagagagagttgtaaattatatgttaacatgttatctggttggcagcaaacactaaagccaataaaggaaaaacagtaaatgttccgaaagcagagaaaagcaaccaaacatattgttatgaactaaaagctttccctttaagatgcatacttgtcttactggatgaagaaaattgagggtacatgtaccttatactgtcaaggttgtttaaacatgataaggttaatcgccatctacttcaagttttagaaaaggaaacaagaagctaaaaacagctgctctgactttaatatctgactatatctttgatctgtttgcaggtcatccaagtgttttctaggaatatatttattttaggttgtctgaaactactattttttagactcctgaaagttgttcacatcaatgtgaagacaaattttaaatgaaaatgaagaatgaaattatgtcttgaatcatatattaagaagtaaaaataatagtgatcaggcagaaaagaaaaatggaacatctaaaaatgtatgtgctaactatatcatccagtgtgcagtgttgtgtatttttctaagcatgacaacattgatgtgccttttcagtgtaacagcaaatactgttagtgaacattgtcaatttatgtcattttgttaagagatatgactggagtgtgcagtgtggaatgtctctaatactacttgagaatcctgcagttctataatcataaacaaaaattacttagtttcgttaagctaagattgtgtttgtgttaacttcgacatcaaggagcaaagaactttagaacagactcctcaatcttgtgactttcttattctctaggaaagtaacacttcgtttcatgaagcttttctgtggggcttcgattatttcaagtctggtttctaagtgcagtgtgtttgaagcaaacgaacttccaactcacttatttggcattgggcaacttggccaagtctgctactttggaagatggctctggaggaaactctcatatggctaaaaaggcaggctagtttcttacttctacaggggtagagccttaaaaaagaacgtgctacaaattggttctctttgagggtttctggttctccctgcccccaataccatatactttattgcaattttatttttgcctttacggctctgtgtctttctgcaagaaggcctggcaaaggtatgcctgctgttggtccctcgggataagataaaatataaataaaaccttcagaactgttttggagcaaaagatagcttgtacttggggaaaaaaattctaagttcttttatatgactaatattcttggttagcaagactggaaagaggtgtttttttaaaatgtacataccagaacaaagaacatacagctctctgaacatttattttttgaacagaggtggtttttatgtttggacctggtaatacagatacaaaaactttaatgaggtagcaatgaatattcaactgtttgactgctaagtgtatctgtccatattttagcaagtttacttaataaatcttctgaaccatgttttgtgcctgtttgtattcctttataaaccaaatgttgttggaataaaatacataaggtatcattttgactgtggatatttaattaaaaactatttttctgtgcttgtaggcatcaggtaaaagccaccccaggttagcttgaccatacttttttggctttccacaatttattttaaattgagatatgtaactagccacattcaatgtggaaaaaacccaggaagttatccttccatctataaacattgttgtcctgatggttgtcaacaaataaccatatctgatgaaaacagctgtaatatccacccatttgacttaatcccgggggagtttgtaaaaccgttgaaatctgatacattttgaatggtgtgcccatgggtatcttcctgcggtgaaagtccacatctttaatcagatcctaaaagcggatctatggcccaaaaggaattaggggaacctctccttcttttggtaagaaaagcaattatgtcaatttagaagacagtatttttaaaagtaggtatttaaaatttattcacttttaggggacttaacattttattatttatcttatttttaagagccaaatatttccaaattgctttaaaaaaaattcagctatacatttagaacttgatagtacccctcaaaatttttaggttgtgttttctcctcccagcatcacaaaatagccacttatttcaagtacttctgatattgaatataaggcttgatatgaagaagtatagcctattatgattgctaataatgctaaaatgttgctcagtttgtctaagccattcactcagctaatactaatgtagaaaatatattttaaagtctaattactaatacatagccaaaggaaacccataaacttgataatccataaggaaacaatagtaaaaaaatgttttggggcagtctgcaaaacagcaattttgtttaggaaaagtggactttgttatgcttttctgcatggccaaattataccagaagataattccatagagatgcagcaatcaccttttttaaagatttcattaaatgaagatattcttgttttctgtggtagtctttattattattttttagctattgatacatagcatggcagcaagattacatcagtaatgtaatataatacagcttttttcattgaagctttgtaccttactatactctaggctatttggagtgttcccccacttgcactaaagtacaactatgatgtctctactgcctctcccagtgaaatataaaaatattgcactacattacagatatagtttacaaatttttaaaacatgagtagattcttataaaaccaaagttttgcattatttcaacagctctttcaaatgcatcagtttcagcaacatgcttgggtatcatgaaaacttccatggtttaatcaataaacaccagctacttacaagtagtccaccttccaggttatcaatggtaagttattttttataaagtggttacacactgagcagattgcctcaagtgtaagttatggaacaatactttagctttcagggaatttggtgtgtaaattcttctatagcagtgttcttttaaaataagatcacgtggccgggcgtggtggctcacacctgtaatcccagcactttgggaggccgaggcaggtggatcacgaggtcaggagatcgagaccatcctggctaacatggtgaaaccccgtctctactaaaaatacaaaaaattagccgcgcctgtactcccagctactccggag

SEQ ID NO: 297433 - DNA, 659 bp, Homo sapiens
  misc_feature (4)..(4): n is a, c, g, or t
  misc_feature (40)..(40): n is a, c, g, or t
  misc_feature (44)..(44): n is a, c, g, or t
gcgnccgcgtggtatctcccgagggctgcttggaccctgntggnctgagtgctccaccccgctgtgggcctcagataaccctgtacaaaggggaatggagattgcctgtatccacctagattcataagctgccctgaggcgatcttggcatcaagaaagacagcattgaggcacatctcaccatcagcttcagaggatgtcagcctttgatatgtcccatgggttttttcccagggaaccaatctgtccttttgaagaaaagacaaagataggaacgatggtagaggaccaccggtcaaattcttaccagtgaatattggtggaagtgttcattggctcaaaccagcatgtgtttgatgacttaggattcagtgacgtttgatgatgtggctgtggagttcaccccagaggagtgggctttactggacacaactcagaaatacctctacagagatgtgatgctggagaactacatgaacctggcctctgtggatttctttttctgcttaacttcagaatgggaaatacaacctagaaccaaacggtcatcacttcagcagggttttttgaagaatcaaatattcactgggatacaaatgttctgcatccccctccctgagccaaccccaggccctttctgcacccacccgagaggaaac

SEQ ID NO: 297434 - DNA, 767 bp, Homo sapiens
ctgtttaaggcatatgcctgtaggaggtcaaccttgattgtttagacacaagagctcctgagacattaaaccctggagtagatcatgggagacttgagaaccacgtataagtgagtataaggttcccctttcctcattctccagtgaatattggtggaagtgttcattggctcaaaccagcatgtgtttgatgacttaggattcagtgacgtttgatgatgtggctgtggagttcaccccagaggagtgggctttactggacacaactcagaaatacctctacagagatgtgatgctggagaactacatgaacctggcctctgtgggtaagagtaacatcactttgcttggcatggtggcctgcacctgtagtcccagatacttgggaggctgaggtgggagaatcgctggagcctgggagtttgatactagcatgggcaacattgtgaaacctcatctctaaaaaaaaatcctaagaataaagactaggccggtcccggaggttcacgcctgtaatcccagcactttggaaggctgaggcaggcagatcacaaggtcaggaaatcaagaccagcctggctaacatggtgaaacctctgtctctactaaaaatacaaaattagctgtgtgtggtggtgggcacccgttatcctagttactcgggcggctgaggcaggacaattgcttacccagaggccgaggttgctgagtgagccagcactgcaccactgcattccagcttagatgaccaagtgagactccatcta

SEQ ID NO: 297435 - DNA, 690 bp, Homo sapiens
ttttttttttagtagagacggggttttgccatgttggccaggctggtcttgaatgcctgacctcgagtgatttgcccaccttggcctcccaaaatgttgggattacaggcatgagcctctgtgcccagtcagaatgctgttttagaattcagccctggtttgtgtgcctttggaaatgctacataagcttcatgagtgttactactatgggcagatagtcacatttttcagggtgtaagtttccttgaaaaatgaaactgttaccctttacacaacaggcagctcagcccatatctgcttttctgggtctaggtgatacaggactactacggcatttcatggaagtgttgtgtgtgtgtagttttttcgagtgtgcaggagcatatgggaatttcaagctaggatggaatgacttctgggcataagaatgtgggcagctctggcttctcatgccttcttacttttccactagggttttttcccagggaaccaatctgtccttttgaagaaaagacaaagataggaacgatggtagaggaccaccggtcaaattcttaccaggtaaacagaaaatgtaccgttgtacaaaatgacatacttacatccaataggtagacacatttccttctagacagactcatctccagagttttcttagagcaaatgaagccttactcaaggactgaatcc

SEQ ID NO: 297436 - DNA, 6317 bp, Homo sapiens
cagtgccgtttaacctttattgtggtggagtccaccccgctgtgggcctcagataaccctgtacaaaggggaatggagattgcctgtatccacctagattcataagctgccctgaggcgatcttggcatcaagaaagacagcattgaggcacatctcaccatcagcttcagaggatgtcagcctttgatatgtcccatgatttctttttctgcttaacttcagaatgggaaatacaacctagaaccaaacggtcatcacttcagcagggttttttgaagaatcaaatattcactgggatacaaatgcagacaagaagctacagtggatggaaactctgtgagaattgtggagaggtcttcagtgaacagttttgccttaagacacacatgagagctcagaatggagggaacacttttgagggtaattgttatggaaaagacagcatcagtgtgcacaaggaagcctctattggacaagaactttccaaatttaatccatgtggaaaagtcttcaccttaactccaggccttgctgtgcatcttgaaattctcaatggaagacaaccctacaaatgtaaggaatgtggaaaaggctttaagtattttgcaagccttgataatcacatgggaatccacattggagagaaactctgtgaatttcaggaatgtgagagagccatcacaacttcctcacacttaaagcagtgtgtagcagttcatactggaaagaaatccgaaaagactaagaactgtgggaaatccttcactaatttttctcaactttctgcacatgcaaaaactcataaaggagagaagtcctttgaatgtaaagaatgtggaagatcctttagaaattcctcatcctttaatgttcacattcaaattcacactggaataaaaccacacaaatgtacggaatgtgggaaagccttcactagatcaactcaccttactcaacatgtaagaactcacactggaataaaaccctatgaatgtaaggaatgtggccaagccttcactcagtacacgggccttgctatacacatacgaaatcacactggagagaaaccctatcagtgtaaggaatgtgggaaagccttcaatagatcttcaacgcttactcaacatagaagaattcacacaggagagaagccttatgaatgtgttgaatgtgggaagaccttcattacttcttcccatcgtagtaaacatttgaaaactcacagtggagaaaggtaaatgcaagatatgtgggaaagaatttctgtattcctcaccccacctgtgaactcctaccagagagaaaccttttgtatgtaaagaatttgggaaagcatttgctctttcctcatgcctaagtatgcatgaaagaattcacactggggagaaatactatgaatgtaaggatatgagtgttgttaccatttagcccattggttgccatctttaattattggcagtgcaaagatcatcagattagtcctaaatgccttttggaggttgtaatggctcacagattggccttagatgcatcccgagggtctgaaattaaacctacaggttctgaatacaacatcatggttacctgagtctgggcatctgtgaagaagggtcatggatggtgaggtcagtactgcaggctgcctcaccttggtgattagattcctaagatcatagcattaacaagttctgtacgagataaatcatgcagattgatcccagcccctgttggttagtggctgccagtgtggcacattcatgtcaaaatttaccagaagccaagatgatgtaggccccagaggtggattgttaaaaagatgctcctccaaggttctcttctgttcccatggatcctgcagagcatgtcaggagtgaaaccatccataactgccagtgccctttcacagctgattatttctatgtccccttcttgtaaaataagaagtgtgacaaccttgactgttctgttctgtcttctctgtccattttaggtggcacaatgtaagtggcagtgtctcttatagtataatccagtctctcttctcacttctgttaagatggctgatatagtccatgaatcccactcatgatctctttatcaaatgattgttcagccacactttgaggattctcttcagtacaagttttctaatttttgcagtatggataggctgagaattttccaaatctccaagttctggttcctttttccttaacaacttcttctgcaattcaggtctccttttgcatttttgccgagaccagctgggtcgtggagaccctaacccagtggctctagaggaattaagacaaagacacagaaatatagtgcagagtgggaatcggggctcacagccttcagagctgagcttgaacagagtttgacccacatatttattgacagtaagcctgtgataaacattattcctatagattgtagatcagctataagtattccttatgagaaagaaagggacaggctctggcttgttatctgcaacaggaatatgtccttaaggcacaaatcactcatgctattgtttgtggtttaggaatgccttgagcagttttccagttttctgccctgggtgggccaggtgttgcttgccctcattctggtaaaccagcagcctccagcatgggcgtcatagccatcacgagcatgtcacagtgctgcagagattttgtttatggccagtttctcattgcctgtttatggccagatttggggggcctgttcccagcacattttcctgtaagcactcaggaataatgaagcttcctgtgtcctttaacactttaattacagatcttagtgatacataccattttatctgtctcaagctctaccttccgtaaaatgctagaatacagttctgccaagttcttcaccactttatatcaagggttgtcttttcttcatttcccaatagcatgttcctcattccccaatgacacctcaccagaataacccttaccaaccttatttccagcttgcacatcagaatttttccagcctctactcatttgtcagtttcaaagctgcttcacatttttagtttttttgtttgtttttaattgcagtacctcacttctcagtaccaatatctgccttagtcagctcagacaaccataagagaataccgcagaccaaatggcttagaaattaatttaattttaaatcaatgaggttaaaaacacaggatttttttttttttttttttttttttttgagatggagttttgctcttgttgcccaggctggagtgcaatggtatgatcttggctcaccgcaacctccacctcctgagttccagtgattctcctgcctcaccctcagtagctgggattattggcatgcaccacaaaccttagctaagtttgtatttttagtagagacagggtttctccatgttggttaggctgatctccatgttggtcagatctgacctttggtgatccacctgccttggcctcccaaagtgctgggattacaggcctgagccaccgtatctggcccaaaacacaaatttatattctcacatatctggaggctggaagtctgagatcagagtgccagcatggtcaacctctagtgagagctctcttcctggcatgtaagtgcccacttcctcatgttttcacacgatggagaccaacaaataggtcggtcggtctcccccctccccgcccccttctcttttcacatacagtcacattgaggtttggaacttcatatgaaatttggggggtcactgtgtgtgtgtgtgtgtgtgtgtgtatgtgtatatatatatacatatatatacacatatgtatgtatacctaactcctaaagtggaacagtaagagtcattatttatagattatctgattctctatgtggaaagagaaaagaatcatattaagtactttggactgaacaatgacccccaaaattcgtatgatgatgaagctctctctaaatattttcttgctttactggactgattttaacccgctgcacaacaccaactaaaagtagtaataccagcatacttgtctttgcagttctggtgagatatgcactctattttgttggtttggctgtaggcttttatttcttttttattttttgaagaggttatgtcctgtcagggaaccagccccgatattcacataggttcttttctattttccctaagtgtcagccaacttgagaaataaagggacagagtacaaaagagagaaattttaaagctgggtgtccggggcagacatcacatgtcggtaggttccgtgatgccccacaagccgcaaaaaccagcaagtttttattagggattttcaaaaggggagggagtgtgcaaataggtgtgggtcacagacatcaagtactttacaaggtaatagaatatcacaaggcaagtggaggcagggcgagatcacaggaccaaggtgaaattaaaattgctaatgaagttttgggcaccattgtcattgataacatcttatcaggagacggttttgagatcaactggtctgactaaaatttattaggtgggaatttcctcttcctaataagcctgggagtgctatgggagactggggtctatttcacccctgcagtctcgaccataagagatggctacacccaggggggccagttcagagacccactcccaggtgtgcattctctttctcaaggatgttccttgctgagaaaaagaattcagtgatatttctcccatttgcttgtgaaagaagagaaatgtggctttgttccacctggctcaccggcggtcagaatttaaggttatctctcttgtttcctaaacattgctgttatcctgttcttttttcaaggtgcccagatttcatattgctcaaacacacatgctgtataatttgtgcagttaatgcaattattacagggtcctgaggtaatatacatcctcctcagctgacaggattgagagattaaagtaaagacaggcataggaaatcacaagggtattgactggggaagtgataagtgtccatgaaatctttacaatttatgtttagagattgcagtaaagacaggcataagaaattataaaagtattaatttggggaactaataaatgtccatgaaaccttcacaatccatgtttttctgccatggcttcagccagtccccccgtttggggtccctgacttcctgcaacaatgtcctgcaggaaaagttttttctttatatccagtttttacatgatgaattatttcccaatatttcatagtttatgaggctgaattcctcttgaatttattaaatgcttccttcacatcctctgtgatgatcatgtttatttactgataaaactcaatacctagaactgcacctagctcatgatggtacctaataaatacttcaatgaaatgatgtggtgatgcatgcctatagttttagctacttgggagggtggcctgagcccaggggttctagaccagcttaggcaacatagcaagaccccatctcaaaaaaaaaaacaaaaacaaaacaaaaaaaaaacttgaagaagtgaatgcatggaaaggcgcttttctaaaacaaatgtggtcaggctgggtgtgggggcttatgcctgtaatcccagcaatttgggaggtgggggtgggcagatcatttgaggtcaagagttcgagaccagcccagccaacatggtgaaaccccatctctactaacaatacaaaaattagctgggtgtggtgatgtgcacctgtaatcccagctacttgggaggctgaagcaggagaatcacttgaacctgggaggtggaggttgcattgagccaagattgcaccactgcactccatgctgggtgacagggtgcgactctgtcaaaaataaataaattaaattaaataaatgtggtatttgtatttattgcttttccaatgttacatcaaccttgtattcctggataagctcgactgtgacataatggatcacttaaaaatacttcatgacctttactaatatgttatggagctatgtttgaataacattgtgatttttaaaaaattgtcccttaatgatatttgtatataatgactgtcatatactgtagtggggcatgttcctactatttctaaattcttaatctataagagtcatctaggttgggaatagtggctcaggcctgtaatcccagcacttttggaggctgaggcaaaaagatcccttgagccaaggagttcaaaccagcctgggcaacatagcgaaaccacatctctatttaaaaatactacaagatattttcatttttttggtttgtttctttgtttttgagttg

SEQ ID NO: 297437 - DNA, 6610 bp, Homo sapiens
  misc_feature (4)..(4): n is a, c, g, or t
  misc_feature (40)..(40): n is a, c, g, or t
  misc_feature (44)..(44): n is a, c, g, or t
gcgnccgcgtggtatctcccgagggctgcttggaccctgntggnctgagtgctccaccccgctgtgggcctcagataaccctgtacaaaggggaatggagattgcctgtatccacctagattcataagctgccctgaggcgatcttggcatcaagaaagacagcattgaggcacatctcaccatcagcttcagaggatgtcagcctttgatatgtcccatgggttttttcccagggaaccaatctgtccttttgaagaaaagacaaagataggaacgatggtagaggaccaccggtcaaattcttaccagtgaatattggtggaagtgttcattggctcaaaccagcatgtgtttgatgacttaggattcagtgacgtttgatgatgtggctgtggagttcaccccagaggagtgggctttactggacacaactcagaaatacctctacagagatgtgatgctggagaactacatgaacctggcctctgtggatttctttttctgcttaacttcagaatgggaaatacaacctagaaccaaacggtcatcacttcagcagggttttttgaagaatcaaatattcactgggatacaaatgcagacaagaagctacagtggatggaaactctgtgagaattgtggagaggtcttcagtgaacagttttgccttaagacacacatgagagctcagaatggagggaacacttttgagggtaattgttatggaaaagacagcatcagtgtgcacaaggaagcctctattggacaagaactttccaaatttaatccatgtggaaaagtcttcaccttaactccaggccttgctgtgcatcttgaaattctcaatggaagacaaccctacaaatgtaaggaatgtggaaaaggctttaagtattttgcaagccttgataatcacatgggaatccacattggagagaaactctgtgaatttcaggaatgtgagagagccatcacaacttcctcacacttaaagcagtgtgtagcagttcatactggaaagaaatccgaaaagactaagaactgtgggaaatccttcactaatttttctcaactttctgcacatgcaaaaactcataaaggagagaagtcctttgaatgtaaagaatgtggaagatcctttagaaattcctcatcctttaatgttcacattcaaattcacactggaataaaaccacacaaatgtacggaatgtgggaaagccttcactagatcaactcaccttactcaacatgtaagaactcacactggaataaaaccctatgaatgtaaggaatgtggccaagccttcactcagtacacgggccttgctatacacatacgaaatcacactggagagaaaccctatcagtgtaaggaatgtgggaaagccttcaatagatcttcaacgcttactcaacatagaagaattcacacaggagagaagccttatgaatgtgttgaatgtgggaagaccttcattacttcttcccatcgtagtaaacatttgaaaactcacagtggagaaaggtaaatgcaagatatgtgggaaagaatttctgtattcctcaccccacctgtgaactcctaccagagagaaaccttttgtatgtaaagaatttgggaaagcatttgctctttcctcatgcctaagtatgcatgaaagaattcacactggggagaaatactatgaatgtaaggatatgagtgttgttaccatttagcccattggttgccatctttaattattggcagtgcaaagatcatcagattagtcctaaatgccttttggaggttgtaatggctcacagattggccttagatgcatcccgagggtctgaaattaaacctacaggttctgaatacaacatcatggttacctgagtctgggcatctgtgaagaagggtcatggatggtgaggtcagtactgcaggctgcctcaccttggtgattagattcctaagatcatagcattaacaagttctgtacgagataaatcatgcagattgatcccagcccctgttggttagtggctgccagtgtggcacattcatgtcaaaatttaccagaagccaagatgatgtaggccccagaggtggattgttaaaaagatgctcctccaaggttctcttctgttcccatggatcctgcagagcatgtcaggagtgaaaccatccataactgccagtgccctttcacagctgattatttctatgtccccttcttgtaaaataagaagtgtgacaaccttgactgttctgttctgtcttctctgtccattttaggtggcacaatgtaagtggcagtgtctcttatagtataatccagtctctcttctcacttctgttaagatggctgatatagtccatgaatcccactcatgatctctttatcaaatgattgttcagccacactttgaggattctcttcagtacaagttttctaatttttgcagtatggataggctgagaattttccaaatctccaagttctggttcctttttccttaacaacttcttctgcaattcaggtctccttttgcatttttgccgagaccagctgggtcgtggagaccctaacccagtggctctagaggaattaagacaaagacacagaaatatagtgcagagtgggaatcggggctcacagccttcagagctgagcttgaacagagtttgacccacatatttattgacagtaagcctgtgataaacattattcctatagattgtagatcagctataagtattccttatgagaaagaaagggacaggctctggcttgttatctgcaacaggaatatgtccttaaggcacaaatcactcatgctattgtttgtggtttaggaatgccttgagcagttttccagttttctgccctgggtgggccaggtgttgcttgccctcattctggtaaaccagcagcctccagcatgggcgtcatagccatcacgagcatgtcacagtgctgcagagattttgtttatggccagtttctcattgcctgtttatggccagatttggggggcctgttcccagcacattttcctgtaagcactcaggaataatgaagcttcctgtgtcctttaacactttaattacagatcttagtgatacataccattttatctgtctcaagctctaccttccgtaaaatgctagaatacagttctgccaagttcttcaccactttatatcaagggttgtcttttcttcatttcccaatagcatgttcctcattccccaatgacacctcaccagaataacccttaccaaccttatttccagcttgcacatcagaatttttccagcctctactcatttgtcagtttcaaagctgcttcacatttttagtttttttgtttgtttttaattgcagtacctcacttctcagtaccaatatctgccttagtcagctcagacaaccataagagaataccgcagaccaaatggcttagaaattaatttaattttaaatcaatgaggttaaaaacacaggatttttttttttttttttttttttttttgagatggagttttgctcttgttgcccaggctggagtgcaatggtatgatcttggctcaccgcaacctccacctcctgagttccagtgattctcctgcctcaccctcagtagctgggattattggcatgcaccacaaaccttagctaagtttgtatttttagtagagacagggtttctccatgttggttaggctgatctccatgttggtcagatctgacctttggtgatccacctgccttggcctcccaaagtgctgggattacaggcctgagccaccgtatctggcccaaaacacaaatttatattctcacatatctggaggctggaagtctgagatcagagtgccagcatggtcaacctctagtgagagctctcttcctggcatgtaagtgcccacttcctcatgttttcacacgatggagaccaacaaataggtcggtcggtctcccccctccccgcccccttctcttttcacatacagtcacattgaggtttggaacttcatatgaaatttggggggtcactgtgtgtgtgtgtgtgtgtgtgtgtatgtgtatatatatatacatatatatacacatatgtatgtatacctaactcctaaagtggaacagtaagagtcattatttatagattatctgattctctatgtggaaagagaaaagaatcatattaagtactttggactgaacaatgacccccaaaattcgtatgatgatgaagctctctctaaatattttcttgctttactggactgattttaacccgctgcacaacaccaactaaaagtagtaataccagcatacttgtctttgcagttctggtgagatatgcactctattttgttggtttggctgtaggcttttatttcttttttattttttgaagaggttatgtcctgtcagggaaccagccccgatattcacataggttcttttctattttccctaagtgtcagccaacttgagaaataaagggacagagtacaaaagagagaaattttaaagctgggtgtccggggcagacatcacatgtcggtaggttccgtgatgccccacaagccgcaaaaaccagcaagtttttattagggattttcaaaaggggagggagtgtgcaaataggtgtgggtcacagacatcaagtactttacaaggtaatagaatatcacaaggcaagtggaggcagggcgagatcacaggaccaaggtgaaattaaaattgctaatgaagttttgggcaccattgtcattgataacatcttatcaggagacggttttgagatcaactggtctgactaaaatttattaggtgggaatttcctcttcctaataagcctgggagtgctatgggagactggggtctatttcacccctgcagtctcgaccataagagatggctacacccaggggggccagttcagagacccactcccaggtgtgcattctctttctcaaggatgttccttgctgagaaaaagaattcagtgatatttctcccatttgcttgtgaaagaagagaaatgtggctttgttccacctggctcaccggcggtcagaatttaaggttatctctcttgtttcctaaacattgctgttatcctgttcttttttcaaggtgcccagatttcatattgctcaaacacacatgctgtataatttgtgcagttaatgcaattattacagggtcctgaggtaatatacatcctcctcagctgacaggattgagagattaaagtaaagacaggcataggaaatcacaagggtattgactggggaagtgataagtgtccatgaaatctttacaatttatgtttagagattgcagtaaagacaggcataagaaattataaaagtattaatttggggaactaataaatgtccatgaaaccttcacaatccatgtttttctgccatggcttcagccagtccccccgtttggggtccctgacttcctgcaacaatgtcctgcaggaaaagttttttctttatatccagtttttacatgatgaattatttcccaatatttcatagtttatgaggctgaattcctcttgaatttattaaatgcttccttcacatcctctgtgatgatcatgtttatttactgataaaactcaatacctagaactgcacctagctcatgatggtacctaataaatacttcaatgaaatgatgtggtgatgcatgcctatagttttagctacttgggagggtggcctgagcccaggggttctagaccagcttaggcaacatagcaagaccccatctcaaaaaaaaaaacaaaaacaaaacaaaaaaaaaacttgaagaagtgaatgcatggaaaggcgcttttctaaaacaaatgtggtcaggctgggtgtgggggcttatgcctgtaatcccagcaatttgggaggtgggggtgggcagatcatttgaggtcaagagttcgagaccagcccagccaacatggtgaaaccccatctctactaacaatacaaaaattagctgggtgtggtgatgtgcacctgtaatcccagctacttgggaggctgaagcaggagaatcacttgaacctgggaggtggaggttgcattgagccaagattgcaccactgcactccatgctgggtgacagggtgcgactctgtcaaaaataaataaattaaattaaataaatgtggtatttgtatttattgcttttccaatgttacatcaaccttgtattcctggataagctcgactgtgacataatggatcacttaaaaatacttcatgacctttactaatatgttatggagctatgtttgaataacattgtgatttttaaaaaattgtcccttaatgatatttgtatataatgactgtcatatactgtagtggggcatgttcctactatttctaaattcttaatctataagagtcatctaggttgggaatagtggctcaggcctgtaatcccagcacttttggaggctgaggcaaaaagatcccttgagccaaggagttcaaaccagcctgggcaacatagcgaaaccacatctctatttaaaaatactacaagatattttcatttttttggtttgtttctttgtttttgagttg

SEQ ID NO: 297438 - DNA, 6861 bp, Homo sapiens
ttttttttttagtagagacggggttttgccatgttggccaggctggtcttgaatgcctgacctcgagtgatttgcccaccttggcctcccaaaatgttgggattacaggcatgagcctctgtgcccagtcagaatgctgttttagaattcagccctggtttgtgtgcctttggaaatgctacataagcttcatgagtgttactactatgggcagatagtcacatttttcagggtgtaagtttccttgaaaaatgaaactgttaccctttacacaacaggcagctcagcccatatctgcttttctgggtctaggtgatacaggactactacggcatttcatggaagtgttgtgtgtgtgtagttttttcgagtgtgcaggagcatatgggaatttcaagctaggatggaatgacttctgggcataagaatgtgggcagctctggcttctcatgccttcttacttttccactagggttttttcccagggaaccaatctgtccttttgaagaaaagacaaagataggaacgatggtagaggaccaccggtcaaattcttaccagtgaatattggtggaagtgttcattggctcaaaccagcatgtgtttgatgacttaggattcagtgacgtttgatgatgtggctgtggagttcaccccagaggagtgggctttactggacacaactcagaaatacctctacagagatgtgatgctggagaactacatgaacctggcctctgtggatttctttttctgcttaacttcagaatgggaaatacaacctagaaccaaacggtcatcacttcagcagggttttttgaagaatcaaatattcactgggatacaaatgcagacaagaagctacagtggatggaaactctgtgagaattgtggagaggtcttcagtgaacagttttgccttaagacacacatgagagctcagaatggagggaacacttttgagggtaattgttatggaaaagacagcatcagtgtgcacaaggaagcctctattggacaagaactttccaaatttaatccatgtggaaaagtcttcaccttaactccaggccttgctgtgcatcttgaaattctcaatggaagacaaccctacaaatgtaaggaatgtggaaaaggctttaagtattttgcaagccttgataatcacatgggaatccacattggagagaaactctgtgaatttcaggaatgtgagagagccatcacaacttcctcacacttaaagcagtgtgtagcagttcatactggaaagaaatccgaaaagactaagaactgtgggaaatccttcactaatttttctcaactttctgcacatgcaaaaactcataaaggagagaagtcctttgaatgtaaagaatgtggaagatcctttagaaattcctcatcctttaatgttcacattcaaattcacactggaataaaaccacacaaatgtacggaatgtgggaaagccttcactagatcaactcaccttactcaacatgtaagaactcacactggaataaaaccctatgaatgtaaggaatgtggccaagccttcactcagtacacgggccttgctatacacatacgaaatcacactggagagaaaccctatcagtgtaaggaatgtgggaaagccttcaatagatcttcaacgcttactcaacatagaagaattcacacaggagagaagccttatgaatgtgttgaatgtgggaagaccttcattacttcttcccatcgtagtaaacatttgaaaactcacagtggagaaaggtaaatgcaagatatgtgggaaagaatttctgtattcctcaccccacctgtgaactcctaccagagagaaaccttttgtatgtaaagaatttgggaaagcatttgctctttcctcatgcctaagtatgcatgaaagaattcacactggggagaaatactatgaatgtaaggatatgagtgttgttaccatttagcccattggttgccatctttaattattggcagtgcaaagatcatcagattagtcctaaatgccttttggaggttgtaatggctcacagattggccttagatgcatcccgagggtctgaaattaaacctacaggttctgaatacaacatcatggttacctgagtctgggcatctgtgaagaagggtcatggatggtgaggtcagtactgcaggctgcctcaccttggtgattagattcctaagatcatagcattaacaagttctgtacgagataaatcatgcagattgatcccagcccctgttggttagtggctgccagtgtggcacattcatgtcaaaatttaccagaagccaagatgatgtaggccccagaggtggattgttaaaaagatgctcctccaaggttctcttctgttcccatggatcctgcagagcatgtcaggagtgaaaccatccataactgccagtgccctttcacagctgattatttctatgtccccttcttgtaaaataagaagtgtgacaaccttgactgttctgttctgtcttctctgtccattttaggtggcacaatgtaagtggcagtgtctcttatagtataatccagtctctcttctcacttctgttaagatggctgatatagtccatgaatcccactcatgatctctttatcaaatgattgttcagccacactttgaggattctcttcagtacaagttttctaatttttgcagtatggataggctgagaattttccaaatctccaagttctggttcctttttccttaacaacttcttctgcaattcaggtctccttttgcatttttgccgagaccagctgggtcgtggagaccctaacccagtggctctagaggaattaagacaaagacacagaaatatagtgcagagtgggaatcggggctcacagccttcagagctgagcttgaacagagtttgacccacatatttattgacagtaagcctgtgataaacattattcctatagattgtagatcagctataagtattccttatgagaaagaaagggacaggctctggcttgttatctgcaacaggaatatgtccttaaggcacaaatcactcatgctattgtttgtggtttaggaatgccttgagcagttttccagttttctgccctgggtgggccaggtgttgcttgccctcattctggtaaaccagcagcctccagcatgggcgtcatagccatcacgagcatgtcacagtgctgcagagattttgtttatggccagtttctcattgcctgtttatggccagatttggggggcctgttcccagcacattttcctgtaagcactcaggaataatgaagcttcctgtgtcctttaacactttaattacagatcttagtgatacataccattttatctgtctcaagctctaccttccgtaaaatgctagaatacagttctgccaagttcttcaccactttatatcaagggttgtcttttcttcatttcccaatagcatgttcctcattccccaatgacacctcaccagaataacccttaccaaccttatttccagcttgcacatcagaatttttccagcctctactcatttgtcagtttcaaagctgcttcacatttttagtttttttgtttgtttttaattgcagtacctcacttctcagtaccaatatctgccttagtcagctcagacaaccataagagaataccgcagaccaaatggcttagaaattaatttaattttaaatcaatgaggttaaaaacacaggatttttttttttttttttttttttttttgagatggagttttgctcttgttgcccaggctggagtgcaatggtatgatcttggctcaccgcaacctccacctcctgagttccagtgattctcctgcctcaccctcagtagctgggattattggcatgcaccacaaaccttagctaagtttgtatttttagtagagacagggtttctccatgttggttaggctgatctccatgttggtcagatctgacctttggtgatccacctgccttggcctcccaaagtgctgggattacaggcctgagccaccgtatctggcccaaaacacaaatttatattctcacatatctggaggctggaagtctgagatcagagtgccagcatggtcaacctctagtgagagctctcttcctggcatgtaagtgcccacttcctcatgttttcacacgatggagaccaacaaataggtcggtcggtctcccccctccccgcccccttctcttttcacatacagtcacattgaggtttggaacttcatatgaaatttggggggtcactgtgtgtgtgtgtgtgtgtgtgtgtatgtgtatatatatatacatatatatacacatatgtatgtatacctaactcctaaagtggaacagtaagagtcattatttatagattatctgattctctatgtggaaagagaaaagaatcatattaagtactttggactgaacaatgacccccaaaattcgtatgatgatgaagctctctctaaatattttcttgctttactggactgattttaacccgctgcacaacaccaactaaaagtagtaataccagcatacttgtctttgcagttctggtgagatatgcactctattttgttggtttggctgtaggcttttatttcttttttattttttgaagaggttatgtcctgtcagggaaccagccccgatattcacataggttcttttctattttccctaagtgtcagccaacttgagaaataaagggacagagtacaaaagagagaaattttaaagctgggtgtccggggcagacatcacatgtcggtaggttccgtgatgccccacaagccgcaaaaaccagcaagtttttattagggattttcaaaaggggagggagtgtgcaaataggtgtgggtcacagacatcaagtactttacaaggtaatagaatatcacaaggcaagtggaggcagggcgagatcacaggaccaaggtgaaattaaaattgctaatgaagttttgggcaccattgtcattgataacatcttatcaggagacggttttgagatcaactggtctgactaaaatttattaggtgggaatttcctcttcctaataagcctgggagtgctatgggagactggggtctatttcacccctgcagtctcgaccataagagatggctacacccaggggggccagttcagagacccactcccaggtgtgcattctctttctcaaggatgttccttgctgagaaaaagaattcagtgatatttctcccatttgcttgtgaaagaagagaaatgtggctttgttccacctggctcaccggcggtcagaatttaaggttatctctcttgtttcctaaacattgctgttatcctgttcttttttcaaggtgcccagatttcatattgctcaaacacacatgctgtataatttgtgcagttaatgcaattattacagggtcctgaggtaatatacatcctcctcagctgacaggattgagagattaaagtaaagacaggcataggaaatcacaagggtattgactggggaagtgataagtgtccatgaaatctttacaatttatgtttagagattgcagtaaagacaggcataagaaattataaaagtattaatttggggaactaataaatgtccatgaaaccttcacaatccatgtttttctgccatggcttcagccagtccccccgtttggggtccctgacttcctgcaacaatgtcctgcaggaaaagttttttctttatatccagtttttacatgatgaattatttcccaatatttcatagtttatgaggctgaattcctcttgaatttattaaatgcttccttcacatcctctgtgatgatcatgtttatttactgataaaactcaatacctagaactgcacctagctcatgatggtacctaataaatacttcaatgaaatgatgtggtgatgcatgcctatagttttagctacttgggagggtggcctgagcccaggggttctagaccagcttaggcaacatagcaagaccccatctcaaaaaaaaaaacaaaaacaaaacaaaaaaaaaacttgaagaagtgaatgcatggaaaggcgcttttctaaaacaaatgtggtcaggctgggtgtgggggcttatgcctgtaatcccagcaatttgggaggtgggggtgggcagatcatttgaggtcaagagttcgagaccagcccagccaacatggtgaaaccccatctctactaacaatacaaaaattagctgggtgtggtgatgtgcacctgtaatcccagctacttgggaggctgaagcaggagaatcacttgaacctgggaggtggaggttgcattgagccaagattgcaccactgcactccatgctgggtgacagggtgcgactctgtcaaaaataaataaattaaattaaataaatgtggtatttgtatttattgcttttccaatgttacatcaaccttgtattcctggataagctcgactgtgacataatggatcacttaaaaatacttcatgacctttactaatatgttatggagctatgtttgaataacattgtgatttttaaaaaattgtcccttaatgatatttgtatataatgactgtcatatactgtagtggggcatgttcctactatttctaaattcttaatctataagagtcatctaggttgggaatagtggctcaggcctgtaatcccagcacttttggaggctgaggcaaaaagatcccttgagccaaggagttcaaaccagcctgggcaacatagcgaaaccacatctctatttaaaaatactacaagatattttcatttttttggtttgtttctttgtttttgagttg

SEQ ID NO: 297439 - DNA, 6691 bp, Homo sapiens
gaaacccaaaagtcctcagatcacatatatgattacatccataagccaaaccgtgcaagaaatgtacaagataatgttggaacacatgccctgtgtgaaaacaatcagtgactgttagggtcttgtcaaaaggaaaggagccatcttgaagacagtccactggccagtggtggaacaacttaaccataacataatagtttttggcctcagataaccctgtacaaaggggaatggagattgcctgtatccacctagattcataagctgccctgaggcgatcttggcatcaagaaagacagcattgaggcacatctcaccatcagcttcagaggatgtcagcctttgatatgtcccatgggttttttcccagggaaccaatctgtccttttgaagaaaagacaaagataggaacgatggtagaggaccaccggtcaaattcttaccaggattcagtgacgtttgatgatgtggctgtggagttcaccccagaggagtgggctttactggacacaactcagaaatacctctacagagatgtgatgctggagaactacatgaacctggcctctgtggatttctttttctgcttaacttcagaatgggaaatacaacctagaaccaaacggtcatcacttcagcagggttttttgaagaatcaaatattcactgggatacaaatgcagacaagaagctacagtggatggaaactctgtgagaattgtggagaggtcttcagtgaacagttttgccttaagacacacatgagagctcagaatggagggaacacttttgagggtaattgttatggaaaagacagcatcagtgtgcacaaggaagcctctattggacaagaactttccaaatttaatccatgtggaaaagtcttcaccttaactccaggccttgctgtgcatcttgaaattctcaatggaagacaaccctacaaatgtaaggaatgtggaaaaggctttaagtattttgcaagccttgataatcacatgggaatccacattggagagaaactctgtgaatttcaggaatgtgagagagccatcacaacttcctcacacttaaagcagtgtgtagcagttcatactggaaagaaatccgaaaagactaagaactgtgggaaatccttcactaatttttctcaactttctgcacatgcaaaaactcataaaggagagaagtcctttgaatgtaaagaatgtggaagatcctttagaaattcctcatcctttaatgttcacattcaaattcacactggaataaaaccacacaaatgtacggaatgtgggaaagccttcactagatcaactcaccttactcaacatgtaagaactcacactggaataaaaccctatgaatgtaaggaatgtggccaagccttcactcagtacacgggccttgctatacacatacgaaatcacactggagagaaaccctatcagtgtaaggaatgtgggaaagccttcaatagatcttcaacgcttactcaacatagaagaattcacacaggagagaagccttatgaatgtgttgaatgtgggaagaccttcattacttcttcccatcgtagtaaacatttgaaaactcacagtggagaaaggtaaatgcaagatatgtgggaaagaatttctgtattcctcaccccacctgtgaactcctaccagagagaaaccttttgtatgtaaagaatttgggaaagcatttgctctttcctcatgcctaagtatgcatgaaagaattcacactggggagaaatactatgaatgtaaggatatgagtgttgttaccatttagcccattggttgccatctttaattattggcagtgcaaagatcatcagattagtcctaaatgccttttggaggttgtaatggctcacagattggccttagatgcatcccgagggtctgaaattaaacctacaggttctgaatacaacatcatggttacctgagtctgggcatctgtgaagaagggtcatggatggtgaggtcagtactgcaggctgcctcaccttggtgattagattcctaagatcatagcattaacaagttctgtacgagataaatcatgcagattgatcccagcccctgttggttagtggctgccagtgtggcacattcatgtcaaaatttaccagaagccaagatgatgtaggccccagaggtggattgttaaaaagatgctcctccaaggttctcttctgttcccatggatcctgcagagcatgtcaggagtgaaaccatccataactgccagtgccctttcacagctgattatttctatgtccccttcttgtaaaataagaagtgtgacaaccttgactgttctgttctgtcttctctgtccattttaggtggcacaatgtaagtggcagtgtctcttatagtataatccagtctctcttctcacttctgttaagatggctgatatagtccatgaatcccactcatgatctctttatcaaatgattgttcagccacactttgaggattctcttcagtacaagttttctaatttttgcagtatggataggctgagaattttccaaatctccaagttctggttcctttttccttaacaacttcttctgcaattcaggtctccttttgcatttttgccgagaccagctgggtcgtggagaccctaacccagtggctctagaggaattaagacaaagacacagaaatatagtgcagagtgggaatcggggctcacagccttcagagctgagcttgaacagagtttgacccacatatttattgacagtaagcctgtgataaacattattcctatagattgtagatcagctataagtattccttatgagaaagaaagggacaggctctggcttgttatctgcaacaggaatatgtccttaaggcacaaatcactcatgctattgtttgtggtttaggaatgccttgagcagttttccagttttctgccctgggtgggccaggtgttgcttgccctcattctggtaaaccagcagcctccagcatgggcgtcatagccatcacgagcatgtcacagtgctgcagagattttgtttatggccagtttctcattgcctgtttatggccagatttggggggcctgttcccagcacattttcctgtaagcactcaggaataatgaagcttcctgtgtcctttaacactttaattacagatcttagtgatacataccattttatctgtctcaagctctaccttccgtaaaatgctagaatacagttctgccaagttcttcaccactttatatcaagggttgtcttttcttcatttcccaatagcatgttcctcattccccaatgacacctcaccagaataacccttaccaaccttatttccagcttgcacatcagaatttttccagcctctactcatttgtcagtttcaaagctgcttcacatttttagtttttttgtttgtttttaattgcagtacctcacttctcagtaccaatatctgccttagtcagctcagacaaccataagagaataccgcagaccaaatggcttagaaattaatttaattttaaatcaatgaggttaaaaacacaggatttttttttttttttttttttttttttgagatggagttttgctcttgttgcccaggctggagtgcaatggtatgatcttggctcaccgcaacctccacctcctgagttccagtgattctcctgcctcaccctcagtagctgggattattggcatgcaccacaaaccttagctaagtttgtatttttagtagagacagggtttctccatgttggttaggctgatctccatgttggtcagatctgacctttggtgatccacctgccttggcctcccaaagtgctgggattacaggcctgagccaccgtatctggcccaaaacacaaatttatattctcacatatctggaggctggaagtctgagatcagagtgccagcatggtcaacctctagtgagagctctcttcctggcatgtaagtgcccacttcctcatgttttcacacgatggagaccaacaaataggtcggtcggtctcccccctccccgcccccttctcttttcacatacagtcacattgaggtttggaacttcatatgaaatttggggggtcactgtgtgtgtgtgtgtgtgtgtgtgtatgtgtatatatatatacatatatatacacatatgtatgtatacctaactcctaaagtggaacagtaagagtcattatttatagattatctgattctctatgtggaaagagaaaagaatcatattaagtactttggactgaacaatgacccccaaaattcgtatgatgatgaagctctctctaaatattttcttgctttactggactgattttaacccgctgcacaacaccaactaaaagtagtaataccagcatacttgtctttgcagttctggtgagatatgcactctattttgttggtttggctgtaggcttttatttcttttttattttttgaagaggttatgtcctgtcagggaaccagccccgatattcacataggttcttttctattttccctaagtgtcagccaacttgagaaataaagggacagagtacaaaagagagaaattttaaagctgggtgtccggggcagacatcacatgtcggtaggttccgtgatgccccacaagccgcaaaaaccagcaagtttttattagggattttcaaaaggggagggagtgtgcaaataggtgtgggtcacagacatcaagtactttacaaggtaatagaatatcacaaggcaagtggaggcagggcgagatcacaggaccaaggtgaaattaaaattgctaatgaagttttgggcaccattgtcattgataacatcttatcaggagacggttttgagatcaactggtctgactaaaatttattaggtgggaatttcctcttcctaataagcctgggagtgctatgggagactggggtctatttcacccctgcagtctcgaccataagagatggctacacccaggggggccagttcagagacccactcccaggtgtgcattctctttctcaaggatgttccttgctgagaaaaagaattcagtgatatttctcccatttgcttgtgaaagaagagaaatgtggctttgttccacctggctcaccggcggtcagaatttaaggttatctctcttgtttcctaaacattgctgttatcctgttcttttttcaaggtgcccagatttcatattgctcaaacacacatgctgtataatttgtgcagttaatgcaattattacagggtcctgaggtaatatacatcctcctcagctgacaggattgagagattaaagtaaagacaggcataggaaatcacaagggtattgactggggaagtgataagtgtccatgaaatctttacaatttatgtttagagattgcagtaaagacaggcataagaaattataaaagtattaatttggggaactaataaatgtccatgaaaccttcacaatccatgtttttctgccatggcttcagccagtccccccgtttggggtccctgacttcctgcaacaatgtcctgcaggaaaagttttttctttatatccagtttttacatgatgaattatttcccaatatttcatagtttatgaggctgaattcctcttgaatttattaaatgcttccttcacatcctctgtgatgatcatgtttatttactgataaaactcaatacctagaactgcacctagctcatgatggtacctaataaatacttcaatgaaatgatgtggtgatgcatgcctatagttttagctacttgggagggtggcctgagcccaggggttctagaccagcttaggcaacatagcaagaccccatctcaaaaaaaaaaacaaaaacaaaacaaaaaaaaaacttgaagaagtgaatgcatggaaaggcgcttttctaaaacaaatgtggtcaggctgggtgtgggggcttatgcctgtaatcccagcaatttgggaggtgggggtgggcagatcatttgaggtcaagagttcgagaccagcccagccaacatggtgaaaccccatctctactaacaatacaaaaattagctgggtgtggtgatgtgcacctgtaatcccagctacttgggaggctgaagcaggagaatcacttgaacctgggaggtggaggttgcattgagccaagattgcaccactgcactccatgctgggtgacagggtgcgactctgtcaaaaataaataaattaaattaaataaatgtggtatttgtatttattgcttttccaatgttacatcaaccttgtattcctggataagctcgactgtgacataatggatcacttaaaaatacttcatgacctttactaatatgttatggagctatgtttgaataacattgtgatttttaaaaaattgtcccttaatgatatttgtatataatgactgtcatatactgtagtggggcatgttcctactatttctaaattcttaatctataagagtcatctaggttgggaatagtggctcaggcctgtaatcccagcacttttggaggctgaggcaaaaagatcccttgagccaaggagttcaaaccagcctgggcaacatagcgaaaccacatctctatttaaaaatactacaagatattttcatttttttggtttgtttctttgtttttgagttg

SEQ ID NO: 297440 - DNA, 6135 bp, Homo sapiens
  misc_feature (4)..(4): n is a, c, g, or t
  misc_feature (40)..(40): n is a, c, g, or t
  misc_feature (44)..(44): n is a, c, g, or t
gcgnccgcgtggtatctcccgagggctgcttggaccctgntggnctgagtgctccaccccgctgtgggcctcagataaccctgtacaaaggggaatggagattgcctgtatccacctagattcataagctgccctgaggcgatcttggcatcaagaaagacagcattgaggcacatctcaccatcagcttcagaggatgtcagcctttgatatgtcccatgggttttttcccagggaaccaatctgtccttttgaagaaaagacaaagataggaacgatggtagaggaccaccggtcaaattcttaccagtgaatattggtggaagtgttcattggctcaaaccagcatgtgtttgatgacttaggattcagtgacgtttgatgatgtggctgtggagttcaccccagaggagtgggctttactggacacaactcagaaatacctctacagagatgtgatgctggagaactacatgaacctggcctctgtggatttctttttctgcttaacttcagaatgggaaatacaacctagaaccaaacggtcatcacttcagcagggttttttgaagaatcaaatattcactgggatacaaatgcagacaagaagctacagtggatggaaactctgtgagaattgtggagaggtcttcagtgaacagttttgccttaagacacacatgagagctcagaatggagggaacacttttgagggtaattgttatggaaaagacagcatcagtgtgcacaaggaagcctctattggacaagaactttccaaatttaatccatgtggaaaagtcttcaccttaactccaggccttgctgtgcatcttgaaattctcaatggaagacaaccctacaaatgtaaggaatgtggaaaaggctttaagtattttgcaagccttgataatcacatgggaatccacattggagagaaactctgtgaatttcaggaatgtgagagagccatcacaacttcctcacacttaaagcagtgtgtagcagttcatactggaaagaaatccgaaaagactaagaactgtgggaaatccttcactaatttttctcaactttctgcacatgcaaaaactcataaaggagagaagtcctttgaatgtaaagaatgtggaagatcctttagaaattcctcatcctttaatgttcacattcaaattcacactggaataaaaccacacaaatgtacggaatgtgggaaagccttcactagatcaactcaccttactcaacatgtaagaactcacactggaataaaaccctatgaatgtaaggaatgtggccaagccttcactcagtacacgggccttgctatacacatacgaaatcacactggagagaaaccctatcagtgtaaggaatgtgggaaagccttcaatagatcttcaacgcttactcaacatagaagaattcacacaggagagaagccttatgaatgtgttgaatgtgggaagaccttcattacttcttcccatcgtagtaaacatttgaaaactcacagtggagaaaggtaaatgcaagatatgtgggaaagaatttctgtattcctcaccccacctgtgaactcctaccagagagaaaccttttgtatgtaaagaatttgggaaagcatttgctctttcctcatgcctaagtatgcatgaaagaattcacactggggagaaatactatgaatgtaaggatatgagtgttgttaccatttagcccattggttgccatctttaattattggcagtgcaaagatcatcagattagtcctaaatgccttttggaggttgtaatggctcacagattggccttagatgcatcccgagggtctgaaattaaacctacaggttctgaatacaacatcatggttacctgagtctgggcatctgtgaagaagggtcatggatggtgaggtcagtactgcaggctgcctcaccttggtgattagattcctaagatcatagcattaacaagttctgtacgagataaatcatgcagattgatcccagcccctgttggttagtggctgccagtgtggcacattcatgtcaaaatttaccagaagccaagatgatgtaggccccagaggtggattgttaaaaagatgctcctccaaggttctcttctgttcccatggatcctgcagagcatgtcaggagtgaaaccatccataactgccagtgccctttcacagctgattatttctatgtccccttcttgtaaaataagaagtgtgacaaccttgactgttctgttctgtcttctctgtccattttaggtggcacaatgtaagtggcagtgtctcttatagtataatccagtctctcttctcacttctgttaagatggctgatatagtccatgaatcccactcatgatctctttatcaaatgattgttcagccacactttgaggattctcttcagtacaagttttctaatttttgcagtatggataggctgagaattttccaaatctccaagttctggttcctttttccttaacaacttcttctgcaattcaggtctccttttgcatttttgccgagaccagctgggtcgtggagaccctaacccagtggctctagaggaattaagacaaagacacagaaatatagtgcagagtgggaatcggggctcacagccttcagagctgagcttgaacagagtttgacccacatatttattgacagtaagcctgtgataaacattattcctatagattgtagatcagctataagtattccttatgagaaagaaagggacaggctctggcttgttatctgcaacaggaatatgtccttaaggcacaaatcactcatgctattgtttgtggtttaggaatgccttgagcagttttccagttttctgccctgggtgggccaggtgttgcttgccctcattctggtaaaccagcagcctccagcatgggcgtcatagccatcacgagcatgtcacagtgctgcagagattttgtttatggccagtttctcattgcctgtttatggccagatttggggggcctgttcccagcacattttcctgtaagcactcaggaataatgaagcttcctgtgtcctttaacactttaattacagatcttagtgatacataccattttatctgtctcaagctctaccttccgtaaaatgctagaatacagttctgccaagttcttcaccactttatatcaagggttgtcttttcttcatttcccaatagcatgttcctcattccccaatgacacctcaccagaataacccttaccaaccttatttccagcttggcctcccaaagtgctgggattacaggcctgagccaccgtatctggcccaaaacacaaatttatattctcacatatctggaggctggaagtctgagatcagagtgccagcatggtcaacctctagtgagagctctcttcctggcatgtaagtgcccacttcctcatgttttcacacgatggagaccaacaaataggtcggtcggtctcccccctccccgcccccttctcttttcacatacagtcacattgaggtttggaacttcatatgaaatttggggggtcactgtgtgtgtgtgtgtgtgtgtgtgtatgtgtatatatatatacatatatatacacatatgtatgtatacctaactcctaaagtggaacagtaagagtcattatttatagattatctgattctctatgtggaaagagaaaagaatcatattaagtactttggactgaacaatgacccccaaaattcgtatgatgatgaagctctctctaaatattttcttgctttactggactgattttaacccgctgcacaacaccaactaaaagtagtaataccagcatacttgtctttgcagttctggtgagatatgcactctattttgttggtttggctgtaggcttttatttcttttttattttttgaagaggttatgtcctgtcagggaaccagccccgatattcacataggttcttttctattttccctaagtgtcagccaacttgagaaataaagggacagagtacaaaagagagaaattttaaagctgggtgtccggggcagacatcacatgtcggtaggttccgtgatgccccacaagccgcaaaaaccagcaagtttttattagggattttcaaaaggggagggagtgtgcaaataggtgtgggtcacagacatcaagtactttacaaggtaatagaatatcacaaggcaagtggaggcagggcgagatcacaggaccaaggtgaaattaaaattgctaatgaagttttgggcaccattgtcattgataacatcttatcaggagacggttttgagatcaactggtctgactaaaatttattaggtgggaatttcctcttcctaataagcctgggagtgctatgggagactggggtctatttcacccctgcagtctcgaccataagagatggctacacccaggggggccagttcagagacccactcccaggtgtgcattctctttctcaaggatgttccttgctgagaaaaagaattcagtgatatttctcccatttgcttgtgaaagaagagaaatgtggctttgttccacctggctcaccggcggtcagaatttaaggttatctctcttgtttcctaaacattgctgttatcctgttcttttttcaaggtgcccagatttcatattgctcaaacacacatgctgtataatttgtgcagttaatgcaattattacagggtcctgaggtaatatacatcctcctcagctgacaggattgagagattaaagtaaagacaggcataggaaatcacaagggtattgactggggaagtgataagtgtccatgaaatctttacaatttatgtttagagattgcagtaaagacaggcataagaaattataaaagtattaatttggggaactaataaatgtccatgaaaccttcacaatccatgtttttctgccatggcttcagccagtccccccgtttggggtccctgacttcctgcaacaatgtcctgcaggaaaagttttttctttatatccagtttttacatgatgaattatttcccaatatttcatagtttatgaggctgaattcctcttgaatttattaaatgcttccttcacatcctctgtgatgatcatgtttatttactgataaaactcaatacctagaactgcacctagctcatgatggtacctaataaatacttcaatgaaatgatgtggtgatgcatgcctatagttttagctacttgggagggtggcctgagcccaggggttctagaccagcttaggcaacatagcaagaccccatctcaaaaaaaaaaacaaaaacaaaacaaaaaaaaaacttgaagaagtgaatgcatggaaaggcgcttttctaaaacaaatgtggtcaggctgggtgtgggggcttatgcctgtaatcccagcaatttgggaggtgggggtgggcagatcatttgaggtcaagagttcgagaccagcccagccaacatggtgaaaccccatctctactaacaatacaaaaattagctgggtgtggtgatgtgcacctgtaatcccagctacttgggaggctgaagcaggagaatcacttgaacctgggaggtggaggttgcattgagccaagattgcaccactgcactccatgctgggtgacagggtgcgactctgtcaaaaataaataaattaaattaaataaatgtggtatttgtatttattgcttttccaatgttacatcaaccttgtattcctggataagctcgactgtgacataatggatcacttaaaaatacttcatgacctttactaatatgttatggagctatgtttgaataacattgtgatttttaaaaaattgtcccttaatgatatttgtatataatgactgtcatatactgtagtggggcatgttcctactatttctaaattcttaatctataagagtcatctaggttgggaatagtggctcaggcctgtaatcccagcacttttggaggctgaggcaaaaagatcccttgagccaaggagttcaaaccagcctgggcaacatagcgaaaccacatctctatttaaaaatactacaagatattttcatttttttggtttgtttctttgtttttgagttg

SEQ ID NO: 297441 - DNA, 5768 bp, Homo sapiens
  misc_feature (4)..(4): n is a, c, g, or t
  misc_feature (40)..(40): n is a, c, g, or t
  misc_feature (44)..(44): n is a, c, g, or t
gcgnccgcgtggtatctcccgagggctgcttggaccctgntggnctgagtgctccaccccgctgtgggcctcagataaccctgtacaaaggggaatggagattgcctgtatccacctagattcataagctgccctgaggcgatcttggcatcaagaaagacagcattgaggcacatctcaccatcagcttcagaggatgtcagcctttgatatgtcccatgggttttttcccagggaaccaatctgtccttttgaagaaaagacaaagataggaacgatggtagaggaccaccggtcaaattcttaccagtgaatattggtggaagtgttcattggctcaaaccagcatgtgtttgatgacttaggattcagtgacgtttgatgatgtggctgtggagttcaccccagaggagtgggctttactggacacaactcagaaatacctctacagagatgtgatgctggagaactacatgaacctggcctctgtggatttctttttctgcttaacttcagaatgggaaatacaacctagaaccaaacggtcatcacttcagcagggttttttgaagaatcaaatattcactgggatacaaatgcagacaagaagctacagtggatggaaactctgtgagaattgtggagaggtcttcagtgaacagttttgccttaagacacacatgagagctcagaatggagggaacacttttgagggtaattgttatggaaaagacagcatcagtgtgcacaaggaagcctctattggacaagaactttccaaatttaatccatgtggaaaagtcttcaccttaactccaggccttgctgtgcatcttgaaattctcaatggaagacaaccctacaaatgtaaggaatgtggaaaaggctttaagtattttgcaagccttgataatcacatgggaatccacattggagagaaactctgtgaatttcaggaatgtgagagagccatcacaacttcctcacacttaaagcagtgtgtagcagttcatactggaaagaaatccgaaaagactaagaactgtgggaaatccttcactaatttttctcaactttctgcacatgcaaaaactcataaaggagagaagtcctttgaatgtaaagaatgtggaagatcctttagaaattcctcatcctttaatgttcacattcaaattcacactggaataaaaccacacaaatgtacggaatgtgggaaagccttcactagatcaactcaccttactcaacatgtaagaactcacactggaataaaaccctatgaatgtaaggaatgtggccaagccttcactcagtacacgggccttgctatacacatacgaaatcacactggagagaaaccctatcagtgtaaggaatgtgggaaagccttcaatagatcttcaacgcttactcaacatagaagaattcacacaggagagaagccttatgaatgtgttgaatgtgggaagaccttcattacttcttcccatcgtagtaaacatttgaaaactcacagtggagaaaggtaaatgcaagatatgtgggaaagaatttctgtattcctcaccccacctgtgaactcctaccagagagaaaccttttgtatgtaaagaatttgggaaagcatttgctctttcctcatgcctaagtatgcatgaaagaattcacactggggagaaatactatgaatgtaaggatatgagtgttgttaccatttagcccattggttgccatctttaattattggcagtgcaaagatcatcagattagtcctaaatgccttttggaggttgtaatggctcacagattggccttagatgcatcccgagggtctgaaattaaacctacaggttctgaatacaacatcatggttacctgagtctgggcatctgtgaagaagggtcatggatggtgaggtcagtactgcaggctgcctcaccttggtgattagattcctaagatcatagcattaacaagttctgtacgagataaatcatgcagattgatcccagcccctgttggttagtggctgccagtgtggcacattcatgtcaaaatttaccagaagccaagatgatgtaggccccagaggtggattgttaaaaagatgctcctccaaggttctcttctgttcccatggatcctgcagagcatgtcaggagtgaaaccatccataactgccagtgccctttcacagctgattatttctatgtccccttcttgtaaaataagaagtgtgacaaccttgactgttctgttctgtcttctctgtccattttaggtggcacaatgtaagtggcagtgtctcttatagtataatccagtctctcttctcacttctgttaagatggctgatatagtccatgaatcccactcatgatctctttatcaaatgattgttcagccacactttgaggattctcttcagtacaagttttctaatttttgcagtatggataggctgagaattttccaaatctccaagttctggttcctttttccttaacaacttcttctgcaattcaggtctccttttgcatttttgccgagaccagctgggtcgtggagaccctaacccagtggctctagaggaattaagacaaagacacagaaatatagtgcagagtgggaatcggggctcacagccttcagagctgagcttgaacagagtttgacccacatatttattgacagtaagcctgtgataaacattattcctatagattgtagatcagctataagtattccttatgagaaagaaagggacaggctctggcttgttatctgcaacaggaatatgtccttaaggcacaaatcactcatgctattgtttgtggtttaggaatgccttgagcagttttccagttttctgccctgggtgggccaggtgttgcttgccctcattctggtaaaccagcagcctccagcatgggcgtcatagccatcacgagcatgtcacagtgctgcagagattttgtttatggccagtttctcattgcctgtttatggccagatttggggggcctgttcccagcacattttcctgtaagcactcaggaataatgaagcttcctgtgtcctttaacactttaattacagatcttagtgatacataccattttatctgtctcaagctctaccttccgtaaaatgctagaatacagttctgccaagttcttcaccactttatatcaagggttgtcttttcttcatttcccaatagcatgttcctcattccccaatgacacctcaccagaataacccttaccaaccttatttccagcttgcacatcagaatttttccagcctctactcatttgtcagtttcaaagctgcttcacatttttagtttttttgtttgtttttaattgcagtacctcacttctcagtaccaatatctgccttagtcagctcagacaaccataagagaataccgcagaccaaatggcttagaaattaatttaattttaaatcaatgaggttaaaaacacaggatttttttttttttttttttttttttttgagatggagttttgctcttgttgcccaggctggagtgcaatggtatgatcttggctcaccgcaacctccacctcctgagttccagtgattctcctgcctcaccctcagtagctgggattattggcatgcaccacaaaccttagctaagtttgtatttttagtagagacagggtttctccatgttggttaggctgatctccatgttggtcagatctgacctttggtgatccacctgccttggcctcccaaagtgctgggattacaggcctgagccaccgtatctggcccaaaacacaaatttatattctcacatatctggaggctggaagtctgagatcagagtgccagcatggtcaacctctagtgagagctctcttcctggcatgtaagtgcccacttcctcatgttttcacacgatggagaccaacaaataggtcggtcggtctcccccctccccgcccccttctcttttcacatacagtcacattgaggtttggaacttcatatgaaatttggggggtcactgtgtgtgtgtgtgtgtgtgtgtgtatgtgtatatatatatacatatatatacacatatgtatgtatacctaactcctaaagtggaacagtaagagtcattatttatagattatctgattctctatgtggaaagagaaaagaatcatattaagtactttggactgaacaatgacccccaaaattcgtatgatgatgaagctctctctaaatattttcttgctttactggactgattttaacccgctgcacaacaccaactaaaagtagtaataccagcatacttgtctttgcagttctggtgagatatgcactctattttgttggtttggctgtaggcttttatttcttttttattttttgaagaggttatgtcctgtcagggaaccagccccgatattcacataggttcttttctattttccctaagtgtcagccaacttgagaaataaagggacagagtacaaaagagagaaattttaaagctgggtgtccggggcagacatcacatgtcggtaggttccgtgatgccccacaagccgcaaaaaccagcaagtttttattagggattttcaaaaggggagggagtgtgcaaataggtgtgggtcacagacatcaagtactttacaaggtaatagaatatcacaaggcaagtggaggcagggcgagatcacaggaccaaggtgaaattaaaattgctaatgaagttttgggcaccattgtcattgataacatcttatcaggagacggttttgagatcaactggtctgactaaaatttattaggtgggaatttcctcttcctaataagcctgggagtgctatgggagactggggtctatttcacccctgcagtctcgaccataagagatggctacacccaggggggccagttcagagacccactcccaggtgtgcattctctttctcaaggatgttccttgctgagaaaaagaattcagtgatatttctcccatttgcttgtgaaagaagagaaatgtggctttgttccacctggctcaccggcggtcagaatttaaggttatctctcttgtttcctaaacattgctgttatcctgttcttttttcaaggtgcccagatttcatattgctcaaacacacatgctgtataatttgtgcagttaatgcaattattacagggtcctgaggtaatatacatcctcctcagctgacaggattgagagattaaagtaaagacaggcataggaaatcacaagggtattgactggggaagtgataagtgtccatgaaatctttacaatttatgtttagagattgcagtaaagacaggcataagaaattataaaagtattaatttggggaactaataaatgtccatgaaaccttcacaatccatgtttttctgccatggcttcagccagtccccccgtttggggtccctgacttcctgcaacaatgtcctgcaggaaaagttttttctttatatccagtttttacatgatgaattatttcccaatatttcatagtttatgaggctgaattcctcttgaatttattaaatgcttccttcacatcctctgtgatgatcatgtttatttactgataaaactcaatacctagaactgcacctagctcatgatggtacctaataaatacttcaatgaaatgatgtggtgatgcatgcctgtagtcccagctactcaggagggtgaggcaggagaatcgcttgaaccctggagg

SEQ ID NO: 297442 - DNA, 3585 bp, Homo sapiens
gtgaaaaatgctgctatgaacatgcgtatacaaatatctctttgagactctgctttcaattcttttgggtacatccccaaaagtggaagtgctgaataattctatttttaattttttaagggatcacaatactcttttctgtagcagctacatcattttatattcccacccacaatgcacaggggctccaatttcttcatatcccttaccagtacttattgtctttgtttgtttatttattggaggacaaggtctcattctcttgcacatcagaatttttccagcctctactcatttgtcagtttcaaagctgcttcacatttttagtttttttgtttgtttttaattgcagtacctcacttctcagtaccaatatctgccttagtcagctcagacaaccataagagaataccgcagaccaaatggcttagaaattaatttaattttaaatcaatgaggttaaaaacacaggatttttttttttttttttttttttttttgagatggagttttgctcttgttgcccaggctggagtgcaatggtatgatcttggctcaccgcaacctccacctcctgagttccagtgattctcctgcctcaccctcagtagctgggattattggcatgcaccacaaaccttagctaagtttgtatttttagtagagacagggtttctccatgttggttaggctgatctccatgttggtcagatctgacctttggtgatccacctgccttggcctcccaaagtgctgggattacaggcctgagccaccgtatctggcccaaaacacaaatttatattctcacatatctggaggctggaagtctgagatcagagtgccagcatggtcaacctctagtgagagctctcttcctggcatgtaagtgcccacttcctcatgttttcacacgatggagaccaacaaataggtcggtcggtctcccccctccccgcccccttctcttttcacatacagtcacattgaggtttggaacttcatatgaaatttggggggtcactgtgtgtgtgtgtgtgtgtgtgtgtatgtgtatatatatatacatatatatacacatatgtatgtatacctaactcctaaagtggaacagtaagagtcattatttatagattatctgattctctatgtggaaagagaaaagaatcatattaagtactttggactgaacaatgacccccaaaattcgtatgatgatgaagctctctctaaatattttcttgctttactggactgattttaacccgctgcacaacaccaactaaaagtagtaataccagcatacttgtctttgcagttctggtgagatatgcactctattttgttggtttggctgtaggcttttatttcttttttattttttgaagaggttatgtcctgtcagggaaccagccccgatattcacataggttcttttctattttccctaagtgtcagccaacttgagaaataaagggacagagtacaaaagagagaaattttaaagctgggtgtccggggcagacatcacatgtcggtaggttccgtgatgccccacaagccgcaaaaaccagcaagtttttattagggattttcaaaaggggagggagtgtgcaaataggtgtgggtcacagacatcaagtactttacaaggtaatagaatatcacaaggcaagtggaggcagggcgagatcacaggaccaaggtgaaattaaaattgctaatgaagttttgggcaccattgtcattgataacatcttatcaggagacggttttgagatcaactggtctgactaaaatttattaggtgggaatttcctcttcctaataagcctgggagtgctatgggagactggggtctatttcacccctgcagtctcgaccataagagatggctacacccaggggggccagttcagagacccactcccaggtgtgcattctctttctcaaggatgttccttgctgagaaaaagaattcagtgatatttctcccatttgcttgtgaaagaagagaaatgtggctttgttccacctggctcaccggcggtcagaatttaaggttatctctcttgtttcctaaacattgctgttatcctgttcttttttcaaggtgcccagatttcatattgctcaaacacacatgctgtataatttgtgcagttaatgcaattattacagggtcctgaggtaatatacatcctcctcagctgacaggattgagagattaaagtaaagacaggcataggaaatcacaagggtattgactggggaagtgataagtgtccatgaaatctttacaatttatgtttagagattgcagtaaagacaggcataagaaattataaaagtattaatttggggaactaataaatgtccatgaaaccttcacaatccatgtttttctgccatggcttcagccagtccccccgtttggggtccctgacttcctgcaacaatgtcctgcaggaaaagttttttctttatatccagtttttacatgatgaattatttcccaatatttcatagtttatgaggctgaattcctcttgaatttattaaatgcttccttcacatcctctgtgatgatcatgtttatttactgataaaactcaatacctagaactgcacctagctcatgatggtacctaataaatacttcaatgaaatgatgtggtgatgcatgcctatagttttagctacttgggagggtggcctgagcccaggggttctagaccagcttaggcaacatagcaagaccccatctcaaaaaaaaaaacaaaaacaaaacaaaaaaaaaacttgaagaagtgaatgcatggaaaggcgcttttctaaaacaaatgtggtcaggctgggtgtgggggcttatgcctgtaatcccagcaatttgggaggtgggggtgggcagatcatttgaggtcaagagttcgagaccagcccagccaacatggtgaaaccccatctctactaacaatacaaaaattagctgggtgtggtgatgtgcacctgtaatcccagctacttgggaggctgaagcaggagaatcacttgaacctgggaggtggaggttgcattgagccaagattgcaccactgcactccatgctgggtgacagggtgcgactctgtcaaaaataaataaattaaattaaataaatgtggtatttgtatttattgcttttccaatgttacatcaaccttgtattcctggataagctcgactgtgacataatggatcacttaaaaatacttcatgacctttactaatatgttatggagctatgtttgaataacattgtgatttttaaaaaattgtcccttaatgatatttgtatataatgactgtcatatactgtagtggggcatgttcctactatttctaaattcttaatctataagagtcatctaggttgggaatagtggctcaggcctgtaatcccagcacttttggaggctgaggcaaaaagatcccttgagccaaggagttcaaaccagcctgggcaacatagcgaaaccacatctctatttaaaaatactacaagatattttcatttttttggtttgtttctttgtttttgagttg

SEQ ID NO: 297443 - DNA, 4143 bp, Homo sapiens
  misc_feature (4)..(4): n is a, c, g, or t
  misc_feature (40)..(40): n is a, c, g, or t
  misc_feature (44)..(44): n is a, c, g, or t
gcgnccgcgtggtatctcccgagggctgcttggaccctgntggnctgagtgctccaccccgctgtgggcctcagataaccctgtacaaaggggaatggagattgcctgtatccacctagattcataagctgccctgaggcgatcttggcatcaagaaagacagcattgaggcacatctcaccatcagcttcagaggatgtcagcctttgatatgtcccatgggttttttcccagggaaccaatctgtccttttgaagaaaagacaaagataggaacgatggtagaggaccaccggtcaaattcttaccagtgaatattggtggaagtgttcattggctcaaaccagcatgtgtttgatgacttaggattcagtgacgtttgatgatgtggctgtggagttcaccccagaggagtgggctttactggacacaactcagaaatacctctacagagatgtgatgctggagaactacatgaacctggcctctgtggatttctttttctgcttaacttcagaatgggaaatacaacctagaaccaaacggtcatcacttcagcagggttttttgaagaatcaaatattcactgggatacaaatgcagacaagaagctacagtggatggaaactctgtgagaattgtggagaggtcttcagtgaacagttttgccttaagacacacatgagagctcagaatggagggaacacttttgagggtaattgttatggaaaagacagcatcagtgtgcacaaggaagcctctattggacaagaactttccaaatttaatccatgtggaaaagtcttcaccttaactccaggccttgctgtgcatcttgaaattctcaatggaagacaaccctacaaatgtaaggaatgtggaaaaggctttaagtattttgcaagccttgataatcacatgggaatccacattggagagaaactctgtgaatttcaggaatgtgagagagccatcacaacttcctcacacttaaagcagtgtgtagcagttcatactggaaagaaatccgaaaagactaagaactgtgggaaatccttcactaatttttctcaactttctgcacatgcaaaaactcataaaggagagaagtcctttgaatgtaaagaatgtggaagatcctttagaaattcctcatcctttaatgttcacattcaaattcacactggaataaaaccacacaaatgtacggaatgtgggaaagccttcactagatcaactcaccttactcaacatgtaagaactcacactggaataaaaccctatgaatgtaaggaatgtggccaagccttcactcagtacacgggccttgctatacacatacgaaatcacactggagagaaaccctatcagtgtaaggaatgtgggaaagccttcaatagatcttcaacgcttactcaacatagaagaattcacacaggagagaagccttatgaatgtgttgaatgtgggaagaccttcattacttcttcccatcgtagtaaacatttgaaaactcacagtggagaaaggtaaatgcaagatatgtgggaaagaatttctgtattcctcaccccacctgtgaactcctaccagagagaaaccttttgtatgtaaagaatttgggaaagcatttgctctttcctcatgcctaagtatgcatgaaagaattcacactggggagaaatactatgaatgtaaggatatgagtgttgttaccatttagcccattggttgccatctttaattattggcagtgcaaagatcatcagattagtcctaaatgccttttggaggttgtaatggctcacagattggccttagatgcatcccgagggtctgaaattaaacctacaggttctgaatacaacatcatggttacctgagtctgggcatctgtgaagaagggtcatggatggtgaggtcagtactgcaggctgcctcaccttggtgattagattcctaagatcatagcattaacaagttctgtacgagataaatcatgcagattgatcccagcccctgttggttagtggctgccagtgtggcacattcatgtcaaaatttaccagaagccaagatgatgtaggccccagaggtggattgttaaaaagatgctcctccaaggttctcttctgttcccatggatcctgcagagcatgtcaggagtgaaaccatccataactgccagtgccctttcacagctgattatttctatgtccccttcttgtaaaataagaagtgtgacaaccttgactgttctgttctgtcttctctgtccattttaggtggcacaatgtaagtggcagtgtctcttatagtataatccagtctctcttctcacttctgttaagatggctgatatagtccatgaatcccactcatgatctctttatcaaatgattgttcagccacactttgaggattctcttcagtacaagttttctaatttttgcagtatggataggctgagaattttccaaatctccaagttctggttcctttttccttaacaacttcttctgcaattcaggtctccttttgcatttttgccgagaccagctgggtcgtggagaccctaacccagtggctctagaggaattaagacaaagacacagaaatatagtgcagagtgggaatcggggctcacagccttcagagctgagcttgaacagagtttgacccacatatttattgacagtaagcctgtgataaacattattcctatagattgtagatcagctataagtattccttatgagaaagaaagggacaggctctggcttgttatctgcaacaggaatatgtccttaaggcacaaatcactcatgctattgtttgtggtttaggaatgccttgagcagttttccagttttctgccctgggtgggccaggtgttgcttgccctcattctggtaaaccagcagcctccagcatgggcgtcatagccatcacgagcatgtcacagtgctgcagagattttgtttatggccagtttctcattgcctgtttatggccagatttggggggcctgttcccagcacattttcctgtaagcactcaggaataatgaagcttcctgtgtcctttaacactttaattacagatcttagtgatacataccattttatctgtctcaagctctaccttccgtaaaatgctagaatacagttctgccaagttcttcaccactttatatcaagggttgtcttttcttcatttcccaatagcatgttcctcattccccaatgacacctcaccagaataacccttaccaaccttatttccagcttgcacatcagaatttttccagcctctactcatttgtcagtttcaaagctgcttcacatttttagtttttttgtttgtttttaattgcagtacctcacttctcagtaccaatatctgccttagtcagctcagacaaccataagagaataccgcagaccaaatggcttagaaattaatttaattttaaatcaatgaggttaaaaacacaggatttttttttttttttttttttttttttgagatggagttttgctcttgttgcccaggctggagtgcaatggtatgatcttggctcaccgcaacctccacctcctgaaatcacttgaacctgggaggtggaggttgcattgagccaagattgcaccactgcactccatgctgggtgacagggtgcgactctgtcaaaaataaataaattaaattaaataaatgtggtatttgtatttattgcttttccaatgttacatcaaccttgtattcctggataagctcgactgtgacataatggatcacttaaaaatacttcatgacctttactaatatgttatggagctatgtttgaataacattgtgatttttaaaaaattgtcccttaatgatatttgtatataatgactgtcatatactgtagtggggcatgttcctactatttctaaattcttaatctataagagtcatctaggttgggaatagtggctcaggcctgtaatcccagcacttttggaggctgaggcaaaaagatcccttgagccaaggagttcaaaccagcctgggcaacatagcgaaaccacatctctatttaaaaatactacaagatattttcatttttttggtttgtttctttgtttttgagttg

SEQ ID NO: 297444 - DNA, 1865 bp, Homo sapiens
  misc_feature (4)..(4): n is a, c, g, or t
  misc_feature (40)..(40): n is a, c, g, or t
  misc_feature (44)..(44): n is a, c, g, or t
gcgnccgcgtggtatctcccgagggctgcttggaccctgntggnctgagtgctccaccccgctgtgggcctcagataaccctgtacaaaggggaatggagattgcctgtatccacctagattcataagctgccctgaggcgatcttggcatcaagaaagacagcattgaggcacatctcaccatcagcttcagaggatgtcagcctttgatatgtcccatgggttttttcccagggaaccaatctgtccttttgaagaaaagacaaagataggaacgatggtagaggaccaccggtcaaattcttaccagtgaatattggtggaagtgttcattggctcaaaccagcatgtgtttgatgacttaggattcagtgacgtttgatgatgtggctgtggagttcaccccagaggagtgggctttactggacacaactcagaaatacctctacagagatgtgatgctggagaactacatgaacctggcctctgtggatttctttttctgcttaacttcagaatgggaaatacaacctagaaccaaacggtcatcacttcagcagggttttttgaagaatcaaatattcactgggatacaaatgcagacaagaagctacagtggatggaaactctgtgagaattgtggagaggtcttcagtgaacagttttgccttaagacacacatgagagctcagaatggagggaacacttttgagggtaattgttatggaaaagacagcatcagtgtgcacaaggaagcctctattggacaagaactttccaaatttaatccatgtggaaaagtcttcaccttaactccaggccttgctgtgcatcttgaaattctcaatggaagacaaccctacaaatgtaaggaatgtggaaaaggctttaagtattttgcaagccttgataatcacatgggaatccacattggagagaaactctgtgaatttcaggaatgtgagagagccatcacaacttcctcacacttaaagcagtgtgtagcagttcatactggaaagaaatccgaaaagactaagaactgtgggaaatccttcactaatttttctcaactttctgcacatgcaaaaactcataaaggagagaagtcctttgaatgtaaagaatgtggaagatcctttagaaattcctcatcctttaatgttcacattcaaattcacactggaataaaaccacacaaatgtacggaatgtgggaaagccttcactagatcaactcaccttactcaacatgtaagaactcacactggaataaaaccctatgaatgtaaggaatgtggccaagccttcactcagtacacgggccttgctatacacatacgaaatcacactggagagaaaccctatcagtgtaaggaatgtgggaaagccttcaatagatcttcaacgcttactcaacatagaagaattcacacaggagagaagccttatgaatgtgttgaatgtgggaagaccttcattacttcttcccatcgtagtaaacatttgaaaactcacagtggagaaaggtaaatgcaagatatgtgggaaagaatttctgtattcctcaccccacctgtgaactcctaccagagagaaaccttttgtatgtaaagaatttgggaaagcatttgctctttcctcatgcctaagtatgcatgaaagaattcacactggggagaaatactatgaatgtaaggatatgagtgttgttaccatttagcccattggttgccatctttaattattggcagtgcaaagatcatcagattagtcctaaatgccttttggaggttgtaatggctcacagattggccttagatgcatcccgagggtctgaaattaaacctacaggttctgaataca

SEQ ID NO: 297445 - DNA, 2307 bp, Homo sapiens
  misc_feature (4)..(4): n is a, c, g, or t
  misc_feature (40)..(40): n is a, c, g, or t
  misc_feature (44)..(44): n is a, c, g, or t
gcgnccgcgtggtatctcccgagggctgcttggaccctgntggnctgagtgctccaccccgctgtgggcctcagataaccctgtacaaaggggaatggagattgcctgtatccacctagattcataagctgccctgaggcgatcttggcatcaagaaagacagcattgaggcacatctcaccatcagcttcagaggatgtcagcctttgatatgtcccatgggttttttcccagggaaccaatctgtccttttgaagaaaagacaaagataggaacgatggtagaggaccaccggtcaaattcttaccagtgaatattggtggaagtgttcattggctcaaaccagcatgtgtttgatgacttaggattcagtgacgtttgatgatgtggctgtggagttcaccccagaggagtgggctttactggacacaactcagaaatacctctacagagatgtgatgctggagaactacatgaacctggcctctgtggatttctttttctgcttaacttcagaatgggaaatacaacctagaaccaaacggtcatcacttcagcagggttttttgaagaatcaaatattcactgggatacaaatgcagacaagaagctacagtggatggaaactctgtgagaattgtggagaggtcttcagtgaacagttttgccttaagacacacatgagagctcagaatggagggaacacttttgagggtaattgttatggaaaagacagcatcagtgtgcacaaggaagcctctattggacaagaactttccaaatttaatccatgtggaaaagtcttcaccttaactccaggccttgctgtgcatcttgaaattctcaatggaagacaaccctacaaatgtaaggaatgtggaaaaggctttaagtattttgcaagccttgataatcacatgggaatccacattggagagaaactctgtgaatttcaggaatgtgagagagccatcacaacttcctcacacttaaagcagtgtgtagcagttcatactggaaagaaatccgaaaagactaagaactgtgggaaatccttcactaatttttctcaactttctgcacatgcaaaaactcataaaggagagaagtcctttgaatgtaaagaatgtggaagatcctttagaaattcctcatcctttaatgttcacattcaaattcacactggaataaaaccacacaaatgtacggaatgtgggaaagccttcactagatcaactcaccttactcaacatgtaagaactcacactggaataaaaccctatgaatgtaaggaatgtggccaagccttcactcagtacacgggccttgctatacacatacgaaatcacactggagagaaaccctatcagtgtaaggaatgtgggaaagccttcaatagatcttcaacgcttactcaacatagaagaattcacacaggagagaagccttatgaatgtgttgaatgtgggaagaccttcattacttcttcccatcgtagtaaacatttgaaaactcacagtggagaaaggtaaatgcaagatatgtgggaaagaatttctgtattcctcaccccacctgtgaactcctaccagagagaaaccttttgtatgtaaagaatttgggaaagcatttgctctttcctcatgcctaagtatgcatgaaagaattcacactggggagaaatactatgaatgtaaggatatgagtgttgttaccatttagcccattggttgccatctttaattattggcagtgcaaagatcatcagattagtcctaaatgccttttggaggttgcattgagccaagattgcaccactgcactccatgctgggtgacagggtgcgactctgtcaaaaataaataaattaaattaaataaatgtggtatttgtatttattgcttttccaatgttacatcaaccttgtattcctggataagctcgactgtgacataatggatcacttaaaaatacttcatgacctttactaatatgttatggagctatgtttgaataacattgtgatttttaaaaaattgtcccttaatgatatttgtatataatgactgtcatatactgtagtggggcatgttcctactatttctaaattcttaatctataagagtcatctaggttgggaatagtggctcaggcctgtaatcccagcacttttggaggctgaggcaaaaagatcccttgagccaaggagttcaaaccagcctgggcaacatagcgaaaccacatctctatttaaaaatactacaagatattttcatttttttggtttgtttctttgtttttgagttg

SEQ ID NO: 297446 - DNA, 1789 bp, Homo sapiens
  misc_feature (4)..(4): n is a, c, g, or t
  misc_feature (40)..(40): n is a, c, g, or t
  misc_feature (44)..(44): n is a, c, g, or t
gcgnccgcgtggtatctcccgagggctgcttggaccctgntggnctgagtgctccaccccgctgtgggcctcagataaccctgtacaaaggggaatggagattgcctgtatccacctagattcataagctgccctgaggcgatcttggcatcaagaaagacagcattgaggcacatctcaccatcagcttcagaggatgtcagcctttgatatgtcccatgggttttttcccagggaaccaatctgtccttttgaagaaaagacaaagataggaacgatggtagaggaccaccggtcaaattcttaccagtgaatattggtggaagtgttcattggctcaaaccagcatgtgtttgatgacttaggattcagtgacgtttgatgatgtggctgtggagttcaccccagaggagtgggctttactggacacaactcagaaatacctctacagagatgtgatgctggagaactacatgaacctggcctctgtggatttctttttctgcttaacttcagaatgggaaatacaacctagaaccaaacggtcatcacttcagcagggttttttgaagaatcaaatattcactgggatacaaatgcagacaagaagctacagtggatggaaactctgtgagaattgtggagaggtcttcagtgaacagttttgccttaagacacacatgagagctcagaatggagggaacacttttgagggtaattgttatggaaaagacagcatcagtgtgcacaaggaagcctctattggacaagaactttccaaatttaatccatgtggaaaagtcttcaccttaactccaggccttgctgtgcatcttgaaattctcaatggaagacaaccctacaaatgtaaggaatgtggaaaaggctttaagtattttgcaagccttgataatcacatgggaatccacattggagagaaactctgtgaatttcaggaatgtgagagagccatcacaacttcctcacacttaaagcagtgtgtagcagttcatactggaaagaaatccgaaaagactaagaactgtgggaaatccttcactaatttttctcaactttctgcacatgcaaaaactcataaaggagagaagtcctttgaatgtaaagaatgtggaagatcctttagaaattcctcatcctttaatgttcacattcaaattcacactggaataaaaccacacaaatgtacggaatgtgggaaagccttcactagatcaactcaccttactcaacatgtaagaactcacactggaataaaaccctatgaatgtaaggaatgtggccaagccttcactcagtacacgggccttgctatacacatacgaaatcacactggagagaaaccctatcagtgtaaggaatgtgggaaagccttcaatagatcttcaacgcttactcaacatagaagaattcacacaggagagaagccttatgaatgtgttgaatgtgggaagaccttcattacttcttcccatcgtagtaaacatttgaaaactcacagtggagaaaggtaaatgcaagatatgtgggaaagaatttctgtattcctcaccccacctgtgaactcctaccagagagaaaccttttgtatgtaaagaatttgggaaagcatttgctctttcctcatgcctaagtatgcatgaaagaattcacactggggagaaatactatgaatgtaaggatatgagtgttgttaccatttaggactaatctgatgatctttgcactgccaataattaaagatggcaaccaatgggctaaatggtcgagc

SEQ ID NO: 297447 - DNA, 1184 bp, Homo sapiens
ttttttttttagtagagacggggttttgccatgttggccaggctggtcttgaatgcctgacctcgagtgatttgcccaccttggcctcccaaaatgttgggattacaggcatgagcctctgtgcccagtcagaatgctgttttagaattcagccctggtttgtgtgcctttggaaatgctacataagcttcatgagtgttactactatgggcagatagtcacatttttcagggtgtaagtttccttgaaaaatgaaactgttaccctttacacaacaggcagctcagcccatatctgcttttctgggtctaggtgatacaggactactacggcatttcatggaagtgttgtgtgtgtgtagttttttcgagtgtgcaggagcatatgggaatttcaagctaggatggaatgacttctgggcataagaatgtgggcagctctggcttctcatgccttcttacttttccactagggttttttcccagggaaccaatctgtccttttgaagaaaagacaaagataggaacgatggtagaggaccaccggtcaaattcttaccagtgaatattggtggaagtgttcattggctcaaaccagcatgtgtttgatgacttaggattcagtgacgtttgatgatgtggctgtggagttcaccccagaggagtgggctttactggacacaactcagaaatacctctacagagatgtgatgctggagaactacatgaacctggcctctgtgggtaagagtaacatcactttgcttggcatggtggcctgcacctgtagtcccagatacttgggaggctgaggtgggagaatcgctggagcctgggagtttgatactagcatgggcaacattgtgaaacctcatctctaaaaaaaaatcctaagaataaagactaggccggtcccggaggttcacgcctgtaatcccagcactttggaaggctgaggcaggcagatcacaaggtcaggaaatcaagaccagcctggctaacatggtgaaacctctgtctctactaaaaatacaaaattagctgtgtgtggtggtgggcacccgttatcctagttactcgggcggctgaggcaggacaattgcttacccagaggccgaggttgctgagtgagccagcactgcaccactgcattccagcttagatgaccaagtgagactccatcta

SEQ ID NO: 297448 - DNA, 577 bp, Homo sapiens
ggcggccgcgcaacaaaggagtcacccggcgatgagccccggcacccccggaccgaccatgggcagatcccagggcagcccaatggatccaatggtgatgaagagacctcagttgtatggcatgggcagtaaccctcattctcagcctcagcagagcagtccgtacccaggaggttcctatggccctccaggcccacagcggtatccaattggcatccagggtcggactcccggggccatggccggaatgcagtaccctcagcagcaggtttgtgctggtcccccgacccgctgcttttttgtaatagttttgtctttgccttttgctgtccacctaagattgatgttaaagagaattagggggcattgcacggattttctgctttaatttttattgtttctttaatcacaggtataattttttttttcttttaaagatggaaaggtgagcttcttaaagtggacagaatacctgtttggtagaagggcagcaggaccagctgtatttgataggtgcactgtgtcataaatttgcagcaggttataacagatgtaagctctgaagtgaacttggcat

SEQ ID NO: 297449 - DNA, 997 bp, Homo sapiens
tatacacgatacccaccagacacctctggctgtattgaaaatacctttgtaatatgtgaaatgtttacacatagaagccagagaaagaggtcatttcatttttaatgatttcctctagctgctgtctggatggcaaagctgatatccaaggttgctaatcaagggatctcacataaatacgttttaggcccaaagtgcacttgtagtgaatatacctagaattacatctgtaggctctaaaaacaagtagaaatcctcgctaacctcatccttaaagattcaaaggctttaccaactcaggtgtcccttaaaaactgggaaatctaattttaaaaatctcacaacattacatccagttcacagagtaaaacaagctgcctgtgaacagctctgaaactatttttccaaaataaaaacccagtggggcgtagggaccaaagtggtgatgtctgtaaagatctaagggtacattttatttgccaggaaagaactcgtgtcactgaatgggctgcacttgtgtatggagaatagctctcccagtgtgcatcagcttcaggacgggggccctgctgaggcgtatagatccttcagaaagtggagggcctgttctcttaacagccagccgttcccttttccccttttttaaactgtcatttttatggcaacattatcattttaactacacaaaagagcttggattgcaaatggactcctggtatacattcttctcagtagtccagatggagccgagggcctgtgacacaggaggcagtggaaggaaagcctcctggtctcgtccagccccgagagcgcgtgcagggggctccaggcacacacaggcgtctgggggtcgcaggcagaggcaccctggtcttcagaagcctctcgattcactgccacccacacagcaggtggcctctccgattccagtcccatcattagggaaagtgtctggaaacatttttgttgttaaaggaaaataaaattattcccaact

SEQ ID NO: 297450 - DNA, 554 bp, Homo sapiens
ggcggccgcgcaacaaaggagtcacccggcgatgagccccggcacccccggaccgaccatgggcagatcccagggcagcccaatggatccaatggtgatgaagagacctcagttgtatggcatgggcagtaaccctcattctcagcctcagcagagcagtccgtacccaggaggttcctatggccctccaggcccacagcggtatccaattggcatccagggtcggactcccggggccatggccggaatgcagtaccctcagcagcaggacttgctctcttccttccagttctagctccgaaacaccctggattacagtctttgaagaagtaggagagccggtggccgaagtgcccactcatgacctggccttgctagtggaggtggcaaccagagaagctggagagcgcctcctgatccacagggaacttcagtaaatccttttgcctccccccggtcgtcagattgcgttcatactgtggtagcaggccccgtctgaggcccatcctggtgttgagaggctggatgctagcagggagctccaggagacgttc

SEQ ID NO: 297451 - DNA, 533 bp, Homo sapiens
ggcggccgcgcaacaaaggagtcacccggcgatgagccccggcacccccggaccgaccatgggcagatcccagggcagcccaatggatccaatggtgatgaagagacctcagttgtatggcatgggcagtaaccctcattctcagcctcagcagagcagtccgtacccaggaggttcctatggccctccaggcccacagcggtatccaattggcatccagggtcggactcccggggccatggccggaatgcagtaccctcagcagcagttctagctccgaaacaccctggattacagtctttgaagaagtaggagagccggtggccgaagtgcccactcatgacctggccttgctagtggaggtggcaaccagagaagctggagagcgcctcctgatccacagggaacttcagtaaatccttttgcctccccccggtcgtcagattgcgttcatactgtggtagcaggccccgtctgaggcccatcctggtgttgagaggctggatgctagcagggagctccaggagacgttc

SEQ ID NO: 297452 - DNA, 6764 bp, Homo sapiens
ggcggccgcgcaacaaaggagtcacccggcgatgagccccggcacccccggaccgaccatgggcagatcccagggcagcccaatggatccaatggtgatgaagagacctcagttgtatggcatgggcagtaaccctcattctcagcctcagcagagcagtccgtacccaggaggttcctatggccctccaggcccacagcggtatccaattggcatccagggtcggactcccggggccatggccggaatgcagtaccctcagcagcagatgccacctcagtatggacagcaaggtgtgagtggttactgccagcagggccaacagccatattacagccagcagccgcagcccccgcacctcccaccccaggcgcagtatctgccgtcccagtcccagcagaggtaccagccgcagcaggacatgtctcaggaaggctatggaactagatctcaacctcctctggcccccggaaaacctaaccatgaagacttgaacttaatacagcaagaaagaccatcaagtttaccagatctgtctggctccattgatgacctccccacgggaacggaagcaactttgagctcagcagtcagtgcatccgggtccacgagcagccaaggggatcagagcaacccggcgcagtcgcctttctccccacatgcgtcccctcatctctccagcatcccggggggcccatctccctctcctgttggctctcctgtaggaagcaaccagtctcgatctggcccaatctctcctgcaagtatcccaggtagtcagatgcctccgcagccacccgggagccagtcagaatccagttcccatcccgccttgagccagtcaccaatgccacaggaaagaggttttatggcaggcacacaaagaaaccctcagatggctcagtatggacctcaacagacaggaccatccatgtcgcctcatccttctcctgggggccagatgcatgctggaatcagtagctttcagcagagtaactcaagtgggacttacggtccacagatgagccagtatggaccacaaggtaactactccagacccccagcgtatagtggggtgcccagtgcaagctacagcggcccagggcccggtatgggtatcagtgccaacaaccagatgcatggacaagggccaagccagccatgtggtgctgtgcccctgggacgaatgccatcagctgggatgcagaacagaccatttcctggaaatatgagcagcatgacccccagttctcctggcatgtctcagcagggagggccaggaatggggccgccaatgccaactgtgaaccgtaaggcacaggaggcagccgcagcagtgatgcaggctgctgcgaactcagcacaaagcaggcaaggcagtttccccggcatgaaccagagtggacttatggcttccagctctccctacagccagcccatgaacaacagctctagcctgatgaacacgcaggcgccgccctacagcatggcgcccgccatggtgaacagctcggcagcatctgtgggtcttgcagatatgatgtctcctggtgaatccaaactgcccctgcctctcaaagcagacggcaaagaagaaggcactccacagcccgagagcaagtcaaaggatagctacagctctcagggtatttctcagcccccaaccccaggcaacctgccagtcccttccccaatgtcccccagctctgctagcatctcctcatttcatggagatgaaagtgatagcattagcagcccaggctggccaaagactccatcaagccctaagtccagctcctccaccactactggggagaagatcacgaaggtgtacgagctggggaatgagccagagagaaagctctgggtcgaccgatacctcaccttcatggaagagagaggctctcctgtctcaagtctgcctgccgtgggcaagaagcccctggacctgttccgactctacgtctgcgtcaaagagatcgggggtttggcccaggttaataaaaacaagaagtggcgtgagctggcaaccaacctaaacgttggcacctcaagcagtgcagcgagctccctgaaaaagcagtatattcagtacctgtttgcctttgagtgcaagatcgaacgtggggaggagcccccgccggaagtcttcagcaccggggacaccaaaaagcagcccaagctccagccgccatctcctggctaactcgggatccttgcaaggcccacagaccccccagtcaactggcagcaattccatggcagaggttccaggtgacctgaagccacctaccccagcctccacccctcacggccagatgactccaatgcaaggtggaagaagcagtacaatcagtgtgcacgacccattctcagatgtgagtgattcatccttcccgaaacggaactccatgactccaaacgccccctaccagcagggcatgagcatgcccgatgtgatgggcaggatgccctatgagcccaacaaggacccctttgggggaatgagaaaagtgcctggaagcagcgagccctttatgacgcaaggacagatgcccaacagcagcatgcaggacatgtacaaccaaagtccctccggagcaatgtctaacctgggcatggggcagcgccagcagtttccctatggagccagttacgaccgaaggcatgaaccttatgggcagcagtatccaggccaaggccctccctcgggacagccgccgtatggagggcaccagcccggcctgtacccacagcagccgaattacaaacgccatatggacggcatgtacgggcccccagccaagcgccacgagggcgacatgtacaacatgcagtacagcagccagcagcaggagatgtacaaccagtatggaggctcctactcgggcccggaccgcaggcccatccagggccagtacccgtatccctacagcagggagaggatgcagggcccggggcagatccagacacacggaatcccgcctcagatgatgggcggcccgctgcagtcgtcctccagtgaggggcctcagcagaatatgtgggcagcacgcaatgatatgccttatccctaccagaacaggcagggccctggcggccctacacaggcgcccccttacccaggcatgaaccgcacagacgatatgatggtacccgatcagaggataaatcatgagagccagtggccttctcacgtcagccagcgtcagccttatatgtcgtcctcagcctccatgcagcccatcacacgcccaccacagccgtcctaccagacgccaccgtcactgccaaatcacatctccagggcgcccagcccagcgtccttccagcgctccctggagaaccgcatgtctccaagcaagtctccttttctgccgtctatgaagatgcagaaggtcatgcccacggtccccacatcccaggtcaccgggccaccaccccaaccacccccaatcagaagggagatcacctttcctcctggctcagtagaagcatcacaaccagtcttgaaacaaaggcgaaagattacctccaaagatatcgttactcctgaggcgtggcgtgtgatgatgtcccttaaatcaggtcttttggctgagagtacgtgggctttggacactattaatattcttctgtatgatgacagcactgttgctactttcaatctctcccagttgtctggatttctcgaacttttagtcgagtactttagaaaatgcctgattgacatttttggaattcttatggaatatgaagtgggagaccccagccaaaaagcacttgatcacaacgcagcaaggaaggatgacagccagtccttggcagacgattctgggaaagaggaggaagatgctgaatgtattgatgacgacgaggaagacgaggaggatgaggaggaagacagcgagaagacagaaagcgatgaaaagagcagcatcgctctgactgccccggacgccgctgcagacccaaaggagaagcccaagcaagccagtaagttcgacaagctgccaataaagatagtcaaaaagaacaacctgtttgttgttgaccgatctgacaagttggggcgtgtgcaggagttcaatagtggccttctgcactggcagctcggcgggggtgacaccaccgagcacattcagactcactttgagagcaagatggaaattcctcctcgcaggcgcccacctccccccttaagctccgcaggtagaaagaaagagcaagaaggcaaaggcgactctgaagagcagcaagagaaaagcatcatagcaaccatcgatgacgtcctctctgctcggccaggggcattgcctgaagacgcaaaccctgggccccagaccgaaagcagtaagtttccctttggtatccagcaagccaaaagtcaccggaacatcaagctgctggaggacgagcccaggagccgagacgagactcctctgtgtaccatcgcgcactggcaggactcgctggctaagcgatgcatctgtgtgtccaatattgtccgtagcttgtcattcgtgcctggcaatgatgccgaaatgtccaaacatccaggcctggtgctgatcctggggaagctgattcttcttcaccacgagcatccagagagaaagcgagcaccgcagacctatgagaaagaggaggatgaggacaagggggtggcctgcagcaaagatgagtggtggtgggactgcctcgaggtcttgagggataacacgttggtcacgttggccaacatttccgggcagctagacttgtctgcttacacggaaagcatctgcttgccaattttggatggcttgctgcactggatggtgtgcccgtctgcagaggcacaagatccctttccaactgtgggacccaactcggtcctgtcgcctcagagacttgtgctggagaccctctgtaaactcagtatccaggacaataatgtggacctgatcttggccactcctccatttagtcgtcaggagaaattctatgctacattagttaggtacgttggggatcgcaaaaacccagtctgtcgagaaatgtccatggcgcttttatcgaaccttgcccaaggggacgcactagcagcaagggccatagctgtgcagaaaggaagcattggaaacttgataagcttcctagaggatggggtcacgatggcccagtaccagcagagccagcacaacctcatgcacatgcagcccccgcccctggaaccacctagcgtagacatgatgtgcagggcggccaaggctttgctagccatggccagagtggacgaaaaccgctcggaattccttttgcacgagggccggttgctggatatctcgatatcagctgtcctgaactctctggttgcatctgtcatctgtgatgtactgtttcagattgggcagttatgacataagtgagaaggcaagcatgtgtgagtgaagattagagggtcacatataactggctgttttctgttcttgtttatccagcgtaggaagaaggaaaagaaaatctttgctcctctgccccattcactatttaccaattgggaattaaagaaataattaatttgaacagttatgaaattaatatttgctgtctgtgtgtataagtacatcctttggggttttttttttctcttttttttaaccaaagttgctgtctagtgcattcaaaggtcactttttgttcttcacagatctttttaatgttctttcccatgttgtattgcattttgggggaagcaaattgactttaaagaaaaaagttgtggcaaaagatgctaagatgcgaaaatttcaccacactgagtcaaaaaggtgaaaaattatccatttcctatgcgttttactcctcagagaatgaaaaaaactgcatcccatcacccaaagttctgtgcaatagaaatttctacagatacaggtataggggctcaaggaggtatgtcggtcagtagtcaaaactatgaaatgatactggtttctccacaggaatatggttccattaggctgggagcaaaaacaatgttttttaagattgagaatacatacctgacaacgatccggaaactgctcctcaccactcccgtcatgcctgctgtcggcgtttgaccttccacgtgacagttcttcacaattcctttcatcattttttaaatattttttttactgcctatgggctgtgatgtatatagaagttgtacattaaacataccctcatttttttcttttcttttttttttttttttttagtacaaagttttagtttctttttcatgatgtggtaactacgaagtgatggtagatttaaataattttttatttttattttatatattttttcattagggccatatctccaaaaaaagaaagaaaaaatacaaaaaacaaaaacaaaaaaaaaagagggtaatgtacaagtttctgtatgtataaagtcatgctcgatttcaggagagcagctgatcacaatttgcttcatgaatcaaggtgtggaaatggttatatatggattgatttagaaaatggttaccagtacagtcaaaaaagagaaaatgaaaaaaatacaactaaaaggaagaaacacaacttcaaagatttttcagtgatgagaatccacatttgtatttcaagataatgtagtttaaaaaaaaaaaaaagaaaaaaacttgatgtaaattcctccttttcctctggcttaatgaatatcatttattcagtataaaatctttatatgttccacatgttaagaataaatgtacattaaatctt

SEQ ID NO: 297453 - DNA, 6803 bp, Homo sapiens
ggcggccgcgcaacaaaggagtcacccggcgatgagccccggcacccccggaccgaccatgggcagatcccagggcagcccaatggatccaatggtgatgaagagacctcagttgtatggcatgggcagtaaccctcattctcagcctcagcagagcagtccgtacccaggaggttcctatggccctccaggcccacagcggtatccaattggcatccagggtcggactcccggggccatggccggaatgcagtaccctcagcagcaggactctggagatgccacatggaaagaaacattctggttgatgccacctcagtatggacagcaaggtgtgagtggttactgccagcagggccaacagccatattacagccagcagccgcagcccccgcacctcccaccccaggcgcagtatctgccgtcccagtcccagcagaggtaccagccgcagcaggacatgtctcaggaaggctatggaactagatctcaacctcctctggcccccggaaaacctaaccatgaagacttgaacttaatacagcaagaaagaccatcaagtttaccagatctgtctggctccattgatgacctccccacgggaacggaagcaactttgagctcagcagtcagtgcatccgggtccacgagcagccaaggggatcagagcaacccggcgcagtcgcctttctccccacatgcgtcccctcatctctccagcatcccggggggcccatctccctctcctgttggctctcctgtaggaagcaaccagtctcgatctggcccaatctctcctgcaagtatcccaggtagtcagatgcctccgcagccacccgggagccagtcagaatccagttcccatcccgccttgagccagtcaccaatgccacaggaaagaggttttatggcaggcacacaaagaaaccctcagatggctcagtatggacctcaacagacaggaccatccatgtcgcctcatccttctcctgggggccagatgcatgctggaatcagtagctttcagcagagtaactcaagtgggacttacggtccacagatgagccagtatggaccacaaggtaactactccagacccccagcgtatagtggggtgcccagtgcaagctacagcggcccagggcccggtatgggtatcagtgccaacaaccagatgcatggacaagggccaagccagccatgtggtgctgtgcccctgggacgaatgccatcagctgggatgcagaacagaccatttcctggaaatatgagcagcatgacccccagttctcctggcatgtctcagcagggagggccaggaatggggccgccaatgccaactgtgaaccgtaaggcacaggaggcagccgcagcagtgatgcaggctgctgcgaactcagcacaaagcaggcaaggcagtttccccggcatgaaccagagtggacttatggcttccagctctccctacagccagcccatgaacaacagctctagcctgatgaacacgcaggcgccgccctacagcatggcgcccgccatggtgaacagctcggcagcatctgtgggtcttgcagatatgatgtctcctggtgaatccaaactgcccctgcctctcaaagcagacggcaaagaagaaggcactccacagcccgagagcaagtcaaaggatagctacagctctcagggtatttctcagcccccaaccccaggcaacctgccagtcccttccccaatgtcccccagctctgctagcatctcctcatttcatggagatgaaagtgatagcattagcagcccaggctggccaaagactccatcaagccctaagtccagctcctccaccactactggggagaagatcacgaaggtgtacgagctggggaatgagccagagagaaagctctgggtcgaccgatacctcaccttcatggaagagagaggctctcctgtctcaagtctgcctgccgtgggcaagaagcccctggacctgttccgactctacgtctgcgtcaaagagatcgggggtttggcccaggttaataaaaacaagaagtggcgtgagctggcaaccaacctaaacgttggcacctcaagcagtgcagcgagctccctgaaaaagcagtatattcagtacctgtttgcctttgagtgcaagatcgaacgtggggaggagcccccgccggaagtcttcagcaccggggacaccaaaaagcagcccaagctccagccgccatctcctggctaactcgggatccttgcaaggcccacagaccccccagtcaactggcagcaattccatggcagaggttccaggtgacctgaagccacctaccccagcctccacccctcacggccagatgactccaatgcaaggtggaagaagcagtacaatcagtgtgcacgacccattctcagatgtgagtgattcatccttcccgaaacggaactccatgactccaaacgccccctaccagcagggcatgagcatgcccgatgtgatgggcaggatgccctatgagcccaacaaggacccctttgggggaatgagaaaagtgcctggaagcagcgagccctttatgacgcaaggacagatgcccaacagcagcatgcaggacatgtacaaccaaagtccctccggagcaatgtctaacctgggcatggggcagcgccagcagtttccctatggagccagttacgaccgaaggcatgaaccttatgggcagcagtatccaggccaaggccctccctcgggacagccgccgtatggagggcaccagcccggcctgtacccacagcagccgaattacaaacgccatatggacggcatgtacgggcccccagccaagcgccacgagggcgacatgtacaacatgcagtacagcagccagcagcaggagatgtacaaccagtatggaggctcctactcgggcccggaccgcaggcccatccagggccagtacccgtatccctacagcagggagaggatgcagggcccggggcagatccagacacacggaatcccgcctcagatgatgggcggcccgctgcagtcgtcctccagtgaggggcctcagcagaatatgtgggcagcacgcaatgatatgccttatccctaccagaacaggcagggccctggcggccctacacaggcgcccccttacccaggcatgaaccgcacagacgatatgatggtacccgatcagaggataaatcatgagagccagtggccttctcacgtcagccagcgtcagccttatatgtcgtcctcagcctccatgcagcccatcacacgcccaccacagccgtcctaccagacgccaccgtcactgccaaatcacatctccagggcgcccagcccagcgtccttccagcgctccctggagaaccgcatgtctccaagcaagtctccttttctgccgtctatgaagatgcagaaggtcatgcccacggtccccacatcccaggtcaccgggccaccaccccaaccacccccaatcagaagggagatcacctttcctcctggctcagtagaagcatcacaaccagtcttgaaacaaaggcgaaagattacctccaaagatatcgttactcctgaggcgtggcgtgtgatgatgtcccttaaatcaggtcttttggctgagagtacgtgggctttggacactattaatattcttctgtatgatgacagcactgttgctactttcaatctctcccagttgtctggatttctcgaacttttagtcgagtactttagaaaatgcctgattgacatttttggaattcttatggaatatgaagtgggagaccccagccaaaaagcacttgatcacaacgcagcaaggaaggatgacagccagtccttggcagacgattctgggaaagaggaggaagatgctgaatgtattgatgacgacgaggaagacgaggaggatgaggaggaagacagcgagaagacagaaagcgatgaaaagagcagcatcgctctgactgccccggacgccgctgcagacccaaaggagaagcccaagcaagccagtaagttcgacaagctgccaataaagatagtcaaaaagaacaacctgtttgttgttgaccgatctgacaagttggggcgtgtgcaggagttcaatagtggccttctgcactggcagctcggcgggggtgacaccaccgagcacattcagactcactttgagagcaagatggaaattcctcctcgcaggcgcccacctccccccttaagctccgcaggtagaaagaaagagcaagaaggcaaaggcgactctgaagagcagcaagagaaaagcatcatagcaaccatcgatgacgtcctctctgctcggccaggggcattgcctgaagacgcaaaccctgggccccagaccgaaagcagtaagtttccctttggtatccagcaagccaaaagtcaccggaacatcaagctgctggaggacgagcccaggagccgagacgagactcctctgtgtaccatcgcgcactggcaggactcgctggctaagcgatgcatctgtgtgtccaatattgtccgtagcttgtcattcgtgcctggcaatgatgccgaaatgtccaaacatccaggcctggtgctgatcctggggaagctgattcttcttcaccacgagcatccagagagaaagcgagcaccgcagacctatgagaaagaggaggatgaggacaagggggtggcctgcagcaaagatgagtggtggtgggactgcctcgaggtcttgagggataacacgttggtcacgttggccaacatttccgggcagctagacttgtctgcttacacggaaagcatctgcttgccaattttggatggcttgctgcactggatggtgtgcccgtctgcagaggcacaagatccctttccaactgtgggacccaactcggtcctgtcgcctcagagacttgtgctggagaccctctgtaaactcagtatccaggacaataatgtggacctgatcttggccactcctccatttagtcgtcaggagaaattctatgctacattagttaggtacgttggggatcgcaaaaacccagtctgtcgagaaatgtccatggcgcttttatcgaaccttgcccaaggggacgcactagcagcaagggccatagctgtgcagaaaggaagcattggaaacttgataagcttcctagaggatggggtcacgatggcccagtaccagcagagccagcacaacctcatgcacatgcagcccccgcccctggaaccacctagcgtagacatgatgtgcagggcggccaaggctttgctagccatggccagagtggacgaaaaccgctcggaattccttttgcacgagggccggttgctggatatctcgatatcagctgtcctgaactctctggttgcatctgtcatctgtgatgtactgtttcagattgggcagttatgacataagtgagaaggcaagcatgtgtgagtgaagattagagggtcacatataactggctgttttctgttcttgtttatccagcgtaggaagaaggaaaagaaaatctttgctcctctgccccattcactatttaccaattgggaattaaagaaataattaatttgaacagttatgaaattaatatttgctgtctgtgtgtataagtacatcctttggggttttttttttctcttttttttaaccaaagttgctgtctagtgcattcaaaggtcactttttgttcttcacagatctttttaatgttctttcccatgttgtattgcattttgggggaagcaaattgactttaaagaaaaaagttgtggcaaaagatgctaagatgcgaaaatttcaccacactgagtcaaaaaggtgaaaaattatccatttcctatgcgttttactcctcagagaatgaaaaaaactgcatcccatcacccaaagttctgtgcaatagaaatttctacagatacaggtataggggctcaaggaggtatgtcggtcagtagtcaaaactatgaaatgatactggtttctccacaggaatatggttccattaggctgggagcaaaaacaatgttttttaagattgagaatacatacctgacaacgatccggaaactgctcctcaccactcccgtcatgcctgctgtcggcgtttgaccttccacgtgacagttcttcacaattcctttcatcattttttaaatattttttttactgcctatgggctgtgatgtatatagaagttgtacattaaacataccctcatttttttcttttcttttttttttttttttttagtacaaagttttagtttctttttcatgatgtggtaactacgaagtgatggtagatttaaataattttttatttttattttatatattttttcattagggccatatctccaaaaaaagaaagaaaaaatacaaaaaacaaaaacaaaaaaaaaagagggtaatgtacaagtttctgtatgtataaagtcatgctcgatttcaggagagcagctgatcacaatttgcttcatgaatcaaggtgtggaaatggttatatatggattgatttagaaaatggttaccagtacagtcaaaaaagagaaaatgaaaaaaatacaactaaaaggaagaaacacaacttcaaagatttttcagtgatgagaatccacatttgtatttcaagataatgtagtttaaaaaaaaaaaaaagaaaaaaacttgatgtaaattcctccttttcctctggcttaatgaatatcatttattcagtataaaatctttatatgttccacatgttaagaataaatgtacattaaatctt

SEQ ID NO: 297454 - DNA, 6387 bp, Homo sapiens
cattgagatatttatgaatgcttgtgtttgtttttttttaggacatgtctcaggaaggctatggaactagatctcaacctcctctggcccccggaaaacctaaccatgaagacttgaacttaatacagcaagaaagaccatcaagtttaccagatctgtctggctccattgatgacctccccacgggaacggaagcaactttgagctcagcagtcagtgcatccgggtccacgagcagccaaggggatcagagcaacccggcgcagtcgcctttctccccacatgcgtcccctcatctctccagcatcccggggggcccatctccctctcctgttggctctcctgtaggaagcaaccagtctcgatctggcccaatctctcctgcaagtatcccaggtagtcagatgcctccgcagccacccgggagccagtcagaatccagttcccatcccgccttgagccagtcaccaatgccacaggaaagaggttttatggcaggcacacaaagaaaccctcagatggctcagtatggacctcaacagacaggaccatccatgtcgcctcatccttctcctgggggccagatgcatgctggaatcagtagctttcagcagagtaactcaagtgggacttacggtccacagatgagccagtatggaccacaaggtaactactccagacccccagcgtatagtggggtgcccagtgcaagctacagcggcccagggcccggtatgggtatcagtgccaacaaccagatgcatggacaagggccaagccagccatgtggtgctgtgcccctgggacgaatgccatcagctgggatgcagaacagaccatttcctggaaatatgagcagcatgacccccagttctcctggcatgtctcagcagggagggccaggaatggggccgccaatgccaactgtgaaccgtaaggcacaggaggcagccgcagcagtgatgcaggctgctgcgaactcagcacaaagcaggcaaggcagtttccccggcatgaaccagagtggacttatggcttccagctctccctacagccagcccatgaacaacagctctagcctgatgaacacgcaggcgccgccctacagcatggcgcccgccatggtgaacagctcggcagcatctgtgggtcttgcagatatgatgtctcctggtgaatccaaactgcccctgcctctcaaagcagacggcaaagaagaaggcactccacagcccgagagcaagtcaaaggatagctacagctctcagggtatttctcagcccccaaccccaggcaacctgccagtcccttccccaatgtcccccagctctgctagcatctcctcatttcatggagatgaaagtgatagcattagcagcccaggctggccaaagactccatcaagccctaagtccagctcctccaccactactggggagaagatcacgaaggtgtacgagctggggaatgagccagagagaaagctctgggtcgaccgatacctcaccttcatggaagagagaggctctcctgtctcaagtctgcctgccgtgggcaagaagcccctggacctgttccgactctacgtctgcgtcaaagagatcgggggtttggcccaggttaataaaaacaagaagtggcgtgagctggcaaccaacctaaacgttggcacctcaagcagtgcagcgagctccctgaaaaagcagtatattcagtacctgtttgcctttgagtgcaagatcgaacgtggggaggagcccccgccggaagtcttcagcaccggggacaccaaaaagcagcccaagctccagccgccatctcctggctaactcgggatccttgcaaggcccacagaccccccagtcaactggcagcaattccatggcagaggttccaggtgacctgaagccacctaccccagcctccacccctcacggccagatgactccaatgcaaggtggaagaagcagtacaatcagtgtgcacgacccattctcagatgtgagtgattcatccttcccgaaacggaactccatgactccaaacgccccctaccagcagggcatgagcatgcccgatgtgatgggcaggatgccctatgagcccaacaaggacccctttgggggaatgagaaaagtgcctggaagcagcgagccctttatgacgcaaggacagatgcccaacagcagcatgcaggacatgtacaaccaaagtccctccggagcaatgtctaacctgggcatggggcagcgccagcagtttccctatggagccagttacgaccgaaggcatgaaccttatgggcagcagtatccaggccaaggccctccctcgggacagccgccgtatggagggcaccagcccggcctgtacccacagcagccgaattacaaacgccatatggacggcatgtacgggcccccagccaagcgccacgagggcgacatgtacaacatgcagtacagcagccagcagcaggagatgtacaaccagtatggaggctcctactcgggcccggaccgcaggcccatccagggccagtacccgtatccctacagcagggagaggatgcagggcccggggcagatccagacacacggaatcccgcctcagatgatgggcggcccgctgcagtcgtcctccagtgaggggcctcagcagaatatgtgggcagcacgcaatgatatgccttatccctaccagaacaggcagggccctggcggccctacacaggcgcccccttacccaggcatgaaccgcacagacgatatgatggtacccgatcagaggataaatcatgagagccagtggccttctcacgtcagccagcgtcagccttatatgtcgtcctcagcctccatgcagcccatcacacgcccaccacagccgtcctaccagacgccaccgtcactgccaaatcacatctccagggcgcccagcccagcgtccttccagcgctccctggagaaccgcatgtctccaagcaagtctccttttctgccgtctatgaagatgcagaaggtcatgcccacggtccccacatcccaggtcaccgggccaccaccccaaccacccccaatcagaagggagatcacctttcctcctggctcagtagaagcatcacaaccagtcttgaaacaaaggcgaaagattacctccaaagatatcgttactcctgaggcgtggcgtgtgatgatgtcccttaaatcaggtcttttggctgagagtacgtgggctttggacactattaatattcttctgtatgatgacagcactgttgctactttcaatctctcccagttgtctggatttctcgaacttttagtcgagtactttagaaaatgcctgattgacatttttggaattcttatggaatatgaagtgggagaccccagccaaaaagcacttgatcacaacgcagcaaggaaggatgacagccagtccttggcagacgattctgggaaagaggaggaagatgctgaatgtattgatgacgacgaggaagacgaggaggatgaggaggaagacagcgagaagacagaaagcgatgaaaagagcagcatcgctctgactgccccggacgccgctgcagacccaaaggagaagcccaagcaagccagtaagttcgacaagctgccaataaagatagtcaaaaagaacaacctgtttgttgttgaccgatctgacaagttggggcgtgtgcaggagttcaatagtggccttctgcactggcagctcggcgggggtgacaccaccgagcacattcagactcactttgagagcaagatggaaattcctcctcgcaggcgcccacctccccccttaagctccgcaggtagaaagaaagagcaagaaggcaaaggcgactctgaagagcagcaagagaaaagcatcatagcaaccatcgatgacgtcctctctgctcggccaggggcattgcctgaagacgcaaaccctgggccccagaccgaaagcagtaagtttccctttggtatccagcaagccaaaagtcaccggaacatcaagctgctggaggacgagcccaggagccgagacgagactcctctgtgtaccatcgcgcactggcaggactcgctggctaagcgatgcatctgtgtgtccaatattgtccgtagcttgtcattcgtgcctggcaatgatgccgaaatgtccaaacatccaggcctggtgctgatcctggggaagctgattcttcttcaccacgagcatccagagagaaagcgagcaccgcagacctatgagaaagaggaggatgaggacaagggggtggcctgcagcaaagatgagtggtggtgggactgcctcgaggtcttgagggataacacgttggtcacgttggccaacatttccgggcagctagacttgtctgcttacacggaaagcatctgcttgccaattttggatggcttgctgcactggatggtgtgcccgtctgcagaggcacaagatccctttccaactgtgggacccaactcggtcctgtcgcctcagagacttgtgctggagaccctctgtaaactcagtatccaggacaataatgtggacctgatcttggccactcctccatttagtcgtcaggagaaattctatgctacattagttaggtacgttggggatcgcaaaaacccagtctgtcgagaaatgtccatggcgcttttatcgaaccttgcccaaggggacgcactagcagcaagggccatagctgtgcagaaaggaagcattggaaacttgataagcttcctagaggatggggtcacgatggcccagtaccagcagagccagcacaacctcatgcacatgcagcccccgcccctggaaccacctagcgtagacatgatgtgcagggcggccaaggctttgctagccatggccagagtggacgaaaaccgctcggaattccttttgcacgagggccggttgctggatatctcgatatcagctgtcctgaactctctggttgcatctgtcatctgtgatgtactgtttcagattgggcagttatgacataagtgagaaggcaagcatgtgtgagtgaagattagagggtcacatataactggctgttttctgttcttgtttatccagcgtaggaagaaggaaaagaaaatctttgctcctctgccccattcactatttaccaattgggaattaaagaaataattaatttgaacagttatgaaattaatatttgctgtctgtgtgtataagtacatcctttggggttttttttttctcttttttttaaccaaagttgctgtctagtgcattcaaaggtcactttttgttcttcacagatctttttaatgttctttcccatgttgtattgcattttgggggaagcaaattgactttaaagaaaaaagttgtggcaaaagatgctaagatgcgaaaatttcaccacactgagtcaaaaaggtgaaaaattatccatttcctatgcgttttactcctcagagaatgaaaaaaactgcatcccatcacccaaagttctgtgcaatagaaatttctacagatacaggtataggggctcaaggaggtatgtcggtcagtagtcaaaactatgaaatgatactggtttctccacaggaatatggttccattaggctgggagcaaaaacaatgttttttaagattgagaatacatacctgacaacgatccggaaactgctcctcaccactcccgtcatgcctgctgtcggcgtttgaccttccacgtgacagttcttcacaattcctttcatcattttttaaatattttttttactgcctatgggctgtgatgtatatagaagttgtacattaaacataccctcatttttttcttttcttttttttttttttttttagtacaaagttttagtttctttttcatgatgtggtaactacgaagtgatggtagatttaaataattttttatttttattttatatattttttcattagggccatatctccaaaaaaagaaagaaaaaatacaaaaaacaaaaacaaaaaaaaaagagggtaatgtacaagtttctgtatgtataaagtcatgctcgatttcaggagagcagctgatcacaatttgcttcatgaatcaaggtgtggaaatggttatatatggattgatttagaaaatggttaccagtacagtcaaaaaagagaaaatgaaaaaaatacaactaaaaggaagaaacacaacttcaaagatttttcagtgatgagaatccacatttgtatttcaagataatgtagtttaaaaaaaaaaaaaagaaaaaaacttgatgtaaattcctccttttcctctggcttaatgaatatcatttattcagtataaaatctttatatgttccacatgttaagaataaatgtacattaaatctt

SEQ ID NO: 297455 - DNA, 8402 bp, Homo sapiens
ggcggccgcgcaacaaaggagtcacccggcgatgagccccggcacccccggaccgaccatgggcagatcccagggcagcccaatggatccaatggtgatgaagagacctcagttgtatggcatgggcagtaaccctcattctcagcctcagcagagcagtccgtacccaggaggttcctatggccctccaggcccacagcggtatccaattggcatccagggtcggactcccggggccatggccggaatgcagtaccctcagcagcagatgccacctcagtatggacagcaaggtgtgagtggttactgccagcagggccaacagccatattacagccagcagccgcagcccccgcacctcccaccccaggcgcagtatctgccgtcccagtcccagcagaggtaccagccgcagcaggacatgtctcaggaaggctatggaactagatctcaacctcctctggcccccggaaaacctaaccatgaagacttgaacttaatacagcaagaaagaccatcaagtttaccagatctgtctggctccattgatgacctccccacgggaacggaagcaactttgagctcagcagtcagtgcatccgggtccacgagcagccaaggggatcagagcaacccggcgcagtcgcctttctccccacatgcgtcccctcatctctccagcatcccggggggcccatctccctctcctgttggctctcctgtaggaagcaaccagtctcgatctggcccaatctctcctgcaagtatcccaggtagtcagatgcctccgcagccacccgggagccagtcagaatccagttcccatcccgccttgagccagtcaccaatgccacaggaaagaggttttatggcaggcacacaaagaaaccctcagatggctcagtatggacctcaacagacaggaccatccatgtcgcctcatccttctcctgggggccagatgcatgctggaatcagtagctttcagcagagtaactcaagtgggacttacggtccacagatgagccagtatggaccacaaggtaactactccagacccccagcgtatagtggggtgcccagtgcaagctacagcggcccagggcccggtatgggtatcagtgccaacaaccagatgcatggacaagggccaagccagccatgtggtgctgtgcccctgggacgaatgccatcagctgggatgcagaacagaccatttcctggaaatatgagcagcatgacccccagttctcctggcatgtctcagcagggagggccaggaatggggccgccaatgccaactgtgaaccgtaaggcacaggaggcagccgcagcagtgatgcaggctgctgcgaactcagcacaaagcaggccaccatacattaggtcgcctgcttatcccagccagtctggggctggcggacgccccatgttttcttcccagcaccccaactatggcaactctcaggctcccatggtgcaccagcctgaccagtacgggcaaggcagtttccccggcatgaaccagagtggacttatggcttccagctctccctacagccagcccatgaacaacagctctagcctgatgaacacgcaggcgccgccctacagcatggcgcccgccatggtgaacagctcggcagcatctgtgggtcttgcagatatgatgtctcctggtgaatccaaactgcccctgcctctcaaagcagacggcaaagaagaaggcactccacagcccgagagcaagtcaaaggatagctacagctctcagggtatttctcagcccccaaccccaggcaacctgccagtcccttccccaatgtcccccagctctgctagcatctcctcatttcatggagatgaaagtgatagcattagcagcccaggctggccaaagactccatcaagccctaagtccagctcctccaccactactggggagaagatcacgaaggtgtacgagctggggaatgagccagagagaaagctctgggtcgaccgatacctcaccttcatggaagagagaggctctcctgtctcaagtctgcctgccgtgggcaagaagcccctggacctgttccgactctacgtctgcgtcaaagagatcgggggtttggcccaggttaataaaaacaagaagtggcgtgagctggcaaccaacctaaacgttggcacctcaagcagtgcagcgagctccctgaaaaagcagtatattcagtacctgtttgcctttgagtgcaagatcgaacgtggggaggagcccccgccggaagtcttcagcaccggggacaccaaaaagcagcccaagctccagccgccatctcctggctaactcgggatccttgcaaggcccacagaccccccagtcaactggcagcaattccatggcagaggttccaggtgacctgaagccacctaccccagcctccacccctcacggccagatgactccaatgcaaggtggaagaagcagtacaatcagtgtgcacgacccattctcagatgtgagtgattcatccttcccgaaacggaactccatgactccaaacgccccctaccagcagggcatgagcatgcccgatgtgatgggcaggatgccctatgagcccaacaaggacccctttgggggaatgagaaaagtgcctggaagcagcgagccctttatgacgcaaggacagatgcccaacagcagcatgcaggacatgtacaaccaaagtccctccggagcaatgtctaacctgggcatggggcagcgccagcagtttccctatggagccagttacgaccgaaggcatgaaccttatgggcagcagtatccaggccaaggccctccctcgggacagccgccgtatggagggcaccagcccggcctgtacccacagcagccgaattacaaacgccatatggacggcatgtacgggcccccagccaagcgccacgagggcgacatgtacaacatgcagtacagcagccagcagcaggagatgtacaaccagtatggaggctcctactcgggcccggaccgcaggcccatccagggccagtacccgtatccctacagcagggagaggatgcagggcccggggcagatccagacacacggaatcccgcctcagatgatgggcggcccgctgcagtcgtcctccagtgaggggcctcagcagaatatgtgggcagcacgcaatgatatgccttatccctaccagaacaggcagggccctggcggccctacacaggcgcccccttacccaggcatgaaccgcacagacgatatgatggtacccgatcagaggataaatcatgagagccagtggccttctcacgtcagccagcgtcagccttatatgtcgtcctcagcctccatgcagcccatcacacgcccaccacagccgtcctaccagacgccaccgtcactgccaaatcacatctccagggcgcccagcccagcgtccttccagcgctccctggagaaccgcatgtctccaagcaagtctccttttctgccgtctatgaagatgcagaaggtcatgcccacggtccccacatcccaggtcaccgggccaccaccccaaccacccccaatcagaagggagatcacctttcctcctggctcagtagaagcatcacaaccagtcttgaaacaaaggcgaaagattacctccaaagatatcgttactcctgaggcgtggcgtgtgatgatgtcccttaaatcaggtcttttggctgagagtacgtgggctttggacactattaatattcttctgtatgatgacagcactgttgctactttcaatctctcccagttgtctggatttctcgaacttttagtcgagtactttagaaaatgcctgattgacatttttggaattcttatggaatatgaagtgggagaccccagccaaaaagcacttgatcacaacgcagcaaggaaggatgacagccagtccttggcagacgattctgggaaagaggaggaagatgctgaatgtattgatgacgacgaggaagacgaggaggatgaggaggaagacagcgagaagacagaaagcgatgaaaagagcagcatcgctctgactgccccggacgccgctgcagacccaaaggagaagcccaagcaagccagtaagttcgacaagctgccaataaagatagtcaaaaagaacaacctgtttgttgttgaccgatctgacaagttggggcgtgtgcaggagttcaatagtggccttctgcactggcagctcggcgggggtgacaccaccgagcacattcagactcactttgagagcaagatggaaattcctcctcgcaggcgcccacctccccccttaagctccgcaggtagaaagaaagagcaagaaggcaaaggcgactctgaagagcagcaagagaaaagcatcatagcaaccatcgatgacgtcctctctgctcggccaggggcattgcctgaagacgcaaaccctgggccccagaccgaaagcagtaagtttccctttggtatccagcaagccaaaagtcaccggaacatcaagctgctggaggacgagcccaggagccgagacgagactcctctgtgtaccatcgcgcactggcaggactcgctggctaagcgatgcatctgtgtgtccaatattgtccgtagcttgtcattcgtgcctggcaatgatgccgaaatgtccaaacatccaggcctggtgctgatcctggggaagctgattcttcttcaccacgagcatccagagagaaagcgagcaccgcagacctatgagaaagaggaggatgaggacaagggggtggcctgcagcaaagatgagtggtggtgggactgcctcgaggtcttgagggataacacgttggtcacgttggccaacatttccgggcagctagacttgtctgcttacacggaaagcatctgcttgccaattttggatggcttgctgcactggatggtgtgcccgtctgcagaggcacaagatccctttccaactgtgggacccaactcggtcctgtcgcctcagagacttgtgctggagaccctctgtaaactcagtatccaggacaataatgtggacctgatcttggccactcctccatttagtcgtcaggagaaattctatgctacattagttaggtacgttggggatcgcaaaaacccagtctgtcgagaaatgtccatggcgcttttatcgaaccttgcccaaggggacgcactagcagcaagggccatagctgtgcagaaaggaagcattggaaacttgataagcttcctagaggatggggtcacgatggcccagtaccagcagagccagcacaacctcatgcacatgcagcccccgcccctggaaccacctagcgtagacatgatgtgcagggcggccaaggctttgctagccatggccagagtggacgaaaaccgctcggaattccttttgcacgagggccggttgctggatatctcgatatcagctgtcctgaactctctggttgcatctgtcatctgtgatgtactgtttcagattgggcagttatgacataagtgagaaggcaagcatgtgtgagtgaagattagagggtcacatataactggctgttttctgttcttgtttatccagcgtaggaagaaggaaaagaaaatctttgctcctctgccccattcactatttaccaattgggaattaaagaaataattaatttgaacagttatgaaattaatatttgctgtctgtgtgtataagtacatcctttggggttttttttttctcttttttttaaccaaagttgctgtctagtgcattcaaaggtcactttttgttcttcacagatctttttaatgttctttcccatgttgtattgcattttgggggaagcaaattgactttaaagaaaaaagttgtggcaaaagatgctaagatgcgaaaatttcaccacactgagtcaaaaaggtgaaaaattatccatttcctatgcgttttactcctcagagaatgaaaaaaactgcatcccatcacccaaagttctgtgcaatagaaatttctacagatacaggtataggggctcaaggaggtatgtcggtcagtagtcaaaactatgaaatgatactggtttctccacaggaatatggttccattaggctgggagcaaaaacaatgttttttaagattgagaatacatacctgacaacgatccggaaactgctcctcaccactcccgtcatgcctgctgtcggcgtttgaccttccacgtgacagttcttcacaattcctttcatcattttttaaatattttttttactgcctatgggctgtgatgtatatagaagttgtacattaaacataccctcatttttttcttttcttttttttttttttttttagtacaaagttttagtttctttttcatgatgtggtaactacgaagtgatggtagatttaaataattttttatttttattttatatattttttcattagggccatatctccaaaaaaagaaagaaaaaatacaaaaaacaaaaacaaaaaaaaaagagggtaatgtacaagtttctgtatgtataaagtcatgctcgatttcaggagagcagctgatcacaatttgcttcatgaatcaaggtgtggaaatggttatatatggattgatttagaaaatggttaccagtacagtcaaaaaagagaaaatgaaaaaaatacaactaaaaggaagaaacacaacttcaaagatttttcagtgatgagaatccacatttgtatttcaagataatgtagtttaaaaaaaaaaaaaagaaaaaaacttgatgtaaattcctccttttcctctggcttaatgaatatcatttattcagtataaaatctttatatgttccacatgttaagaataaatgtacattaaatctttgttaagcactgtgatgggtgttcttgaatactgttctagtttccttaaagtggtttcctagtaatcaagttatttacaagaaataggggaatgcagcagtgtattcacattataaaaccctacatttggaagagacctttaggggttacctactttagagtggggagcaacagtttgattttctcaaattacttagctaattagtctttctttgaagcaattaactctaacgacattgaggtatgatcattttcagtatttatgggaggtggctgctgacccacttgaggtgagatctcagaagcttaactggcctgaaaatgtaacattctgccttttactaactccatcttagtttaatcaaagttcaatctattccttgtttcttctgtgtgcctcagagttattttgcatttagtttactccaccgtgtataatatttatactgtgcaatgttaaaaaagaatctgttatattgtatgtggtgtacatagtgcaaagtgatgatttctatttcagggcatattatggttctcatattccttcctacctggtgcacagtagctttttaatactagtcacttctaatttaaactttctcttcctgggtcattgactgttactgtgtaataatcgatttctttgaaactgctgcataattatgctgttagtggacctctacctcttctcttccctctcccaatcacagtatactcagaatccccagcccctcgcatacattgtgtcggttcacattactcacagtaatatatggaagagttagacaagaacatgcagttacagtcattgtgagacgtgactctccagtgtcacgaggaaaaaaatcatcttttctgcaaacagtctctcatctgtcaactcccacattactgagtcaaacagtcttcttacataacaatgcaaccaaatatatgttgaattaaagacccatttataattctgctttaaatacatctgcttgctaagaacagatttcagtgctccaagcttcaaatatggagatttgtaagagggaattcaatattattctaatttctctcttacagagtacaaataaaaggtgtatacaaactccgaacatatccagtattccaattcctttgtcaatcagaagagtaaaataattaacaaaagactgttgttatggtttgcattgtaaccgatacgcagagtctgaccgttgggcaacaagtttttctatcctgatgcgcaacacagtctctagagactaatccaggaagactttagcctcctttccatattctcacccccgaatcaagatttacagaagcccacgaagaatttacagcctgcttgagatcatcttgcctataaactgagttattgctttgtcctaaaaattagtcggtttttttttttctatgaggcttttcagaaatttacaggatgcccagactttacatgtgtaccaaaaaaaaaaaaaagataaaaaataaaggtgcaaagaaagtttagtattttggaat

SEQ ID NO: 297456 - DNA, 7305 bp, Homo sapiens
ggcggccgcgcaacaaaggagtcacccggcgatgagccccggcacccccggaccgaccatgggcagatcccagggcagcccaatggatccaatggtgatgaagagacctcagttgtatggcatgggcagtaaccctcattctcagcctcagcagagcagtccgtacccaggaggttcctatggccctccaggcccacagcggtatccaattggcatccagggtcggactcccggggccatggccggaatgcagtaccctcagcagcagatgccacctcagtatggacagcaaggtgtgagtggttactgccagcagggccaacagccatattacagccagcagccgcagcccccgcacctcccaccccaggcgcagtatctgccgtcccagtcccagcagaggtaccagccgcagcaggacatgtctcaggaaggctatggaactagatctcaacctcctctggcccccggaaaacctaaccatgaagacttgaacttaatacagcaagaaagaccatcaagtttaccagatctgtctggctccattgatgacctccccacgggaacggaagcaactttgagctcagcagtcagtgcatccgggtccacgagcagccaaggggatcagagcaacccggcgcagtcgcctttctccccacatgcgtcccctcatctctccagcatcccggggggcccatctccctctcctgttggctctcctgtaggaagcaaccagtctcgatctggcccaatctctcctgcaagtatcccaggtagtcagatgcctccgcagccacccgggagccagtcagaatccagttcccatcccgccttgagccagtcaccaatgccacaggaaagaggttttatggcaggcacacaaagaaaccctcagatggctcagtatggacctcaacagacaggaccatccatgtcgcctcatccttctcctgggggccagatgcatgctggaatcagtagctttcagcagagtaactcaagtgggacttacggtccacagatgagccagtatggaccacaaggtaactactccagacccccagcgtatagtggggtgcccagtgcaagctacagcggcccagggcccggtatgggtatcagtgccaacaaccagatgcatggacaagggccaagccagccatgtggtgctgtgcccctgggacgaatgccatcagctgggatgcagaacagaccatttcctggaaatatgagcagcatgacccccagttctcctggcatgtctcagcagggagggccaggaatggggccgccaatgccaactgtgaaccgtaaggcacaggaggcagccgcagcagtgatgcaggctgctgcgaactcagcacaaagcaggccaccatacattaggtcgcctgcttatcccagccagtctggggctggcggacgccccatgttttcttcccagcaccccaactatggcaactctcaggctcccatggtgcaccagcctgaccagtacgggcaaggcagtttccccggcatgaaccagagtggacttatggcttccagctctccctacagccagcccatgaacaacagctctagcctgatgaacacgcaggcgccgccctacagcatggcgcccgccatggtgaacagctcggcagcatctgtgggtcttgcagatatgatgtctcctggtgaatccaaactgcccctgcctctcaaagcagacggcaaagaagaaggcactccacagcccgagagcaagtcaaaggatagctacagctctcagggtatttctcagcccccaaccccaggcaacctgccagtcccttccccaatgtcccccagctctgctagcatctcctcatttcatggagatgaaagtgatagcattagcagcccaggctggccaaagactccatcaagccctaagtccagctcctccaccactactggggagaagatcacgaaggtgtacgagctggggaatgagccagagagaaagctctgggtcgaccgatacctcaccttcatggaagagagaggctctcctgtctcaagtctgcctgccgtgggcaagaagcccctggacctgttccgactctacgtctgcgtcaaagagatcgggggtttggcccaggttaataaaaacaagaagtggcgtgagctggcaaccaacctaaacgttggcacctcaagcagtgcagcgagctccctgaaaaagcagtatattcagtacctgtttgcctttgagtgcaagatcgaacgtggggaggagcccccgccggaagtcttcagcaccggggacaccaaaaagcagcccaagctccagccgccatctcctggctaactcgggatccttgcaaggcccacagaccccccagtcaactggcagcaattccatggcagaggttccaggtgacctgaagccacctaccccagcctccacccctcacggccagatgactccaatgcaaggtggaagaagcagtacaatcagtgtgcacgacccattctcagatgtgagtgattcatccttcccgaaacggaactccatgactccaaacgccccctaccagcagggcatgagcatgcccgatgtgatgggcaggatgccctatgagcccaacaaggacccctttgggggaatgagaaaagtgcctggaagcagcgagccctttatgacgcaaggacagatgcccaacagcagcatgcaggacatgtacaaccaaagtccctccggagcaatgtctaacctgggcatggggcagcgccagcagtttccctatggagccagttacgaccgaaggcatgaaccttatgggcagcagtatccaggccaaggccctccctcgggacagccgccgtatggagggcaccagcccggcctgtacccacagcagccgaattacaaacgccatatggacggcatgtacgggcccccagccaagcgccacgagggcgacatgtacaacatgcagtacagcagccagcagcaggagatgtacaaccagtatggaggctcctactcgggcccggaccgcaggcccatccagggccagtacccgtatccctacagcagggagaggatgcagggcccggggcagatccagacacacggaatcccgcctcagatgatgggcggcccgctgcagtcgtcctccagtgaggggcctcagcagaatatgtgggcagcacgcaatgatatgccttatccctaccagaacaggcagggccctggcggccctacacaggcgcccccttacccaggcatgaaccgcacagacgatatgatggtacccgatcagaggataaatcatgagagccagtggccttctcacgtcagccagcgtcagccttatatgtcgtcctcagcctccatgcagcccatcacacgcccaccacagccgtcctaccagacgccaccgtcactgccaaatcacatctccagggcgcccagcccagcgtccttccagcgctccctggagaaccgcatgtctccaagcaagtctccttttctgccgtctatgaagatgcagaaggtcatgcccacggtccccacatcccaggtcaccgggccaccaccccaaccacccccaatcagaagggagatcacctttcctcctggctcagtagaagcatcacaaccagtcttgaaacaaaggcgaaagattacctccaaagatatcgttactcctgaggcgtggcgtgtgatgatgtcccttaaatcaggtcttttggctgagagtacgtgggctttggacactattaatattcttctgtatgatgacagcactgttgctactttcaatctctcccagttgtctggatttctcgaacttttagtcgagtactttagaaaatgcctgattgacatttttggaattcttatggaatatgaagtgggagaccccagccaaaaagcacttgatcacaacgcagcaaggaaggatgacagccagtccttggcagacgattctgggaaagaggaggaagatgctgaatgtattgatgacgacgaggaagacgaggaggatgaggaggaagacagcgagaagacagaaagcgatgaaaagagcagcatcgctctgactgccccggacgccgctgcagacccaaaggagaagcccaagcaagccagtaagttcgacaagctgccaataaagatagtcaaaaagaacaacctgtttgttgttgaccgatctgacaagttggggcgtgtgcaggagttcaatagtggccttctgcactggcagctcggcgggggtgacaccaccgagcacattcagactcactttgagagcaagatggaaattcctcctcgcaggcgcccacctccccccttaagctccgcaggtagaaagaaagagcaagaaggcaaaggcgactctgaagagcagcaagagaaaagcatcatagcaaccatcgatgacgtcctctctgctcggccaggggcattgcctgaagacgcaaaccctgggccccagaccgaaagcagtaagtttccctttggtatccagcaagccaaaagtcaccggaacatcaagctgctggaggacgagcccaggagccgagacgagactcctctgtgtaccatcgcgcactggcaggactcgctggctaagcgatgcatctgtgtgtccaatattgtccgtagcttgtcattcgtgcctggcaatgatgccgaaatgtccaaacatccaggcctggtgctgatcctggggaagctgattcttcttcaccacgagcatccagagagaaagcgagcaccgcagacctatgagaaagaggaggatgaggacaagggggtggcctgcagcaaagatgagtggtggtgggactgcctcgaggtcttgagggataacacgttggtcacgttggccaacatttccgggcagctagacttgtctgcttacacggaaagcatctgcttgccaattttggatggcttgctgcactggatggtgtgcccgtctgcagaggcacaagatccctttccaactgtgggacccaactcggtcctgtcgcctcagagacttgtgctggagaccctctgtaaactcagtatccaggacaataatgtggacctgatcttggccactcctccatttagtcgtcaggagaaattctatgctacattagttaggtacgttggggatcgcaaaaacccagtctgtcgagaaatgtccatggcgcttttatcgaaccttgcccaaggggacgcactagcagcaagggccatagctgtgcagaaaggaagcattggaaacttgataagcttcctagaggatggggtcacgatggcccagtaccagcagagccagcacaacctcatgcacatgcagcccccgcccctggaaccacctagcgtagacatgatgtgcagggcggccaaggctttgctagccatggccagagtggacgaaaaccgctcggaattccttttgcacgagggccggttgctggatatctcgatatcagctgtcctgaactctctggttgcatctgtcatctgtgatgtactgtttcagattgggcagttatgacataagtgagaaggcaagcatgtgtgagtgaagattagagggtcacatataactggctgttttctgttcttgtttatccagcgtaggaagaaggaaaagaaaatctttgctcctctgccccattcactatttaccaattgggaattaaagaaataattaatttgaacagttatgaaattaatatttgctgtctgtgtgtataagtacatcctttggggttttttttttctcttttttttaaccaaagttgctgtctagtgcattcaaaggtcactttttgttcttcacagatctttttaatgttctttcccatgttgtattgcattttgggggaagcaaattgactttaaagaaaaaagttgtggcaaaagatgctaagatgcgaaaatttcaccacactgagtcaaaaaggtgaaaaattatccatttcctatgcgttttactcctcagagaatgaaaaaaactgcatcccatcacccaaagttctgtgcaatagaaatttctacagatacaggtataggggctcaaggaggtatgtcggtcagtagtcaaaactatgaaatgatactggtttctccacaggaatatggttccattaggctgggagcaaaaacaatgttttttaagattgagaatacatacctgacaacgatccggaaactgctcctcaccactcccgtcatgcctgctgtcggcgtttgaccttccacgtgacagttcttcacaattcctttcatcattttttaaatattttttttactgcctatgggctgtgatgtatatagaagttgtacattaaacataccctcatttttttcttttcttttttttttttttttttagtacaaagttttagtttctttttcatgatgtggtaactacgaagtgatggtagatttaaataattttttatttttattttatatattttttcattagggccatatctccaaaaaaagaaagaaaaaatacaaaaaacaaaaacaaaaaaaaaagagggtaatgtacaagtttctgtatgtataaagtcatgctcgatttcaggagagcagctgatcacaatttgcttcatgaatcaaggtgtggaaatggttatatatggattgatttagaaaatggttaccagtacagtcaaaaaagagaaaatgaaaaaaatacaactaaaaggaagaaacacaacttcaaagatttttcagtgatgagaatccacatttgtatttcaagataatgtagtttaaaaaaaaaaaaaagaaaaaaacttgatgtaaattcctccttttcctctggcttaatgaatatcatttattcagtataaaatctttatatgttccacatgttaagaataaatgtacattaaatcttagaaaaagaaaaaaaaaaaaaaaaaaaaaaaaaaagaaaaaaaaaaaaaaaagaagaaaaaaataaaagaaaggaaaaaaagaaggagagaaaaaaagaaagaaaaagaagaagagaaaagacaaagagaaaggaagaagaaagagaaggaaagagaagagagagagggaaggagaagagcaagggggggggggggagaaaacaagacacacaacgagcagaggaagcacagacaagcagaacaccaccacagtagtcaaaagacgaacacacaaaaaaagaagcaaaaacaaaaaacaaaggaaggaagcaaaaacaaaaacaataggaaggaaaaaacaagcaggaagataaaagaacaaaaacaaagggagagaaaaaaacagcaacaaaataaaaaccaaagaaaaaa

SEQ ID NO: 297457 - DNA, 8468 bp, Homo sapiens
ggcggccgcgcaacaaaggagtcacccggcgatgagccccggcacccccggaccgaccatgggcagatcccagggcagcccaatggatccaatggtgatgaagagacctcagttgtatggcatgggcagtaaccctcattctcagcctcagcagagcagtccgtacccaggaggttcctatggccctccaggcccacagcggtatccaattggcatccagggtcggactcccggggccatggccggaatgcagtaccctcagcagcagatgccacctcagtatggacagcaaggtgtgagtggttactgccagcagggccaacagccatattacagccagcagccgcagcccccgcacctcccaccccaggcgcagtatctgccgtcccagtcccagcagaggtaccagccgcagcaggacatgtctcaggaaggctatggaactagatctcaacctcctctggcccccggaaaacctaaccatgaagacttgaacttaatacagcaagaaagaccatcaagtttaccagatctgtctggctccattgatgacctccccacgggaacggaagcaactttgagctcagcagtcagtgcatccgggtccacgagcagccaaggggatcagagcaacccggcgcagtcgcctttctccccacatgcgtcccctcatctctccagcatcccggggggcccatctccctctcctgttggctctcctgtaggaagcaaccagtctcgatctggcccaatctctcctgcaagtatcccaggtagtcagatgcctccgcagccacccgggagccagtcagaatccagttcccatcccgccttgagccagtcaccaatgccacaggaaagaggttttatggcaggcacacaaagaaaccctcagatggctcagtatggacctcaacagacaggaccatccatgtcgcctcatccttctcctgggggccagatgcatgctggaatcagtagctttcagcagagtaactcaagtgggacttacggtccacagatgagccagtatggaccacaaggtaactactccagacccccagcgtatagtggggtgcccagtgcaagctacagcggcccagggcccggtatgggtatcagtgccaacaaccagatgcatggacaagggccaagccagccatgtggtgctgtgcccctgggacgaatgccatcagctgggatgcagaacagaccatttcctggaaatatgagcagcatgacccccagttctcctggcatgtctcagcagggagggccaggaatggggccgccaatgccaactgtgaaccgtaaggcacaggaggcagccgcagcagtgatgcaggctgctgcgaactcagcacaaagcaggccaccatacattaggtcgcctgcttatcccagccagtctggggctggcggacgccccatgttttcttcccagcaccccaactatggcaactctcaggctcccatggtgcaccagcctgaccagtacgggcaaggcagtttccccggcatgaaccagagtggacttatggcttccagctctccctacagccagcccatgaacaacagctctagcctgatgaacacgcaggcgccgccctacagcatggcgcccgccatggtgaacagctcggcagcatctgtgggtcttgcagatatgatgtctcctggtgaatccaaactgcccctgcctctcaaagcagacggcaaagaagaaggcactccacagcccgagagcaagtcaaaggatagctacagctctcagggtatttctcagcccccaaccccaggcaacctgccagtcccttccccaatgtcccccagctctgctagcatctcctcatttcatggagatgaaagtgatagcattagcagcccaggctggccaaagactccatcaagccctaagtccagctcctccaccactactggggagaagatcacgaaggtgtacgagctggggaatgagccagagagaaagctctgggtcgaccgatacctcaccttcatggaagagagaggctctcctgtctcaagtctgcctgccgtgggcaagaagcccctggacctgttccgactctacgtctgcgtcaaagagatcgggggtttggcccaggttaataaaaacaagaagtggcgtgagctggcaaccaacctaaacgttggcacctcaagcagtgcagcgagctccctgaaaaagcagtatattcagtacctgtttgcctttgagtgcaagatcgaacgtggggaggagcccccgccggaagtcttcagcaccggggacaccaaaaagcagcccaagctccagccgccatctcctggctaactcgggatccttgcaaggcccacagaccccccagtcaactggcagcaattccatggcagaggttccaggtgacctgaagccacctaccccagcctccacccctcacggccagatgactccaatgcaaggtggaagaagcagtacaatcagtgtgcacgacccattctcagatgtgagtgattcatccttcccgaaacggaactccatgactccaaacgccccctaccagcagggcatgagcatgcccgatgtgatgggcaggatgccctatgagcccaacaaggacccctttgggggaatgagaaaagtgcctggaagcagcgagccctttatgacgcaaggacagatgcccaacagcagcatgcaggacatgtacaaccaaagtccctccggagcaatgtctaacctgggcatggggcagcgccagcagtttccctatggagccagttacgaccgaaggcatgaaccttatgggcagcagtatccaggccaaggccctccctcgggacagccgccgtatggagggcaccagcccggcctgtacccacagcagccgaattacaaacgccatatggacggcatgtacgggcccccagccaagcgccacgagggcgacatgtacaacatgcagtacagcagccagcagcaggagatgtacaaccagtatggaggctcctactcgggcccggaccgcaggcccatccagggccagtacccgtatccctacagcagggagaggatgcagggcccggggcagatccagacacacggaatcccgcctcagatgatgggcggcccgctgcagtcgtcctccagtgaggggcctcagcagaatatgtgggcagcacgcaatgatatgccttatccctaccagaacaggcagggccctggcggccctacacaggcgcccccttacccaggcatgaaccgcacagacgatatgatggtacccgatcagaggataaatcatgagagccagtggccttctcacgtcagccagcgtcagccttatatgtcgtcctcagcctccatgcagcccatcacacgcccaccacagccgtcctaccagacgccaccgtcactgccaaatcacatctccagggcgcccagcccagcgtccttccagcgctccctggagaaccgcatgtctccaagcaagtctccttttctgccgtctatgaagatgcagaaggtcatgcccacggtccccacatcccaggtcaccgggccaccaccccaaccacccccaatcagaagggagatcacctttcctcctggctcagtagaagcatcacaaccagtcttgaaacaaaggcgaaagattacctccaaagatatcgttactcctgaggcgtggcgtgtgatgatgtcccttaaatcaggtcttttggctgagagtacgtgggctttggacactattaatattcttctgtatgatgacagcactgttgctactttcaatctctcccagttgtctggatttctcgaacttttagtcgagtactttagaaaatgcctgattgacatttttggaattcttatggaatatgaagtgggagaccccagccaaaaagcacttgatcacaacgcagcaaggaaggatgacagccagtccttggcagacgattctgggaaagaggaggaagatgctgaatgtattgatgacgacgaggaagacgaggaggatgaggaggaagacagcgagaagacagaaagcgatgaaaagagcagcatcgctctgactgccccggacgccgctgcagacccaaaggagaagcccaagcaagccagtaagttcgacaagctgccaataaagatagtcaaaaagaacaacctgtttgttgttgaccgatctgacaagttggggcgtgtgcaggagttcaatagtggccttctgcactggcagctcggcgggggtgacaccaccgagcacattcagactcactttgagagcaagatggaaattcctcctcgcaggcgcccacctccccccttaagctccgcaggtagaaagaaagagcaagaaggcaaaggcgactctgaagagcagcaagagaaaagcatcatagcaaccatcgatgacgtcctctctgctcggccaggggcattgcctgaagacgcaaaccctgggccccagaccgaaagcagtaagtttccctttggtatccagcaagccaaaagtcaccggaacatcaagctgctggaggacgagcccaggagccgagacgagactcctctgtgtaccatcgcgcactggcaggactcgctggctaagcgatgcatctgtgtgtccaatattgtccgtagcttgtcattcgtgcctggcaatgatgccgaaatgtccaaacatccaggcctggtgctgatcctggggaagctgattcttcttcaccacgagcatccagagagaaagcgagcaccgcagacctatgagaaagaggaggatgaggacaagggggtggcctgcagcaaagatgagtggtggtgggactgcctcgaggtcttgagggataacacgttggtcacgttggccaacatttccgggcagctagacttgtctgcttacacggaaagcatctgcttgccaattttggatggcttgctgcactggatggtgtgcccgtctgcagaggcacaagatccctttccaactgtgggacccaactcggtcctgtcgcctcagagacttgtgctggagaccctctgtaaactcagtatccaggacaataatgtggacctgatcttggccactcctccatttagtcgtcaggagaaattctatgctacattagttaggtacgttggggatcgcaaaaacccagtctgtcgagaaatgtccatggcgcttttatcgaaccttgcccaaggggacgcactagcagcaagggccatagctgtgcagaaaggaagcattggaaacttgataagcttcctagaggatggggtcacgatggcccagtaccagcagagccagcacaacctcatgcacatgcagcccccgcccctggaaccacctagcgtagacatgatgtgcagggcggccaaggctttgctagccatggccagagtggacgaaaaccgctcggaattccttttgcacgagggccggttgctggatatctcgatatcagctgtcctgaactctctggttgcatctgtcatctgtgatgtactgtttcagattgggcagttatgacataagtgagaaggcaagcatgtgtgagtgaagattagagggtcacatataactggctgttttctgttcttgtttatccagcgtaggaagaaggaaaagaaaatctttgctcctctgccccattcactatttaccaattgggaattaaagaaataattaatttgaacagttatgaaattaatatttgctgtctgtgtgtataagtacatcctttggggttttttttttctcttttttttaaccaaagttgctgtctagtgcattcaaaggtcactttttgttcttcacagatctttttaatgttctttcccatgttgtattgcattttgggggaagcaaattgactttaaagaaaaaagttgtggcaaaagatgctaagatgcgaaaatttcaccacactgagtcaaaaaggtgaaaaattatccatttcctatgcgttttactcctcagagaatgaaaaaaactgcatcccatcacccaaagttctgtgcaatagaaatttctacagatacaggtataggggctcaaggaggtatgtcggtcagtagtcaaaactatgaaatgatactggtttctccacaggaatatggttccattaggctgggagcaaaaacaatgttttttaagattgagaatacatacctgacaacgatccggaaactgctcctcaccactcccgtcatgcctgctgtcggcgtttgaccttccacgtgacagttcttcacaattcctttcatcattttttaaatattttttttactgcctatgggctgtgatgtatatagaagttgtacattaaacataccctcatttttttcttttcttttttttttttttttttagtacaaagttttagtttctttttcatgatgtggtaactacgaagtgatggtagatttaaataattttttatttttattttatatattttttcattagggccatatctccaaaaaaagaaagaaaaaatacaaaaaacaaaaacaaaaaaaaaagagggtaatgtacaagtttctgtatgtataaagtcatgctcgatttcaggagagcagctgatcacaatttgcttcatgaatcaaggtgtggaaatggttatatatggattgatttagaaaatggttaccagtacagtcaaaaaagagaaaatgaaaaaaatacaactaaaaggaagaaacacaacttcaaagatttttcagtgatgagaatccacatttgtatttcaagataatgtagtttaaaacacaacttcaaagatttttcagtgatgagaatccacatttgtatttcaagataatgtagtttaaaaaaaaaaaaaagaaaaaaacttgatgtaaattcctccttttcctctggcttaatgaatatcatttattcagtataaaatctttatatgttccacatgttaagaataaatgtacattaaatctttgttaagcactgtgatgggtgttcttgaatactgttctagtttccttaaagtggtttcctagtaatcaagttatttacaagaaataggggaatgcagcagtgtattcacattataaaaccctacatttggaagagacctttaggggttacctactttagagtggggagcaacagtttgattttctcaaattacttagctaattagtctttctttgaagcaattaactctaacgacattgaggtatgatcattttcagtatttatgggaggtggctgctgacccacttgaggtgagatctcagaagcttaactggcctgaaaatgtaacattctgccttttactaactccatcttagtttaatcaaagttcaatctattccttgtttcttctgtgtgcctcagagttattttgcatttagtttactccaccgtgtataatatttatactgtgcaatgttaaaaaagaatctgttatattgtatgtggtgtacatagtgcaaagtgatgatttctatttcagggcatattatggttctcatattccttcctacctggtgcacagtagctttttaatactagtcacttctaatttaaactttctcttcctgggtcattgactgttactgtgtaataatcgatttctttgaaactgctgcataattatgctgttagtggacctctacctcttctcttccctctcccaatcacagtatactcagaatccccagcccctcgcatacattgtgtcggttcacattactcacagtaatatatggaagagttagacaagaacatgcagttacagtcattgtgagacgtgactctccagtgtcacgaggaaaaaaatcatcttttctgcaaacagtctctcatctgtcaactcccacattactgagtcaaacagtcttcttacataacaatgcaaccaaatatatgttgaattaaagacccatttataattctgctttaaatacatctgcttgctaagaacagatttcagtgctccaagcttcaaatatggagatttgtaagagggaattcaatattattctaatttctctcttacagagtacaaataaaaggtgtatacaaactccgaacatatccagtattccaattcctttgtcaatcagaagagtaaaataattaacaaaagactgttgttatggtttgcattgtaaccgatacgcagagtctgaccgttgggcaacaagtttttctatcctgatgcgcaacacagtctctagagactaatccaggaagactttagcctcctttccatattctcacccccgaatcaagatttacagaagcccacgaagaatttacagcctgcttgagatcatcttgcctataaactgagttattgctttgtcctaaaaattagtcggtttttttttttctatgaggcttttcagaaatttacaggatgcccagactttacatgtgtaccaaaaaaaaaaaaaagataaaaaataaaggtgcaaagaaagtttagtattttggaat

SEQ ID NO: 297458 - DNA, 6959 bp, Homo sapiens
ggcggccgcgcaacaaaggagtcacccggcgatgagccccggcacccccggaccgaccatgggcagatcccagggcagcccaatggatccaatggtgatgaagagacctcagttgtatggcatgggcagtaaccctcattctcagcctcagcagagcagtccgtacccaggaggttcctatggccctccaggcccacagcggtatccaattggcatccagggtcggactcccggggccatggccggaatgcagtaccctcagcagcagatgccacctcagtatggacagcaaggtgtgagtggttactgccagcagggccaacagccatattacagccagcagccgcagcccccgcacctcccaccccaggcgcagtatctgccgtcccagtcccagcagaggtaccagccgcagcaggacatgtctcaggaaggctatggaactagatctcaacctcctctggcccccggaaaacctaaccatgaagacttgaacttaatacagcaagaaagaccatcaagtttaccagatctgtctggctccattgatgacctccccacgggaacggaagcaactttgagctcagcagtcagtgcatccgggtccacgagcagccaaggggatcagagcaacccggcgcagtcgcctttctccccacatgcgtcccctcatctctccagcatcccggggggcccatctccctctcctgttggctctcctgtaggaagcaaccagtctcgatctggcccaatctctcctgcaagtatcccaggtagtcagatgcctccgcagccacccgggagccagtcagaatccagttcccatcccgccttgagccagtcaccaatgccacaggaaagaggttttatggcaggcacacaaagaaaccctcagatggctcagtatggacctcaacagacaggaccatccatgtcgcctcatccttctcctgggggccagatgcatgctggaatcagtagctttcagcagagtaactcaagtgggacttacggtccacagatgagccagtatggaccacaaggtaactactccagacccccagcgtatagtggggtgcccagtgcaagctacagcggcccagggcccggtatgggtatcagtgccaacaaccagatgcatggacaagggccaagccagccatgtggtgctgtgcccctgggacgaatgccatcagctgggatgcagaacagaccatttcctggaaatatgagcagcatgacccccagttctcctggcatgtctcagcagggagggccaggaatggggccgccaatgccaactgtgaaccgtaaggcacaggaggcagccgcagcagtgatgcaggctgctgcgaactcagcacaaagcaggccaccatacattaggtcgcctgcttatcccagccagtctggggctggcggacgccccatgttttcttcccagcaccccaactatggcaactctcaggctcccatggtgcaccagcctgaccagtacgggcaaggcagtttccccggcatgaaccagagtggacttatggcttccagctctccctacagccagcccatgaacaacagctctagcctgatgaacacgcaggcgccgccctacagcatggcgcccgccatggtgaacagctcggcagcatctgtgggtcttgcagatatgatgtctcctggtgaatccaaactgcccctgcctctcaaagcagacggcaaagaagaaggcactccacagcccgagagcaagtcaaaggatagctacagctctcagggtatttctcagcccccaaccccaggcaacctgccagtcccttccccaatgtcccccagctctgctagcatctcctcatttcatggagatgaaagtgatagcattagcagcccaggctggccaaagactccatcaagccctaagtccagctcctccaccactactggggagaagatcacgaaggtgtacgagctggggaatgagccagagagaaagctctgggtcgaccgatacctcaccttcatggaagagagaggctctcctgtctcaagtctgcctgccgtgggcaagaagcccctggacctgttccgactctacgtctgcgtcaaagagatcgggggtttggcccaggttaataaaaacaagaagtggcgtgagctggcaaccaacctaaacgttggcacctcaagcagtgcagcgagctccctgaaaaagcagtatattcagtacctgtttgcctttgagtgcaagatcgaacgtggggaggagcccccgccggaagtcttcagcaccggggacaccaaaaagcagcccaagctccagccgccatctcctggctaactcgggatccttgcaaggcccacagaccccccagtcaactggcagcaattccatggcagaggttccaggtgacctgaagccacctaccccagcctccacccctcacggccagatgactccaatgcaaggtggaagaagcagtacaatcagtgtgcacgacccattctcagatgtgagtgattcatccttcccgaaacggaactccatgactccaaacgccccctaccagcagggcatgagcatgcccgatgtgatgggcaggatgccctatgagcccaacaaggacccctttgggggaatgagaaaagtgcctggaagcagcgagccctttatgacgcaaggacagatgcccaacagcagcatgcaggacatgtacaaccaaagtccctccggagcaatgtctaacctgggcatggggcagcgccagcagtttccctatggagccagttacgaccgaaggcatgaaccttatgggcagcagtatccaggccaaggccctccctcgggacagccgccgtatggagggcaccagcccggcctgtacccacagcagccgaattacaaacgccatatggacggcatgtacgggcccccagccaagcgccacgagggcgacatgtacaacatgcagtacagcagccagcagcaggagatgtacaaccagtatggaggctcctactcgggcccggaccgcaggcccatccagggccagtacccgtatccctacagcagggagaggatgcagggcccggggcagatccagacacacggaatcccgcctcagatgatgggcggcccgctgcagtcgtcctccagtgaggggcctcagcagaatatgtgggcagcacgcaatgatatgccttatccctaccagaacaggcagggccctggcggccctacacaggcgcccccttacccaggcatgaaccgcacagacgatatgatggtacccgatcagaggataaatcatgagagccagtggccttctcacgtcagccagcgtcagccttatatgtcgtcctcagcctccatgcagcccatcacacgcccaccacagccgtcctaccagacgccaccgtcactgccaaatcacatctccagggcgcccagcccagcgtccttccagcgctccctggagaaccgcatgtctccaagcaagtctccttttctgccgtctatgaagatgcagaaggtcatgcccacggtccccacatcccaggtcaccgggccaccaccccaaccacccccaatcagaagggagatcacctttcctcctggctcagtagaagcatcacaaccagtcttgaaacaaaggcgaaagattacctccaaagatatcgttactcctgaggcgtggcgtgtgatgatgtcccttaaatcaggtcttttggctgagagtacgtgggctttggacactattaatattcttctgtatgatgacagcactgttgctactttcaatctctcccagttgtctggatttctcgaacttttagtcgagtactttagaaaatgcctgattgacatttttggaattcttatggaatatgaagtgggagaccccagccaaaaagcacttgatcacaacgcagcaaggaaggatgacagccagtccttggcagacgattctgggaaagaggaggaagatgctgaatgtattgatgacgacgaggaagacgaggaggatgaggaggaagacagcgagaagacagaaagcgatgaaaagagcagcatcgctctgactgccccggacgccgctgcagacccaaaggagaagcccaagcaagccagtaagttcgacaagctgccaataaagatagtcaaaaagaacaacctgtttgttgttgaccgatctgacaagttggggcgtgtgcaggagttcaatagtggccttctgcactggcagctcggcgggggtgacaccaccgagcacattcagactcactttgagagcaagatggaaattcctcctcgcaggcgcccacctccccccttaagctccgcaggtagaaagaaagagcaagaaggcaaaggcgactctgaagagcagcaagagaaaagcatcatagcaaccatcgatgacgtcctctctgctcggccaggggcattgcctgaagacgcaaaccctgggccccagaccgaaagcagtaagtttccctttggtatccagcaagccaaaagtcaccggaacatcaagctgctggaggacgagcccaggagccgagacgagactcctctgtgtaccatcgcgcactggcaggactcgctggctaagcgatgcatctgtgtgtccaatattgtccgtagcttgtcattcgtgcctggcaatgatgccgaaatgtccaaacatccaggcctggtgctgatcctggggaagctgattcttcttcaccacgagcatccagagagaaagcgagcaccgcagacctatgagaaagaggaggatgaggacaagggggtggcctgcagcaaagatgagtggtggtgggactgcctcgaggtcttgagggataacacgttggtcacgttggccaacatttccgggcagctagacttgtctgcttacacggaaagcatctgcttgccaattttggatggcttgctgcactggatggtgtgcccgtctgcagaggcacaagatccctttccaactgtgggacccaactcggtcctgtcgcctcagagacttgtgctggagaccctctgtaaactcagtatccaggacaataatgtggacctgatcttggccactcctccatttagtcgtcaggagaaattctatgctacattagttaggtacgttggggatcgcaaaaacccagtctgtcgagaaatgtccatggcgcttttatcgaaccttgcccaaggggacgcactagcagcaagggccatagctgtgcagaaaggaagcattggaaacttgataagcttcctagaggatggggtcacgatggcccagtaccagcagagccagcacaacctcatgcacatgcagcccccgcccctggaaccacctagcgtagacatgatgtgcagggcggccaaggctttgctagccatggccagagtggacgaaaaccgctcggaattccttttgcacgagggccggttgctggatatctcgatatcagctgtcctgaactctctggttgcatctgtcatctgtgatgtactgtttcagattgggcagttatgacataagtgagaaggcaagcatgtgtgagtgaagattagagggtcacatataactggctgttttctgttcttgtttatccagcgtaggaagaaggaaaagaaaatctttgctcctctgccccattcactatttaccaattgggaattaaagaaataattaatttgaacagttatgaaattaatatttgctgtctgtgtgtataagtacatcctttggggttttttttttctcttttttttaaccaaagttgctgtctagtgcattcaaaggtcactttttgttcttcacagatctttttaatgttctttcccatgttgtattgcattttgggggaagcaaattgactttaaagaaaaaagttgtggcaaaagatgctaagatgcgaaaatttcaccacactgagtcaaaaaggtgaaaaattatccatttcctatgcgttttactcctcagagaatgaaaaaaactgcatcccatcacccaaagttctgtgcaatagaaatttctacagatacaggtataggggctcaaggaggtatgtcggtcagtagtcaaaactatgaaatgatactggtttctccacaggaatatggttccattaggctgggagcaaaaacaatgttttttaagattgagaatacatacctgacaacgatccggaaactgctcctcaccactcccgtcatgcctgctgtcggcgtttgaccttccacgtgacagttcttcacaattcctttcatcattttttaaatattttttttactgcctatgggctgtgatgtatatagaagttgtacattaaacataccctcatttttttcttttcttttttttttttttttttagtacaaagttttagtttctttttcatgatgtggtaactacgaagtgatggtagatttaaataattttttatttttattttatatattttttcattagggccatatctccaaaaaaagaaagaaaaaatacaaaaaacaaaaacaaaaaaaaaagagggtaatgtacaagtttctgtatgtataaagtcatgctcgatttcaggagagcagctgatcacaatttgcttcatgaatcaaggtgtggaaatggttatatatggattgatttagaaaatggttaccagtacagtcaaaaaagagaaaatgaaaaaaatacaactaaaaggaagaaacacaacttcaaagatttttcagtgatgagaatccacatttgtatttcaagataatgtagtttaaaacacaacttcaaagatttttcagtgatgagaatccacatttgtatttcaagataatgtagtttaaaaaaaaaaaaaagaaaaaaacttgatgtaaattcctccttttcctctggcttaatgaatatcatttattcagtataaaatctttatatgttccacatgttaagaataaatgtacattaaatctt

SEQ ID NO: 297459 - DNA, 7188 bp, Homo sapiens
taccccccacccctcaggcagcggcaggatgcagggtattcaacttgcctccatggtctgtaagccccgcacctatgtgtgggggtgacagatatacagggctcatgcttgtgcatcagaacaaatcccaagaagctgttcttctgttccactttaggccaccatacattaggtcgcctgcttatcccagccagtctggggctggcggacgccccatgttttcttcccagcaccccaactatggcaactctcaggctcccatggtgcaccagcctgaccagtacgggcaaggcagtttccccggcatgaaccagagtggacttatggcttccagctctccctacagccagcccatgaacaacagctctagcctgatgaacacgcaggcgccgccctacagcatggcgcccgccatggtgaacagctcggcagcatctgtgggtcttgcagatatgatgtctcctggtgaatccaaactgcccctgcctctcaaagcagacggcaaagaagaaggcactccacagcccgagagcaagtcaaaggatagctacagctctcagggtatttctcagcccccaaccccaggcaacctgccagtcccttccccaatgtcccccagctctgctagcatctcctcatttcatggagatgaaagtgatagcattagcagcccaggctggccaaagactccatcaagccctaagtccagctcctccaccactactggggagaagatcacgaaggtgtacgagctggggaatgagccagagagaaagctctgggtcgaccgatacctcaccttcatggaagagagaggctctcctgtctcaagtctgcctgccgtgggcaagaagcccctggacctgttccgactctacgtctgcgtcaaagagatcgggggtttggcccaggttaataaaaacaagaagtggcgtgagctggcaaccaacctaaacgttggcacctcaagcagtgcagcgagctccctgaaaaagcagtatattcagtacctgtttgcctttgagtgcaagatcgaacgtggggaggagcccccgccggaagtcttcagcaccggggacaccaaaaagcagcccaagctccagccgccatctcctggctaactcgggatccttgcaaggcccacagaccccccagtcaactggcagcaattccatggcagaggttccaggtgacctgaagccacctaccccagcctccacccctcacggccagatgactccaatgcaaggtggaagaagcagtacaatcagtgtgcacgacccattctcagatgtgagtgattcatccttcccgaaacggaactccatgactccaaacgccccctaccagcagggcatgagcatgcccgatgtgatgggcaggatgccctatgagcccaacaaggacccctttgggggaatgagaaaagtgcctggaagcagcgagccctttatgacgcaaggacagatgcccaacagcagcatgcaggacatgtacaaccaaagtccctccggagcaatgtctaacctgggcatggggcagcgccagcagtttccctatggagccagttacgaccgaaggcatgaaccttatgggcagcagtatccaggccaaggccctccctcgggacagccgccgtatggagggcaccagcccggcctgtacccacagcagccgaattacaaacgccatatggacggcatgtacgggcccccagccaagcgccacgagggcgacatgtacaacatgcagtacagcagccagcagcaggagatgtacaaccagtatggaggctcctactcgggcccggaccgcaggcccatccagggccagtacccgtatccctacagcagggagaggatgcagggcccggggcagatccagacacacggaatcccgcctcagatgatgggcggcccgctgcagtcgtcctccagtgaggggcctcagcagaatatgtgggcagcacgcaatgatatgccttatccctaccagaacaggcagggccctggcggccctacacaggcgcccccttacccaggcatgaaccgcacagacgatatgatggtacccgatcagaggataaatcatgagagccagtggccttctcacgtcagccagcgtcagccttatatgtcgtcctcagcctccatgcagcccatcacacgcccaccacagccgtcctaccagacgccaccgtcactgccaaatcacatctccagggcgcccagcccagcgtccttccagcgctccctggagaaccgcatgtctccaagcaagtctccttttctgccgtctatgaagatgcagaaggtcatgcccacggtccccacatcccaggtcaccgggccaccaccccaaccacccccaatcagaagggagatcacctttcctcctggctcagtagaagcatcacaaccagtcttgaaacaaaggcgaaagattacctccaaagatatcgttactcctgaggcgtggcgtgtgatgatgtcccttaaatcaggtcttttggctgagagtacgtgggctttggacactattaatattcttctgtatgatgacagcactgttgctactttcaatctctcccagttgtctggatttctcgaacttttagtcgagtactttagaaaatgcctgattgacatttttggaattcttatggaatatgaagtgggagaccccagccaaaaagcacttgatcacaacgcagcaaggaaggatgacagccagtccttggcagacgattctgggaaagaggaggaagatgctgaatgtattgatgacgacgaggaagacgaggaggatgaggaggaagacagcgagaagacagaaagcgatgaaaagagcagcatcgctctgactgccccggacgccgctgcagacccaaaggagaagcccaagcaagccagtaagttcgacaagctgccaataaagatagtcaaaaagaacaacctgtttgttgttgaccgatctgacaagttggggcgtgtgcaggagttcaatagtggccttctgcactggcagctcggcgggggtgacaccaccgagcacattcagactcactttgagagcaagatggaaattcctcctcgcaggcgcccacctccccccttaagctccgcaggtagaaagaaagagcaagaaggcaaaggcgactctgaagagcagcaagagaaaagcatcatagcaaccatcgatgacgtcctctctgctcggccaggggcattgcctgaagacgcaaaccctgggccccagaccgaaagcagtaagtttccctttggtatccagcaagccaaaagtcaccggaacatcaagctgctggaggacgagcccaggagccgagacgagactcctctgtgtaccatcgcgcactggcaggactcgctggctaagcgatgcatctgtgtgtccaatattgtccgtagcttgtcattcgtgcctggcaatgatgccgaaatgtccaaacatccaggcctggtgctgatcctggggaagctgattcttcttcaccacgagcatccagagagaaagcgagcaccgcagacctatgagaaagaggaggatgaggacaagggggtggcctgcagcaaagatgagtggtggtgggactgcctcgaggtcttgagggataacacgttggtcacgttggccaacatttccgggcagctagacttgtctgcttacacggaaagcatctgcttgccaattttggatggcttgctgcactggatggtgtgcccgtctgcagaggcacaagatccctttccaactgtgggacccaactcggtcctgtcgcctcagagacttgtgctggagaccctctgtaaactcagtatccaggacaataatgtggacctgatcttggccactcctccatttagtcgtcaggagaaattctatgctacattagttaggtacgttggggatcgcaaaaacccagtctgtcgagaaatgtccatggcgcttttatcgaaccttgcccaaggggacgcactagcagcaagggccatagctgtgcagaaaggaagcattggaaacttgataagcttcctagaggatggggtcacgatggcccagtaccagcagagccagcacaacctcatgcacatgcagcccccgcccctggaaccacctagcgtagacatgatgtgcagggcggccaaggctttgctagccatggccagagtggacgaaaaccgctcggaattccttttgcacgagggccggttgctggatatctcgatatcagctgtcctgaactctctggttgcatctgtcatctgtgatgtactgtttcagattgggcagttatgacataagtgagaaggcaagcatgtgtgagtgaagattagagggtcacatataactggctgttttctgttcttgtttatccagcgtaggaagaaggaaaagaaaatctttgctcctctgccccattcactatttaccaattgggaattaaagaaataattaatttgaacagttatgaaattaatatttgctgtctgtgtgtataagtacatcctttggggttttttttttctcttttttttaaccaaagttgctgtctagtgcattcaaaggtcactttttgttcttcacagatctttttaatgttctttcccatgttgtattgcattttgggggaagcaaattgactttaaagaaaaaagttgtggcaaaagatgctaagatgcgaaaatttcaccacactgagtcaaaaaggtgaaaaattatccatttcctatgcgttttactcctcagagaatgaaaaaaactgcatcccatcacccaaagttctgtgcaatagaaatttctacagatacaggtataggggctcaaggaggtatgtcggtcagtagtcaaaactatgaaatgatactggtttctccacaggaatatggttccattaggctgggagcaaaaacaatgttttttaagattgagaatacatacctgacaacgatccggaaactgctcctcaccactcccgtcatgcctgctgtcggcgtttgaccttccacgtgacagttcttcacaattcctttcatcattttttaaatattttttttactgcctatgggctgtgatgtatatagaagttgtacattaaacataccctcatttttttcttttcttttttttttttttttttagtacaaagttttagtttctttttcatgatgtggtaactacgaagtgatggtagatttaaataattttttatttttattttatatattttttcattagggccatatctccaaaaaaagaaagaaaaaatacaaaaaacaaaaacaaaaaaaaaagagggtaatgtacaagtttctgtatgtataaagtcatgctcgatttcaggagagcagctgatcacaatttgcttcatgaatcaaggtgtggaaatggttatatatggattgatttagaaaatggttaccagtacagtcaaaaaagagaaaatgaaaaaaatacaactaaaaggaagaaacacaacttcaaagatttttcagtgatgagaatccacatttgtatttcaagataatgtagtttaaaaaaaaaaaaaagaaaaaaacttgatgtaaattcctccttttcctctggcttaatgaatatcatttattcagtataaaatctttatatgttccacatgttaagaataaatgtacattaaatctttgttaagcactgtgatgggtgttcttgaatactgttctagtttccttaaagtggtttcctagtaatcaagttatttacaagaaataggggaatgcagcagtgtattcacattataaaaccctacatttggaagagacctttaggggttacctactttagagtggggagcaacagtttgattttctcaaattacttagctaattagtctttctttgaagcaattaactctaacgacattgaggtatgatcattttcagtatttatgggaggtggctgctgacccacttgaggtgagatctcagaagcttaactggcctgaaaatgtaacattctgccttttactaactccatcttagtttaatcaaagttcaatctattccttgtttcttctgtgtgcctcagagttattttgcatttagtttactccaccgtgtataatatttatactgtgcaatgttaaaaaagaatctgttatattgtatgtggtgtacatagtgcaaagtgatgatttctatttcagggcatattatggttctcatattccttcctacctggtgcacagtagctttttaatactagtcacttctaatttaaactttctcttcctgggtcattgactgttactgtgtaataatcgatttctttgaaactgctgcataattatgctgttagtggacctctacctcttctcttccctctcccaatcacagtatactcagaatccccagcccctcgcatacattgtgtcggttcacattactcacagtaatatatggaagagttagacaagaacatgcagttacagtcattgtgagacgtgactctccagtgtcacgaggaaaaaaatcatcttttctgcaaacagtctctcatctgtcaactcccacattactgagtcaaacagtcttcttacataacaatgcaaccaaatatatgttgaattaaagacccatttataattctgctttaaatacatctgcttgctaagaacagatttcagtgctccaagcttcaaatatggagatttgtaagagggaattcaatattattctaatttctctcttacagagtacaaataaaaggtgtatacaaactccgaacatatccagtattccaattcctttgtcaatcagaagagtaaaataattaacaaaagactgttgttatggtttgcattgtaaccgatacgcagagtctgaccgttgggcaacaagtttttctatcctgatgcgcaacacagtctctagagactaatccaggaagactttagcctcctttccatattctcacccccgaatcaagatttacagaagcccacgaagaatttacagcctgcttgagatcatcttgcctataaactgagttattgctttgtcctaaaaattagtcggtttttttttttctatgaggcttttcagaaatttacaggatgcccagactttacatgtgtaccaaaaaaaaaaaaaagataaaaaataaaggtgcaaagaaagtttagtattttggaat

SEQ ID NO: 297460 - DNA, 6246 bp, Homo sapiens
agatcgagctcggtacgaattcgctagttgtgcagtgcaggtcctcgtgagaagcgtatattcagtacctgtttgcctttgagtgcaagatcgaacgtggggaggagcccccgccggaagtcttcagcaccggggacaccaaaaagcagcccaagctccagccgccatctcctggctaactcgggatccttgcaaggcccacagaccccccagtcaactggcagcaattccatggcagaggttccaggtgacctgaagccacctaccccagcctccacccctcacggccagatgactccaatgcaaggtggaagaagcagtacaatcagtgtgcacgacccattctcagatgtgagtgattcatccttcccgaaacggaactccatgactccaaacgccccctaccagcagggcatgagcatgcccgatgtgatgggcaggatgccctatgagcccaacaaggacccctttgggggaatgagaaaagtgcctggaagcagcgagccctttatgacgcaaggacagatgcccaacagcagcatgcaggacatgtacaaccaaagtccctccggagcaatgtctaacctgggcatggggcagcgccagcagtttccctatggagccagttacgaccgaaggcatgaaccttatgggcagcagtatccaggccaaggccctccctcgggacagccgccgtatggagggcaccagcccggcctgtacccacagcagccgaattacaaacgccatatggacggcatgtacgggcccccagccaagcgccacgagggcgacatgtacaacatgcagtacagcagccagcagcaggagatgtacaaccagtatggaggctcctactcgggcccggaccgcaggcccatccagggccagtacccgtatccctacagcagggagaggatgcagggcccggggcagatccagacacacggaatcccgcctcagatgatgggcggcccgctgcagtcgtcctccagtgaggggcctcagcagaatatgtgggcagcacgcaatgatatgccttatccctaccagaacaggcagggccctggcggccctacacaggcgcccccttacccaggcatgaaccgcacagacgatatgatggtacccgatcagaggataaatcatgagagccagtggccttctcacgtcagccagcgtcagccttatatgtcgtcctcagcctccatgcagcccatcacacgcccaccacagccgtcctaccagacgccaccgtcactgccaaatcacatctccagggcgcccagcccagcgtccttccagcgctccctggagaaccgcatgtctccaagcaagtctccttttctgccgtctatgaagatgcagaaggtcatgcccacggtccccacatcccaggtcaccgggccaccaccccaaccacccccaatcagaagggagatcacctttcctcctggctcagtagaagcatcacaaccagtcttgaaacaaaggcgaaagattacctccaaagatatcgttactcctgaggcgtggcgtgtgatgatgtcccttaaatcaggtcttttggctgagagtacgtgggctttggacactattaatattcttctgtatgatgacagcactgttgctactttcaatctctcccagttgtctggatttctcgaacttttagtcgagtactttagaaaatgcctgattgacatttttggaattcttatggaatatgaagtgggagaccccagccaaaaagcacttgatcacaacgcagcaaggaaggatgacagccagtccttggcagacgattctgggaaagaggaggaagatgctgaatgtattgatgacgacgaggaagacgaggaggatgaggaggaagacagcgagaagacagaaagcgatgaaaagagcagcatcgctctgactgccccggacgccgctgcagacccaaaggagaagcccaagcaagccagtaagttcgacaagctgccaataaagatagtcaaaaagaacaacctgtttgttgttgaccgatctgacaagttggggcgtgtgcaggagttcaatagtggccttctgcactggcagctcggcgggggtgacaccaccgagcacattcagactcactttgagagcaagatggaaattcctcctcgcaggcgcccacctccccccttaagctccgcaggtagaaagaaagagcaagaaggcaaaggcgactctgaagagcagcaagagaaaagcatcatagcaaccatcgatgacgtcctctctgctcggccaggggcattgcctgaagacgcaaaccctgggccccagaccgaaagcagtaagtttccctttggtatccagcaagccaaaagtcaccggaacatcaagctgctggaggacgagcccaggagccgagacgagactcctctgtgtaccatcgcgcactggcaggactcgctggctaagcgatgcatctgtgtgtccaatattgtccgtagcttgtcattcgtgcctggcaatgatgccgaaatgtccaaacatccaggcctggtgctgatcctggggaagctgattcttcttcaccacgagcatccagagagaaagcgagcaccgcagacctatgagaaagaggaggatgaggacaagggggtggcctgcagcaaagatgagtggtggtgggactgcctcgaggtcttgagggataacacgttggtcacgttggccaacatttccgggcagctagacttgtctgcttacacggaaagcatctgcttgccaattttggatggcttgctgcactggatggtgtgcccgtctgcagaggcacaagatccctttccaactgtgggacccaactcggtcctgtcgcctcagagacttgtgctggagaccctctgtaaactcagtatccaggacaataatgtggacctgatcttggccactcctccatttagtcgtcaggagaaattctatgctacattagttaggtacgttggggatcgcaaaaacccagtctgtcgagaaatgtccatggcgcttttatcgaaccttgcccaaggggacgcactagcagcaagggccatagctgtgcagaaaggaagcattggaaacttgataagcttcctagaggatggggtcacgatggcccagtaccagcagagccagcacaacctcatgcacatgcagcccccgcccctggaaccacctagcgtagacatgatgtgcagggcggccaaggctttgctagccatggccagagtggacgaaaaccgctcggaattccttttgcacgagggccggttgctggatatctcgatatcagctgtcctgaactctctggttgcatctgtcatctgtgatgtactgtttcagattgggcagttatgacataagtgagaaggcaagcatgtgtgagtgaagattagagggtcacatataactggctgttttctgttcttgtttatccagcgtaggaagaaggaaaagaaaatctttgctcctctgccccattcactatttaccaattgggaattaaagaaataattaatttgaacagttatgaaattaatatttgctgtctgtgtgtataagtacatcctttggggttttttttttctcttttttttaaccaaagttgctgtctagtgcattcaaaggtcactttttgttcttcacagatctttttaatgttctttcccatgttgtattgcattttgggggaagcaaattgactttaaagaaaaaagttgtggcaaaagatgctaagatgcgaaaatttcaccacactgagtcaaaaaggtgaaaaattatccatttcctatgcgttttactcctcagagaatgaaaaaaactgcatcccatcacccaaagttctgtgcaatagaaatttctacagatacaggtataggggctcaaggaggtatgtcggtcagtagtcaaaactatgaaatgatactggtttctccacaggaatatggttccattaggctgggagcaaaaacaatgttttttaagattgagaatacatacctgacaacgatccggaaactgctcctcaccactcccgtcatgcctgctgtcggcgtttgaccttccacgtgacagttcttcacaattcctttcatcattttttaaatattttttttactgcctatgggctgtgatgtatatagaagttgtacattaaacataccctcatttttttcttttcttttttttttttttttttagtacaaagttttagtttctttttcatgatgtggtaactacgaagtgatggtagatttaaataattttttatttttattttatatattttttcattagggccatatctccaaaaaaagaaagaaaaaatacaaaaaacaaaaacaaaaaaaaaagagggtaatgtacaagtttctgtatgtataaagtcatgctcgatttcaggagagcagctgatcacaatttgcttcatgaatcaaggtgtggaaatggttatatatggattgatttagaaaatggttaccagtacagtcaaaaaagagaaaatgaaaaaaatacaactaaaaggaagaaacacaacttcaaagatttttcagtgatgagaatccacatttgtatttcaagataatgtagtttaaaaaaaaaaaaaagaaaaaaacttgatgtaaattcctccttttcctctggcttaatgaatatcatttattcagtataaaatctttatatgttccacatgttaagaataaatgtacattaaatctttgttaagcactgtgatgggtgttcttgaatactgttctagtttccttaaagtggtttcctagtaatcaagttatttacaagaaataggggaatgcagcagtgtattcacattataaaaccctacatttggaagagacctttaggggttacctactttagagtggggagcaacagtttgattttctcaaattacttagctaattagtctttctttgaagcaattaactctaacgacattgaggtatgatcattttcagtatttatgggaggtggctgctgacccacttgaggtgagatctcagaagcttaactggcctgaaaatgtaacattctgccttttactaactccatcttagtttaatcaaagttcaatctattccttgtttcttctgtgtgcctcagagttattttgcatttagtttactccaccgtgtataatatttatactgtgcaatgttaaaaaagaatctgttatattgtatgtggtgtacatagtgcaaagtgatgatttctatttcagggcatattatggttctcatattccttcctacctggtgcacagtagctttttaatactagtcacttctaatttaaactttctcttcctgggtcattgactgttactgtgtaataatcgatttctttgaaactgctgcataattatgctgttagtggacctctacctcttctcttccctctcccaatcacagtatactcagaatccccagcccctcgcatacattgtgtcggttcacattactcacagtaatatatggaagagttagacaagaacatgcagttacagtcattgtgagacgtgactctccagtgtcacgaggaaaaaaatcatcttttctgcaaacagtctctcatctgtcaactcccacattactgagtcaaacagtcttcttacataacaatgcaaccaaatatatgttgaattaaagacccatttataattctgctttaaatacatctgcttgctaagaacagatttcagtgctccaagcttcaaatatggagatttgtaagagggaattcaatattattctaatttctctcttacagagtacaaataaaaggtgtatacaaactccgaacatatccagtattccaattcctttgtcaatcagaagagtaaaataattaacaaaagactgttgttatggtttgcattgtaaccgatacgcagagtctgaccgttgggcaacaagtttttctatcctgatgcgcaacacagtctctagagactaatccaggaagactttagcctcctttccatattctcacccccgaatcaagatttacagaagcccacgaagaatttacagcctgcttgagatcatcttgcctataaactgagttattgctttgtcctaaaaattagtcggtttttttttttctatgaggcttttcagaaatttacaggatgcccagactttacatgtgtaccaaaaaaaaaaaaaagataaaaaataaaggtgcaaagaaagtttagtattttggaat

SEQ ID NO: 297461 - DNA, 5710 bp, Homo sapiens
ggcggccgcgcaacaaaggagtcacccggcgatgagccccggcacccccggaccgaccatgggcagatcccagggcagcccaatggatccaatggtgatgaagagacctcagttgtatggcatgggcagtaaccctcattctcagcctcagcagagcagtccgtacccaggaggttcctatggccctccaggcccacagcggtatccaattggcatccagggtcggactcccggggccatggccggaatgcagtaccctcagcagcagatgccacctcagtatggacagcaaggtgtgagtggttactgccagcagggccaacagccatattacagccagcagccgcagcccccgcacctcccaccccaggcgcagtatctgccgtcccagtcccagcagaggtaccagccgcagcaggacatgtctcaggaaggctatggaactagatctcaacctcctctggcccccggaaaacctaaccatgaagacttgaacttaatacagcaagaaagaccatcaagtttaccagatctgtctggctccattgatgacctccccacgggaacggaagcaactttgagctcagcagtcagtgcatccgggtccacgagcagccaaggggatcagagcaacccggcgcagtcgcctttctccccacatgcgtcccctcatctctccagcatcccggggggcccatctccctctcctgttggctctcctgtaggaagcaaccagtctcgatctggcccaatctctcctgcaagtatcccaggtagtcagatgcctccgcagccacccgggagccagtcagaatccagttcccatcccgccttgagccagtcaccaatgccacaggaaagaggttttatggcaggcacacaaagaaaccctcagatggctcagtatggacctcaacagacaggaccatccatgtcgcctcatccttctcctgggggccagatgcatgctggaatcagtagctttcagcagagtaactcaagtgggacttacggtccacagatgagccagtatggaccacaaggtaactactccagacccccagcgtatagtggggtgcccagtgcaagctacagcggcccagggcccggtatgggtatcagtgccaacaaccagatgcatggacaagggccaagccagccatgtggtgctgtgcccctgggacgaatgccatcagctgggatgcagaacagaccatttcctggaaatatgagcagcatgacccccagttctcctggcatgtctcagcagggagggccaggaatggggccgccaatgccaactgtgaaccgtaaggcacaggaggcagccgcagcagtgatgcaggctgctgcgaactcagcacaaagcaggccaccatacattaggtcgcctgcttatcccagccagtctggggctggcggacgccccatgttttcttcccagcaccccaactatggcaactctcaggctcccatggtgcaccagcctgaccagtacgggcaaggcagtttccccggcatgaaccagagtggacttatggcttccagctctccctacagccagcccatgaacaacagctctagcctgatgaacacgcaggcgccgccctacagcatggcgcccgccatggtgaacagctcggcagcatctgtgggtcttgcagatatgatgtctcctggtgaatccaaactgcccctgcctctcaaagcagacggcaaagaagaaggcactccacagcccgagagcaagtcaaaggatagctacagctctcagggtatttctcagcccccaaccccaggcaacctgccagtcccttccccaatgtcccccagctctgctagcatctcctcatttcatggagatgaaagtgatagcattagcagcccaggctggccaaagactccatcaagccctaagtccagctcctccaccactactggggagaagatcacgaaggtgtacgagctggggaatgagccagagagaaagctctgggtcgaccgatacctcaccttcatggaagagagaggctctcctgtctcaagtctgcctgccgtgggcaagaagcccctggacctgttccgactctacgtctgcgtcaaagagatcgggggtttggcccaggttaataaaaacaagaagtggcgtgagctggcaaccaacctaaacgttggcacctcaagcagtgcagcgagctccctgaaaaagcagtatattcagtacctgtttgcctttgagtgcaagatcgaacgtggggaggagcccccgccggaagtcttcagcaccggggacaccaaaaagcagcccaagctccagccgccatctcctggctaactcgggatccttgcaaggcccacagaccccccagtcaactggcagcaattccatggcagaggttccaggtgacctgaagccacctaccccagcctccacccctcacggccagatgactccaatgcaaggtggaagaagcagtacaatcagtgtgcacgacccattctcagatgtgagtgattcatccttcccgaaacggaactccatgactccaaacgccccctaccagcagggcatgagcatgcccgatgtgatgggcaggatgccctatgagcccaacaaggacccctttgggggaatgagaaaagtgcctggaagcagcgagccctttatgacgcaaggacagatgcccaacagcagcatgcaggacatgtacaaccaaagtccctccggagcaatgtctaacctgggcatggggcagcgccagcagtttccctatggagccagttacgaccgaaggcatgaaccttatgggcagcagtatccaggccaaggccctccctcgggacagccgccgtatggagggcaccagcccggcctgtacccacagcagccgaattacaaacgccatatggacggcatgtacgggcccccagccaagcgccacgagggcgacatgtacaacatgcagtacagcagccagcagcaggagatgtacaaccagtatggaggctcctactcgggcccggaccgcaggcccatccagggccagtacccgtatccctacagcagggagaggatgcagggcccggggcagatccagacacacggaatcccgcctcagatgatgggcggcccgctgcagtcgtcctccagtgaggggcctcagcagaatatgtgggcagcacgcaatgatatgccttatccctaccagaacaggcagggccctggcggccctacacaggcgcccccttacccaggcatgaaccgcacagacgatatgatggtacccgatcagaggataaatcatgagagccagtggccttctcacgtcagccagcgtcagccttatatgtcgtcctcagcctccatgcagcccatcacacgcccaccacagccgtcctaccagacgccaccgtcactgccaaatcacatctccagggcgcccagcccagcgtccttccagcgctccctggagaaccgcatgtctccaagcaagtctccttttctgccgtctatgaagatgcagaaggtcatgcccacggtccccacatcccaggtcaccgggccaccaccccaaccacccccaatcagaagggagatcacctttcctcctggctcagtagaagcatcacaaccagtcttgaaacaaaggcgaaagattacctccaaagatatcgttactcctgaggcgtggcgtgtgatgatgtcccttaaatcaggtcttttggctgagagtacgtgggctttggacactattaatattcttctgtatgatgacagcactgttgctactttcaatctctcccagttgtctggatttctcgaacttttagtcgagtactttagaaaatgcctgattgacatttttggaattcttatggaatatgaagtgggagaccccagccaaaaagcacttgatcacaacgcagcaaggaaggatgacagccagtccttggcagacgattctgggaaagaggaggaagatgctgaatgtattgatgacgacgaggaagacgaggaggatgaggaggaagacagcgagaagacagaaagcgatgaaaagagcagcatcgctctgactgccccggacgccgctgcagacccaaaggagaagcccaagcaagccagtaagttcgacaagctgccaataaagatagtcaaaaagaacaacctgtttgttgttgaccgatctgacaagttggggcgtgtgcaggagttcaatagtggccttctgcactggcagctcggcgggggtgacaccaccgagcacattcagactcactttgagagcaagatggaaattcctcctcgcaggcgcccacctccccccttaagctccgcaggtagaaagaaagagcaagaaggcaaaggcgactctgaagagcagcaagagaaaagcatcatagcaaccatcgatgacgtcctctctgctcggccaggggcattgcctgaagacgcaaaccctgggccccagaccgaaagcagtaagtttccctttggtatccagcaagccaaaagtcaccggaacatcaagctgctggaggacgagcccaggagccgagacgagactcctctgtgtaccatcgcgcactggcaggactcgctggctaagcgatgcatctgtgtgtccaatattgtccgtagcttgtcattcgtgcctggcaatgatgccgaaatgtccaaacatccaggcctggtgctgatcctggggaagctgattcttcttcaccacgagcatccagagagaaagcgagcaccgcagacctatgagaaagaggaggatgaggacaagggggtggcctgcagcaaagatgagtggtggtgggactgcctcgaggtcttgagggataacacgttggtcacgttggccaacatttccgggcagctagacttgtctgcttacacggaaagcatctgcttgccaattttggatggcttgctgcactggatggtgtgcccgtctgcagaggcacaagatccctttccaactgtgggacccaactcggtcctgtcgcctcagagacttgtgctggagaccctctgtaaactcagtatccaggacaataatgtggacctgatcttggccactcctccatttagtcgtcaggagaaattctatgctacattagttaggtacgttggggatcgcaaaaacccagtctgtcgagaaatgtccatggcgcttttatcgaaccttgcccaaggggacgcactagcagcaagggccatagctgtgcagaaaggaagcattggaaacttgataagcttcctagaggatggggtcacgatggcccagtaccagcagagccagcacaacctcatgcacatgcagcccccgcccctggaaccacctagcgtagacatgatgtgcagggcggccaaggctttgctagccatggccagagtggacgaaaaccgctcggaattccttttgcacgagggccggttgctggatatctcgatatcagctgtcctgaactctctggttgcatctgtcatctgtgatgtactgtttcagattgggcagttatgacataagtgagaaggcaagcatgtgtgagtgaagattagagggtcacatataactggctgttttctgttcttgtttatccagcgtaggaagaaggaaaagaaaatctttgctcctctgccccattcactatttaccaattgggaattaaagaaataattaatttgaacagttatgaaatt

SEQ ID NO: 297462 - DNA, 5890 bp, Homo sapiens
tcgagctccgtacccccaaaaaaaaaaaaaaaagaaaaagtccaaagacaatagagatgactagaagggatggatgggcctttgactttcagaaatgcctaaatgtatgcattttatttaaaatattgcagtgcctggaagcagcgagccctttatgacgcaaggacagatgcccaacagcagcatgcaggacatgtacaaccaaagtccctccggagcaatgtctaacctgggcatggggcagcgccagcagtttccctatggagccagttacgaccgaaggcatgaaccttatgggcagcagtatccaggccaaggccctccctcgggacagccgccgtatggagggcaccagcccggcctgtacccacagcagccgaattacaaacgccatatggacggcatgtacgggcccccagccaagcgccacgagggcgacatgtacaacatgcagtacagcagccagcagcaggagatgtacaaccagtatggaggctcctactcgggcccggaccgcaggcccatccagggccagtacccgtatccctacagcagggagaggatgcagggcccggggcagatccagacacacggaatcccgcctcagatgatgggcggcccgctgcagtcgtcctccagtgaggggcctcagcagaatatgtgggcagcacgcaatgatatgccttatccctaccagaacaggcagggccctggcggccctacacaggcgcccccttacccaggcatgaaccgcacagacgatatgatggtacccgatcagaggataaatcatgagagccagtggccttctcacgtcagccagcgtcagccttatatgtcgtcctcagcctccatgcagcccatcacacgcccaccacagccgtcctaccagacgccaccgtcactgccaaatcacatctccagggcgcccagcccagcgtccttccagcgctccctggagaaccgcatgtctccaagcaagtctccttttctgccgtctatgaagatgcagaaggtcatgcccacggtccccacatcccaggtcaccgggccaccaccccaaccacccccaatcagaagggagatcacctttcctcctggctcagtagaagcatcacaaccagtcttgaaacaaaggcgaaagattacctccaaagatatcgttactcctgaggcgtggcgtgtgatgatgtcccttaaatcaggtcttttggctgagagtacgtgggctttggacactattaatattcttctgtatgatgacagcactgttgctactttcaatctctcccagttgtctggatttctcgaacttttagtcgagtactttagaaaatgcctgattgacatttttggaattcttatggaatatgaagtgggagaccccagccaaaaagcacttgatcacaacgcagcaaggaaggatgacagccagtccttggcagacgattctgggaaagaggaggaagatgctgaatgtattgatgacgacgaggaagacgaggaggatgaggaggaagacagcgagaagacagaaagcgatgaaaagagcagcatcgctctgactgccccggacgccgctgcagacccaaaggagaagcccaagcaagccagtaagttcgacaagctgccaataaagatagtcaaaaagaacaacctgtttgttgttgaccgatctgacaagttggggcgtgtgcaggagttcaatagtggccttctgcactggcagctcggcgggggtgacaccaccgagcacattcagactcactttgagagcaagatggaaattcctcctcgcaggcgcccacctccccccttaagctccgcaggtagaaagaaagagcaagaaggcaaaggcgactctgaagagcagcaagagaaaagcatcatagcaaccatcgatgacgtcctctctgctcggccaggggcattgcctgaagacgcaaaccctgggccccagaccgaaagcagtaagtttccctttggtatccagcaagccaaaagtcaccggaacatcaagctgctggaggacgagcccaggagccgagacgagactcctctgtgtaccatcgcgcactggcaggactcgctggctaagcgatgcatctgtgtgtccaatattgtccgtagcttgtcattcgtgcctggcaatgatgccgaaatgtccaaacatccaggcctggtgctgatcctggggaagctgattcttcttcaccacgagcatccagagagaaagcgagcaccgcagacctatgagaaagaggaggatgaggacaagggggtggcctgcagcaaagatgagtggtggtgggactgcctcgaggtcttgagggataacacgttggtcacgttggccaacatttccgggcagctagacttgtctgcttacacggaaagcatctgcttgccaattttggatggcttgctgcactggatggtgtgcccgtctgcagaggcacaagatccctttccaactgtgggacccaactcggtcctgtcgcctcagagacttgtgctggagaccctctgtaaactcagtatccaggacaataatgtggacctgatcttggccactcctccatttagtcgtcaggagaaattctatgctacattagttaggtacgttggggatcgcaaaaacccagtctgtcgagaaatgtccatggcgcttttatcgaaccttgcccaaggggacgcactagcagcaagggccatagctgtgcagaaaggaagcattggaaacttgataagcttcctagaggatggggtcacgatggcccagtaccagcagagccagcacaacctcatgcacatgcagcccccgcccctggaaccacctagcgtagacatgatgtgcagggcggccaaggctttgctagccatggccagagtggacgaaaaccgctcggaattccttttgcacgagggccggttgctggatatctcgatatcagctgtcctgaactctctggttgcatctgtcatctgtgatgtactgtttcagattgggcagttatgacataagtgagaaggcaagcatgtgtgagtgaagattagagggtcacatataactggctgttttctgttcttgtttatccagcgtaggaagaaggaaaagaaaatctttgctcctctgccccattcactatttaccaattgggaattaaagaaataattaatttgaacagttatgaaattaatatttgctgtctgtgtgtataagtacatcctttggggttttttttttctcttttttttaaccaaagttgctgtctagtgcattcaaaggtcactttttgttcttcacagatctttttaatgttctttcccatgttgtattgcattttgggggaagcaaattgactttaaagaaaaaagttgtggcaaaagatgctaagatgcgaaaatttcaccacactgagtcaaaaaggtgaaaaattatccatttcctatgcgttttactcctcagagaatgaaaaaaactgcatcccatcacccaaagttctgtgcaatagaaatttctacagatacaggtataggggctcaaggaggtatgtcggtcagtagtcaaaactatgaaatgatactggtttctccacaggaatatggttccattaggctgggagcaaaaacaatgttttttaagattgagaatacatacctgacaacgatccggaaactgctcctcaccactcccgtcatgcctgctgtcggcgtttgaccttccacgtgacagttcttcacaattcctttcatcattttttaaatattttttttactgcctatgggctgtgatgtatatagaagttgtacattaaacataccctcatttttttcttttcttttttttttttttttttagtacaaagttttagtttctttttcatgatgtggtaactacgaagtgatggtagatttaaataattttttatttttattttatatattttttcattagggccatatctccaaaaaaagaaagaaaaaatacaaaaaacaaaaacaaaaaaaaaagagggtaatgtacaagtttctgtatgtataaagtcatgctcgatttcaggagagcagctgatcacaatttgcttcatgaatcaaggtgtggaaatggttatatatggattgatttagaaaatggttaccagtacagtcaaaaaagagaaaatgaaaaaaatacaactaaaaggaagaaacacaacttcaaagatttttcagtgatgagaatccacatttgtatttcaagataatgtagtttaaaaaaaaaaaaaagaaaaaaacttgatgtaaattcctccttttcctctggcttaatgaatatcatttattcagtataaaatctttatatgttccacatgttaagaataaatgtacattaaatctttgttaagcactgtgatgggtgttcttgaatactgttctagtttccttaaagtggtttcctagtaatcaagttatttacaagaaataggggaatgcagcagtgtattcacattataaaaccctacatttggaagagacctttaggggttacctactttagagtggggagcaacagtttgattttctcaaattacttagctaattagtctttctttgaagcaattaactctaacgacattgaggtatgatcattttcagtatttatgggaggtggctgctgacccacttgaggtgagatctcagaagcttaactggcctgaaaatgtaacattctgccttttactaactccatcttagtttaatcaaagttcaatctattccttgtttcttctgtgtgcctcagagttattttgcatttagtttactccaccgtgtataatatttatactgtgcaatgttaaaaaagaatctgttatattgtatgtggtgtacatagtgcaaagtgatgatttctatttcagggcatattatggttctcatattccttcctacctggtgcacagtagctttttaatactagtcacttctaatttaaactttctcttcctgggtcattgactgttactgtgtaataatcgatttctttgaaactgctgcataattatgctgttagtggacctctacctcttctcttccctctcccaatcacagtatactcagaatccccagcccctcgcatacattgtgtcggttcacattactcacagtaatatatggaagagttagacaagaacatgcagttacagtcattgtgagacgtgactctccagtgtcacgaggaaaaaaatcatcttttctgcaaacagtctctcatctgtcaactcccacattactgagtcaaacagtcttcttacataacaatgcaaccaaatatatgttgaattaaagacccatttataattctgctttaaatacatctgcttgctaagaacagatttcagtgctccaagcttcaaatatggagatttgtaagagggaattcaatattattctaatttctctcttacagagtacaaataaaaggtgtatacaaactccgaacatatccagtattccaattcctttgtcaatcagaagagtaaaataattaacaaaagactgttgttatggtttgcattgtaaccgatacgcagagtctgaccgttgggcaacaagtttttctatcctgatgcgcaacacagtctctagagactaatccaggaagactttagcctcctttccatattctcacccccgaatcaagatttacagaagcccacgaagaatttacagcctgcttgagatcatcttgcctataaactgagttattgctttgtcctaaaaattagtcggtttttttttttctatgaggcttttcagaaatttacaggatgcccagactttacatgtgtaccaaaaaaaaaaaaaagataaaaaataaaggtgcaaagaaagtttagtattttggaat

SEQ ID NO: 297463 - DNA, 2467 bp, Homo sapiens
ggcggccgcgcaacaaaggagtcacccggcgatgagccccggcacccccggaccgaccatgggcagatcccagggcagcccaatggatccaatggtgatgaagagacctcagttgtatggcatgggcagtaaccctcattctcagcctcagcagagcagtccgtacccaggaggttcctatggccctccaggcccacagcggtatccaattggcatccagggtcggactcccggggccatggccggaatgcagtaccctcagcagcagatgccacctcagtatggacagcaaggtgtgagtggttactgccagcagggccaacagccatattacagccagcagccgcagcccccgcacctcccaccccaggcgcagtatctgccgtcccagtcccagcagaggtaccagccgcagcaggacatgtctcaggaaggctatggaactagatctcaacctcctctggcccccggaaaacctaaccatgaagacttgaacttaatacagcaagaaagaccatcaagtttaccagatctgtctggctccattgatgacctccccacgggaacggaagcaactttgagctcagcagtcagtgcatccgggtccacgagcagccaaggggatcagagcaacccggcgcagtcgcctttctccccacatgcgtcccctcatctctccagcatcccggggggcccatctccctctcctgttggctctcctgtaggaagcaaccagtctcgatctggcccaatctctcctgcaagtatcccaggtagtcagatgcctccgcagccacccgggagccagtcagaatccagttcccatcccgccttgagccagtcaccaatgccacaggaaagaggttttatggcaggcacacaaagaaaccctcagatggctcagtatggacctcaacagacaggaccatccatgtcgcctcatccttctcctgggggccagatgcatgctggaatcagtagctttcagcagagtaactcaagtgggacttacggtccacagatgagccagtatggaccacaaggtaactactccagacccccagcgtatagtggggtgcccagtgcaagctacagcggcccagggcccggtatgggtatcagtgccaacaaccagatgcatggacaagggccaagccagccatgtggtgctgtgcccctgggacgaatgccatcagctgggatgcagaacagaccatttcctggaaatatgagcagcatgacccccagttctcctggcatgtctcagcagggagggccaggaatggggccgccaatgccaactgtgaaccgtaaggcacaggaggcagccgcagcagtgatgcaggctgctgcgaactcagcacaaagcaggcaaggcagtttccccggcatgaaccagagtggacttatggcttccagctctccctacagccagcccatgaacaacagctctagcctgatgaacacgcaggcgccgccctacagcatggcgcccgccatggtgaacagctcggcagcatctgtgggtcttgcagatatgatgtctcctggtgaatccaaactgcccctgcctctcaaagcagacggcaaagaagaaggcactccacagcccgagagcaagtcaaaggatagctacagctctcagggtatttctcagcccccaaccccaggcaacctgccagtcccttccccaatgtcccccagctctgctagcatctcctcatttcatggagatgaaagtgatagcattagcagcccaggctggccaaagactccatcaagccctaagtccagctcctccaccactactggggagaagatcacgaaggtgtacgagctggggaatgagccagagagaaagctctgggtcgaccgatacctcaccttcatggaagagagaggctctcctgtctcaagtctgcctgccgtgggcaagaagcccctggacctgttccgactctacgtctgcgtcaaagagatcgggggtttggcccaggttaataaaaacaagaagtggcgtgagctggcaaccaacctaaacgttggcacctcaagcagtgcagcgagctccctgaaaaagcagtatattcagtacctgtttgcctttgagtgcaagatcgaacgtggggaggagcccccgccggaagtcttcagcaccggggacaccaaaaagcagcccaagctccagccgccatctcctggtagtccagatggagccgagggcctgtgacacaggaggcagtggaaggaaagcctcctggtctcgtccagccccgagagcgcgtgcagggggctccaggcacacacaggcgtctgggggtcgcaggcagaggcaccctggtcttcagaagcctctcgattcactgccacccacacagcaggtggcctctccgattccagtcccatcattagggaaagtgtctggaaacatttttgttgttaaaggaaaataaaattattcccaact

SEQ ID NO: 297464 - DNA, 4838 bp, Homo sapiens
ggcggccgcgcaacaaaggagtcacccggcgatgagccccggcacccccggaccgaccatgggcagatcccagggcagcccaatggatccaatggtgatgaagagacctcagttgtatggcatgggcagtaaccctcattctcagcctcagcagagcagtccgtacccaggaggttcctatggccctccaggcccacagcggtatccaattggcatccagggtcggactcccggggccatggccggaatgcagtaccctcagcagcagatgccacctcagtatggacagcaaggtgtgagtggttactgccagcagggccaacagccatattacagccagcagccgcagcccccgcacctcccaccccaggcgcagtatctgccgtcccagtcccagcagaggtaccagccgcagcaggacatgtctcaggaaggctatggaactagatctcaacctcctctggcccccggaaaacctaaccatgaagacttgaacttaatacagcaagaaagaccatcaagtttaccagatctgtctggctccattgatgacctccccacgggaacggaagcaactttgagctcagcagtcagtgcatccgggtccacgagcagccaaggggatcagagcaacccggcgcagtcgcctttctccccacatgcgtcccctcatctctccagcatcccggggggcccatctccctctcctgttggctctcctgtaggaagcaaccagtctcgatctggcccaatctctcctgcaagtatcccaggtagtcagatgcctccgcagccacccgggagccagtcagaatccagttcccatcccgccttgagccagtcaccaatgccacaggaaagaggttttatggcaggcacacaaagaaaccctcagatggctcagtatggacctcaacagacaggaccatccatgtcgcctcatccttctcctgggggccagatgcatgctggaatcagtagctttcagcagagtaactcaagtgggacttacggtccacagatgagccagtatggaccacaaggtaactactccagacccccagcgtatagtggggtgcccagtgcaagctacagcggcccagggcccggtatgggtatcagtgccaacaaccagatgcatggacaagggccaagccagccatgtggtgctgtgcccctgggacgaatgccatcagctgggatgcagaacagaccatttcctggaaatatgagcagcatgacccccagttctcctggcatgtctcagcagggagggccaggaatggggccgccaatgccaactgtgaaccgtaaggcacaggaggcagccgcagcagtgatgcaggctgctgcgaactcagcacaaagcaggccaccatacattaggtcgcctgcttatcccagccagtctggggctggcggacgccccatgttttcttcccagcaccccaactatggcaactctcaggctcccatggtgcaccagcctgaccagtacgggcaaggcagtttccccggcatgaaccagagtggacttatggcttccagctctccctacagccagcccatgaacaacagctctagcctgatgaacacgcaggcgccgccctacagcatggcgcccgccatggtgaacagctcggcagcatctgtgggtcttgcagatatgatgtctcctggtgaatccaaactgcccctgcctctcaaagcagacggcaaagaagaaggcactccacagcccgagagcaagtcaaaggatagctacagctctcagggtatttctcagcccccaaccccaggcaacctgccagtcccttccccaatgtcccccagctctgctagcatctcctcatttcatggagatgaaagtgatagcattagcagcccaggctggccaaagactccatcaagccctaagtccagctcctccaccactactggggagaagatcacgaaggtgtacgagctggggaatgagccagagagaaagctctgggtcgaccgatacctcaccttcatggaagagagaggctctcctgtctcaagtctgcctgccgtgggcaagaagcccctggacctgttccgactctacgtctgcgtcaaagagatcgggggtttggcccaggttaataaaaacaagaagtggcgtgagctggcaaccaacctaaacgttggcacctcaagcagtgcagcgagctccctgaaaaagcagtatattcagtacctgtttgcctttgagtgcaagatcgaacgtggggaggagcccccgccggaagtcttcagcaccggggacaccaaaaagcagcccaagctccagccgccatctcctggctaactcgggatccttgcaaggcccacagaccccccagtcaactggcagcaattccatggcagaggttccaggtgacctgaagccacctaccccagcctccacccctcacggccagatgactccaatgcaaggtggaagaagcagtacaatcagtgtgcacgacccattctcagatgtgagtgattcatccttcccgaaacggaactccatgactccaaacgccccctaccagcagggcatgagcatgcccgatgtgatgggcaggatgccctatgagcccaacaaggacccctttgggggaatgagaaaagtgcctggaagcagcgagccctttatgacgcaaggacagatgcccaacagcagcatgcaggacatgtacaaccaaagtccctccggagcaatgtctaacctgggcatggggcagcgccagcagtttccctatggagccagttacgaccgaaggcatgaaccttatgggcagcagtatccaggccaaggccctccctcgggacagccgccgtatggagggcaccagcccggcctgtacccacagcagccgaattacaaacgccatatggacggcatgtacgggcccccagccaagcgccacgagggcgacatgtacaacatgcagtacagcagccagcagcaggagatgtacaaccagtatggaggctcctactcgggcccggaccgcaggcccatccagggccagtacccgtatccctacagcagggagaggatgcagggcccggggcagatccagacacacggaatcccgcctcagatgatgggcggcccgctgcagtcgtcctccagtgaggggcctcagcagaatatgtgggcagcacgcaatgatatgccttatccctaccagaacaggcagggccctggcggccctacacaggcgcccccttacccaggcatgaaccgcacagacgatatgatggtacccgatcagaggataaatcatgagagccagtggccttctcacgtcagccagcgtcagccttatatgtcgtcctcagcctccatgcagcccatcacacgcccaccacagccgtcctaccagacgccaccgtcactgccaaatcacatctccagggcgcccagcccagcgtccttccagcgctccctggagaaccgcatgtctccaagcaagtctccttttctgccgtctatgaagatgcagaaggtcatgcccacggtccccacatcccaggtcaccgggccaccaccccaaccacccccaatcagaagggagatcacctttcctcctggctcagtagaagcatcacaaccagtcttgaaacaaaggcgaaagattacctccaaagatatcgttactcctgaggcgtggcgtgtgatgatgtcccttaaatcaggtcttttggctgagagtacgtgggctttggacactattaatattcttctgtatgatgacagcactgttgctactttcaatctctcccagttgtctggatttctcgaacttttagtcgagtactttagaaaatgcctgattgacatttttggaattcttatggaatatgaagtgggagaccccagccaaaaagcacttgatcacaacgcagcaaggaaggatgacagccagtccttggcagacgattctgggaaagaggaggaagatgctgaatgtattgatgacgacgaggaagacgaggaggatgaggaggaagacagcgagaagacagaaagcgatgaaaagagcagcatcgctctgactgccccggacgccgctgcagacccaaaggagaagcccaagcaagccagtaagttcgacaagctgccaataaagatagtcaaaaagaacaacctgtttgttgttgaccgatctgacaagttggggcgtgtgcaggagttcaatagtggccttctgcactggcagctcggcgggggtgacaccaccgagcacattcagactcactttgagagcaagatggaaattcctcctcgcaggcgcccacctccccccttaagctccgcaggtagaaagaaagagcaagaaggcaaaggcgactctgaagagcagcaagagaaaagcatcatagcaaccatcgatgacgtcctctctgctcggccaggggcattgcctgaagacgcaaaccctgggccccagaccgaaagcagtaagtttccctttggtatccagcaagccaaaagtcaccggaacatcaagctgctggaggacgagcccaggagccgagacgagactcctctgtgtaccatcgcgcactggcaggactcgctggctaagcgatgcatctgtcatctgtgatgtactgtttcagattgggcagttatgacataagtgagaaggcaagcatgtgtgagtgaagattagagggtcacatataactggctgttttctgttcttgtttatccagcgtaggaagaaggaaaagaaaatctttgctcctctgccccattcactatttaccaattgggaattaaagaaataattaatttgaacagttatgaaatt

SEQ ID NO: 297465 - DNA, 3774 bp, Homo sapiens
ggcggccgcgcaacaaaggagtcacccggcgatgagccccggcacccccggaccgaccatgggcagatcccagggcagcccaatggatccaatggtgatgaagagacctcagttgtatggcatgggcagtaaccctcattctcagcctcagcagagcagtccgtacccaggaggttcctatggccctccaggcccacagcggtatccaattggcatccagggtcggactcccggggccatggccggaatgcagtaccctcagcagcagatgccacctcagtatggacagcaaggtgtgagtggttactgccagcagggccaacagccatattacagccagcagccgcagcccccgcacctcccaccccaggcgcagtatctgccgtcccagtcccagcagaggtaccagccgcagcaggacatgtctcaggaaggctatggaactagatctcaacctcctctggcccccggaaaacctaaccatgaagacttgaacttaatacagcaagaaagaccatcaagtttaccagatctgtctggctccattgatgacctccccacgggaacggaagcaactttgagctcagcagtcagtgcatccgggtccacgagcagccaaggggatcagagcaacccggcgcagtcgcctttctccccacatgcgtcccctcatctctccagcatcccggggggcccatctccctctcctgttggctctcctgtaggaagcaaccagtctcgatctggcccaatctctcctgcaagtatcccaggtagtcagatgcctccgcagccacccgggagccagtcagaatccagttcccatcccgccttgagccagtcaccaatgccacaggaaagaggttttatggcaggcacacaaagaaaccctcagatggctcagtatggacctcaacagacaggaccatccatgtcgcctcatccttctcctgggggccagatgcatgctggaatcagtagctttcagcagagtaactcaagtgggacttacggtccacagatgagccagtatggaccacaaggtaactactccagacccccagcgtatagtggggtgcccagtgcaagctacagcggcccagggcccggtatgggtatcagtgccaacaaccagatgcatggacaagggccaagccagccatgtggtgctgtgcccctgggacgaatgccatcagctgggatgcagaacagaccatttcctggaaatatgagcagcatgacccccagttctcctggcatgtctcagcagggagggccaggaatggggccgccaatgccaactgtgaaccgtaaggcacaggaggcagccgcagcagtgatgcaggctgctgcgaactcagcacaaagcaggccaccatacattaggtcgcctgcttatcccagccagtctggggctggcggacgccccatgttttcttcccagcaccccaactatggcaactctcaggctcccatggtgcaccagcctgaccagtacgggcaaggcagtttccccggcatgaaccagagtggacttatggcttccagctctccctacagccagcccatgaacaacagctctagcctgatgaacacgcaggcgccgccctacagcatggcgcccgccatggtgaacagctcggcagcatctgtgggtcttgcagatatgatgtctcctggtgaatccaaactgcccctgcctctcaaagcagacggcaaagaagaaggcactccacagcccgagagcaagtcaaagaagtccagctcctccaccactactggggagaagatcacgaaggtgtacgagctggggaatgagccagagagaaagctctgggtcgaccgatactctccaaaaaaagaaagaaaaaatacaaaaaacaaaaacaaaaaaaaaagagggtaatgtacaagtttctgtatgtataaagtcatgctcgatttcaggagagcagctgatcacaatttgcttcatgaatcaaggtgtggaaatggttatatatggattgatttagaaaatggttaccagtacagtcaaaaaagagaaaatgaaaaaaatacaactaaaaggaagaaacacaacttcaaagatttttcagtgatgagaatccacatttgtatttcaagataatgtagtttaaaaaaaaaaaaaagaaaaaaacttgatgtaaattcctccttttcctctggcttaatgaatatcatttattcagtataaaatctttatatgttccacatgttaagaataaatgtacattaaatctttgttaagcactgtgatgggtgttcttgaatactgttctagtttccttaaagtggtttcctagtaatcaagttatttacaagaaataggggaatgcagcagtgtattcacattataaaaccctacatttggaagagacctttaggggttacctactttagagtggggagcaacagtttgattttctcaaattacttagctaattagtctttctttgaagcaattaactctaacgacattgaggtatgatcattttcagtatttatgggaggtggctgctgacccacttgaggtgagatctcagaagcttaactggcctgaaaatgtaacattctgccttttactaactccatcttagtttaatcaaagttcaatctattccttgtttcttctgtgtgcctcagagttattttgcatttagtttactccaccgtgtataatatttatactgtgcaatgttaaaaaagaatctgttatattgtatgtggtgtacatagtgcaaagtgatgatttctatttcagggcatattatggttctcatattccttcctacctggtgcacagtagctttttaatactagtcacttctaatttaaactttctcttcctgggtcattgactgttactgtgtaataatcgatttctttgaaactgctgcataattatgctgttagtggacctctacctcttctcttccctctcccaatcacagtatactcagaatccccagcccctcgcatacattgtgtcggttcacattactcacagtaatatatggaagagttagacaagaacatgcagttacagtcattgtgagacgtgactctccagtgtcacgaggaaaaaaatcatcttttctgcaaacagtctctcatctgtcaactcccacattactgagtcaaacagtcttcttacataacaatgcaaccaaatatatgttgaattaaagacccatttataattctgctttaaatacatctgcttgctaagaacagatttcagtgctccaagcttcaaatatggagatttgtaagagggaattcaatattattctaatttctctcttacagagtacaaataaaaggtgtatacaaactccgaacatatccagtattccaattcctttgtcaatcagaagagtaaaataattaacaaaagactgttgttatggtttgcattgtaaccgatacgcagagtctgaccgttgggcaacaagtttttctatcctgatgcgcaacacagtctctagagactaatccaggaagactttagcctcctttccatattctcacccccgaatcaagatttacagaagcccacgaagaatttacagcctgcttgagatcatcttgcctataaactgagttattgctttgtcctaaaaattagtcggtttttttttttctatgaggcttttcagaaatttacaggatgcccagactttacatgtgtaccaaaaaaaaaaaaaagataaaaaataaaggtgcaaagaaagtttagtattttggaat

SEQ ID NO: 297466 - DNA, 2440 bp, Homo sapiens
ggcggccgcgcaacaaaggagtcacccggcgatgagccccggcacccccggaccgaccatgggcagatcccagggcagcccaatggatccaatggtgatgaagagacctcagttgtatggcatgggcagtaaccctcattctcagcctcagcagagcagtccgtacccaggaggttcctatggccctccaggcccacagcggtatccaattggcatccagggtcggactcccggggccatggccggaatgcagtaccctcagcagcagatgccacctcagtatggacagcaaggtgtgagtggttactgccagcagggccaacagccatattacagccagcagccgcagcccccgcacctcccaccccaggcgcagtatctgccgtcccagtcccagcagaggtaccagccgcagcaggacatgtctcaggaaggctatggaactagatctcaacctcctctggcccccggaaaacctaaccatgaagacttgaacttaatacagcaagaaagaccatcaagtttaccagatctgtctggctccattgatgacctccccacgggaacggaagcaactttgagctcagcagtcagtgcatccgggtccacgagcagccaaggggatcagagcaacccggcgcagtcgcctttctccccacatgcgtcccctcatctctccagcatcccggggggcccatctccctctcctgttggctctcctgtaggaagcaaccagtctcgatctggcccaatctctcctgcaagtatcccaggtagtcagatgcctccgcagccacccgggagccagtcagaatccagttcccatcccgccttgagccagtcaccaatgccacaggaaagaggttttatggcaggcacacaaagaaaccctcagatggctcagtatggacctcaacagacaggaccatccatgtcgcctcatccttctcctgggggccagatgcatgctggaatcagtagctttcagcagagtaactcaagtgggacttacggtccacagatgagccagtatggaccacaaggtaactactccagacccccagcgtatagtggggtgcccagtgcaagctacagcggcccagggcccggtatgggtatcagtgccaacaaccagatgcatggacaagggccaagccagccatgtggtgctgtgcccctgggacgaatgccatcagctgggatgcagaacagaccatttcctggaaatatgagcagcatgacccccagttctcctggcatgtctcagcagggagggccaggaatggggccgccaatgccaactgtgaaccgtaaggcacaggaggcagccgcagcagtgatgcaggctgctgcgaactcagcacaaagcaggccaccatacattaggtcgcctgcttatcccagccagtctggggctggcggacgccccatgttttcttcccagcaccccaactatggcaactctcaggctcccatggtgcaccagcctgaccagtacgggcaaggcagtttccccggcatgaaccagagtggacttatggcttccagctctccctacagccagcccatgaacaacagctctagcctgatgaacacgcaggcgccgccctacagcatggcgcccgccatggtgaacagctcggcagcatctgtgggtcttgcagatatgatgtctcctggtgaatccaaactgcccctgcctctcaaagcagacggcaaagaagaaggcactccacagcccgagagcaagtcaaaggatagctacagctctcagggtatttctcagcccccaaccccaggcaacctgccagtcccttccccaatgtcccccagctctgctagcatctcctcatttcatggagatgaaagtgatagcattagcagcccaggctggccaaagactccatcaagccctaagtccagctcctccaccactactggggagaagatcacgaaggtgtacgagctggggaatgagccagagagaaagctctgggtcgaccgatacctcaccttcatggaagagagaggctctcctgtctcaagtctgcctgccgtgggcaagaagcccctggacctgttccgactctacgtctgcgtcaaagagatcgggggtttggcccaggttaataaaaacaagaagtggcgtgagctggcaaccaacctaaacgttggcacctcaagcagtgcagcgagctccctgaaaaagcagtatattcagtacctgtttgcctttgagtgcaagatcgaacgtggggaggagcccccgccggaagtcttcagcaccggggacaccaaaaagcagcccaagctccagccgccatctcctggctcgggaaccttgcaaaggccctggggcaggtgagagagaagctggtgcttttggggatttgagagaaggccagggtgcctgagaggtgggaaggtgcaactagtcacg

SEQ ID NO: 297467 - DNA, 1225 bp, Homo sapiens
ggcggccgcgcaacaaaggagtcacccggcgatgagccccggcacccccggaccgaccatgggcagatcccagggcagcccaatggatccaatggtgatgaagagacctcagttgtatggcatgggcagtaaccctcattctcagcctcagcagagcagtccgtacccaggaggttcctatggccctccaggcccacagcggtatccaattggcatccagggtcggactcccggggccatggccggaatgcagtaccctcagcagcagatgccacctcagtatggacagcaaggtgtgagtggttactgccagcagggccaacagccatattacagccagcagccgcagcccccgcacctcccaccccaggcgcagtatctgccgtcccagtcccagcagaggtaccagccgcagcaggacatgtctcaggaaggctatggaactagatctcaacctcctctggcccccggaaaacctaaccatgaagacttgaacttaatacagcaagaaagaccatcaagtttaccagatctgtctggctccattgatgacctccccacgggaacggaagcaactttgagctcagcagtcagtgcatccgggtccacgagcagccaaggggatcagagcaacccggcgcagtcgcctttctccccacatgcgtcccctcatctctccagcatcccggggggcccatctccctctcctgttggctctcctgtaggaagcaaccagtctcgatctggcccaatctctcctgcaagtatcccaggtagtcagatgcctccgcagccacccgggagccagtcagaatccagttcccatcccgccttgagccagtcaccaatgccacaggaaagaggttttatggcaggcacacaaagaaaccctcagatggctcagtatggacctcaacagacaggaccatccatgtcgcctcatccttctcctgggggccagatgcatgctggaatcagtagctttcagcagagtaactcaagtgggacttacggtccacagatgagccagtatggaccacaaggtagtcagatgcctccgcagccacccgggagccagtcagaatccagttcccatcccgccttgagccagtcaccaatgccacaggaaagaggttttatggcaggcacacaaagaaaccctcagatgctcagtatggacctcaacagacaggaccgtccatctacccatcttggcccgagtcta

SEQ ID NO: 297468 - DNA, 2121 bp, Homo sapiens
ttaagaataaatgtacattaaatctaccatcacttcgtagttaccacatcatgaaaaagaaactacgaagtgatggtagatttaaataattttttatttttattttatatattttttcattagggccatatctccaaaaaaagaaagaaaaaatacaaaaaacaaaaacaaaaaaaaaagagggtaatgtacaagtttctgtatgtataaagtcatgctcgatttcaggagagcagctgatcacaatttgcttcatgaatcaaggtgtggaaatggttatatatggattgatttagaaaatggttaccagtacagtcaaaaaagagaaaatgaaaaaaatacaactaaaaggaagaaacacaacttcaaagatttttcagtgatgagaatccacatttgtatttcaagataatgtagtttaaaacacaacttcaaagatttttcagtgatgagaatccacatttgtatttcaagataatgtagtttaaaaaaaaaaaaaagaaaaaaacttgatgtaaattcctccttttcctctggcttaatgaatatcatttattcagtataaaatctttatatgttccacatgttaagaataaatgtacattaaatctttgttaagcactgtgatgggtgttcttgaatactgttctagtttccttaaagtggtttcctagtaatcaagttatttacaagaaataggggaatgcagcagtgtattcacattataaaaccctacatttggaagagacctttaggggttacctactttagagtggggagcaacagtttgattttctcaaattacttagctaattagtctttctttgaagcaattaactctaacgacattgaggtatgatcattttcagtatttatgggaggtggctgctgacccacttgaggtgagatctcagaagcttaactggcctgaaaatgtaacattctgccttttactaactccatcttagtttaatcaaagttcaatctattccttgtttcttctgtgtgcctcagagttattttgcatttagtttactccaccgtgtataatatttatactgtgcaatgttaaaaaagaatctgttatattgtatgtggtgtacatagtgcaaagtgatgatttctatttcagggcatattatggttctcatattccttcctacctggtgcacagtagctttttaatactagtcacttctaatttaaactttctcttcctgggtcattgactgttactgtgtaataatcgatttctttgaaactgctgcataattatgctgttagtggacctctacctcttctcttccctctcccaatcacagtatactcagaatccccagcccctcgcatacattgtgtcggttcacattactcacagtaatatatggaagagttagacaagaacatgcagttacagtcattgtgagacgtgactctccagtgtcacgaggaaaaaaatcatcttttctgcaaacagtctctcatctgtcaactcccacattactgagtcaaacagtcttcttacataacaatgcaaccaaatatatgttgaattaaagacccatttataattctgctttaaatacatctgcttgctaagaacagatttcagtgctccaagcttcaaatatggagatttgtaagagggaattcaatattattctaatttctctcttacagagtacaaataaaaggtgtatacaaactccgaacatatccagtattccaattcctttgtcaatcagaagagtaaaataattaacaaaagactgttgttatggtttgcattgtaaccgatacgcagagtctgaccgttgggcaacaagtttttctatcctgatgcgcaacacagtctctagagactaatccaggaagactttagcctcctttccatattctcacccccgaatcaagatttacagaagcccacgaagaatttacagcctgcttgagatcatcttgcctataaactgagttattgctttgtcctaaaaattagtcggtttttttttttctatgaggcttttcagaaatttacaggatgcccagactttacatgtgtaccaaaaaaaaaaaaaagataaaaaataaaggtgcaaagaaagtttagtattttggaat

SEQ ID NO: 297469 - DNA, 315 bp, Homo sapiens
atgtaatgagaaatcacccaaaagaaggtagtttgaaatttgaggccagacgcggtggctcacgcctgtaatcccagctctttgggaggccaaggtgggcggatcacttgaggtcgggagttcaagaccagcctgaccaacatggagaaaccctatctctactaaaaatacaaaattagccaggtgtggtggtgcctgcctgtaatcccagctactcggaatgctgaggcaggagaatcgcttgaacccaggaggcagaggttgtggtgagccgagatcacgccattgcacttcagcctgggcaacaagagcgaa

SEQ ID NO: 297470 - DNA, 783 bp, Homo sapiens
ccactttaggccaccatacattaggtcgcctgcttatcccagccagtctggggctggcggacgccccatgttttcttcccagcaccccaactatggcaactctcaggctcccatggtgcaccagcctgaccagtacgggtaggtagcaacacaccccgacttgctgcgggacctgggcgttttctctgaaactgttaacgatcgtgccgtctggccgcgaaaggaacacccaaaccaagaaagcgaaacacctaacagaaaatccatctccaagggggttgtccttctgtccatttttgttggtgtgtttgtttcgttttcctttcgtattaacagtactgtggccgttcggtggaaacccgcatgcgtcctcaggccctgtctgtgcatggctttcggcatggctgctttccttcatgcctgagagggaaatagaaactttgatctgtgtcgaagacatgatgtcaccacctctggcgtcatttcccccattgttgtcattgttttgtctaggaacctgtgttgtgcagcgctgttctcatgactatattatcactcctgctgctacagtgagcggctgccatacccacccccaaattaagagcacagcatctcatttgacaagagactcactgcagttgagctgacaggctattcataggacttaggaggagtttcattatatcaccaccaagcaaatgtctgtgccaaaaacttctattattttttctccagcgagtatcagaatattgaagtcaccaggaaaatacaacaaaataatcc

SEQ ID NO: 297471 - DNA, 1071 bp, Homo sapiens
  misc_feature (1067)..(1067): n is a, c, g, or t
ggcggccgcgcaacaaaggagtcacccggcgatgagccccggcacccccggaccgaccatgggcagatcccagggcagcccaatggatccaatggtgatgaagagacctcagttgtatggcatgggcagtaaccctcattctcagcctcagcagagcagtccgtacccaggaggttcctatggccctccaggcccacagcggtatccaattggcatccagggtcggactcccggggccatggccggaatgcagtaccctcagcagcagatgccacctcagtatggacagcaaggtgtgagtggttactgccagcagggccaacagccatattacagccagcagccgcagcccccgcacctcccaccccaggcgcagtatctgccgtcccagtcccagcagaggtaccagccgcagcaggacatgtctcaggaaggctatggaactagatctcaacctcctctggcccccggaaaacctaaccatgaagacttgaacttaatacagcaagaaagaccatcaagtttaccagtaagacattattgtgctgatttggaaatgtaatgagttaaagacttttagaaagagctgttgtttttgtttgttctactttatattatgacatgattgagaagtttctagacttcaggtttattttgtggtcaatttttcaaggtttaccttttaggagctctgtagtcctggataagtctatttcatgtgtatatatctctgttgcagagtgtagacatcagttggaaggttttatgcggctggtcgattttgtgtgcaggtggttattgctgttgtacagttgagctttctttaggctgttgctttttggcagcgatacagaacagaggtgtccttagaggagtcaaaacttaaaagaaatttgcactttgcaaaggatacaaatgatgagataaaatacctgatagtaatttgaatttcttctaggactttctatttatgtaatgagaaatcacccaaaagaaggtagtttgaaatttgagcccctgccccccgtcacttctattctctttctacttagtcccatgactaaaangcgg

SEQ ID NO: 297472 - DNA, 2266 bp, Homo sapiens
ggcggccgcgcaacaaaggagtcacccggcgatgagccccggcacccccggaccgaccatgggcagatcccagggcagcccaatggatccaatggtgatgaagagacctcagttgtatggcatgggcagtaaccctcattctcagcctcagcagagcagtccgtacccaggaggttcctatggccctccaggcccacagcggtatccaattggcatccagggtcggactcccggggccatggccggaatgcagtaccctcagcagcagatgccacctcagtatggacagcaaggtgtgagtggttactgccagcagggccaacagccatattacagccagcagccgcagcccccgcacctcccaccccaggcgcagtatctgccgtcccagtcccagcagaggtaccagccgcagcaggacatgtctcaggaaggctatggaactagatctcaacctcctctggcccccggaaaacctaaccatgaagacttgaacttaatacagcaagaaagaccatcaagtttaccagatctgtctggctccattgatgacctccccacgggaacggaagcaactttgagctcagcagtcagtgcatccgggtccacgagcagccaaggggatcagagcaacccggcgcagtcgcctttctccccacatgcgtcccctcatctctccagcatcccggggggcccatctccctctcctgttggctctcctgtaggaagcaaccagtctcgatctggcccaatctctcctgcaagtatcccaggtagtcagatgcctccgcagccacccgggagccagtcagaatccagttcccatcccgccttgagccagtcaccaatgccacaggaaagaggttttatggcaggcacacaaagaaaccctcagatggctcagtatggacctcaacagacaggaccatccatgtcgcctcatccttctcctgggggccagatgcatgctggaatcagtagctttcagcagagtaactcaagtgggacttacggtccacagatgagccagtatggaccacaaggtaactactccagacccccagcgtatagtggggtgcccagtgcaagctacagcggcccagggcccggtatgggtatcagtgccaacaaccagatgcatggacaagggccaagccagccatgtggtgctgtgcccctgggacgaatgccatcagctgggatgcagaacagaccatttcctggaaatatgagcagcatgacccccagttctcctggcatgtctcagcagggagggccaggaatggggccgccaatgccaactgtgaaccgtaaggcacaggaggcagccgcagcagtgatgcaggctgctgcgaactcagcacaaagcaggcaaggcagtttccccggcatgaaccagagtggacttatggcttccagctctccctacagccagcccatgaacaacagctctagcctgatgaacacgcaggcgccgccctacagcatggcgcccgccatggtgaacagctcggcagcatctgtgggtcttgcagatatgatgtctcctggtgaatccaaactgcccctgcctctcaaagcagacggcaaagaagaaggcactccacagcccgagagcaagtcaaagaagtccagctcctccaccactactggggagaagatcacgaaggtgtacgagctggggaatgagccagagagaaagctctgggtcgaccgatacctcaccttcatggaagagagaggctctcctgtctcaagtctgcctgccgtgggcaagaagcccctggacctgttccgactctacgtctgcgtcaaagagatcgggggtttggcccaggttaataaaaacaagaagtggcgtgagctggcaaccaacctaaacgttggcacctcaagcagtgcagcgagctccctgaaaaagcagtatattcagtacctgtttgcctttgagtgcaagatcgaacgtggggaggagcccccgccggaagtcttcagcaccggggacaccaaaaagcagcccaagctccagccgccatctcctggtaagtggcggcgctgcagtcactggcccaggaaagcccaggcgcctggcctgggaggttccgggaaggtggtttcacagtcaggccaacagggaacttgggacttttgagaggtggggggttcctgtgtcgttttgtttatttaattggacgcccactggcagtgttaagggatgagagaattaaatctgggatatggccatttctggttgacacttggaagg

SEQ ID NO: 297473 - DNA, 910 bp, Homo sapiens
ggcggccgcgcaacaaaggagtcacccggcgatgagccccggcacccccggaccgaccatgggcagatcccagggcagcccaatggatccaatggtgatgaagagacctcagttgtatggcatgggcagtaaccctcattctcagcctcagcagagcagtccgtacccaggaggttcctatggccctccaggcccacagcggtatccaattggcatccagggtcggactcccggggccatggccggaatgcagtaccctcagcagcagatgccacctcagtatggacagcaaggtgtgagtggttactgccagcagggccaacagccatattacagccagcagccgcagcccccgcacctcccaccccaggcgcagtatctgccgtcccagtcccagcagaggtaccagccgcagcaggacatgtctcaggaaggctatggaactagatctcaacctcctctggcccccggaaaacctaaccatgaagacttgaacttaatacagcaagaaagaccatcaagtttaccagtaagacattattgtgctgatttggaaatgtaatgagttaaagacttttagaaagagctgttgtttttgtttgttctactttatattatgacatgattgagaagtttctagacttcaggtttattttgtggtcaatttttcaaggtttaccttttaggagctctgtagtcctggataagtctatttcatgtgtatatatctctgttgcagagtgtagacatcagttggaaggttttatgcggctggtcgattttgtgtgcaggtggttattgctgttgtacagttgagctttctttaggctgttgctttttggcagcgtgaagaattgcactttgcaaggatacagatagactttctatttatgttatgagagatcacccc

SEQ ID NO: 297474 - DNA, 470 bp, Homo sapiens
gccaccgcacccagctgaggtttgtgttttgaagcgctatttcacagaagaaagtctgtctagcctttcttagacctatgtgaccatacctgtaatttcctcaatgatttaattctaagagtcttttttcaaacagactttattttttagagcagttttaggctgacagcaaaactgagcagcagattgtagggatctctcataccctccctccccacaagcaagcacaacctcccccattctcacagccctggcagaggggtccggttgttgacatccatgcgcctggtaggcacatcgcccagagcccgtagtatgctgagcactccctccgccctctcggggggcatatgccctgggtggggacacatgcataatgcacatgtttaaagacatttttatgagtttgaaaattacttttttttttttttttgagacggagtctcaaacaacaacaacaacaacaacaa

SEQ ID NO: 297475 - DNA, 506 bp, Homo sapiens
tgcttttaaaagtccttttaatacagcatgaagaggctatatttctataggcgagccgtatacagattctccaggaataaggcacacaacggaatgccatcccaagggctgcacttcggagacgtcggagccttctccacgcaccttccgagctgggcccacgggttctgttttgtctttttagctggactcacacgtatggacagacacagacacggacggggtcaccgcatgggggcggaggaggtcggacggcaagaatggtgtgattttcgtggtgcctgccctgccatggccgggggcagcaggcacacatgacttgagttggcattcctgacctagatgatccctaaagatccttccaatgcaaatagttccatgagtagacagcacacaggcttgagaagtggacagagtccaagtcctggccactgcttctgcacacctctgggcatgtaacagaggctagtttttgccaggcttgggccacttgggtgctgggcttt

SEQ ID NO: 297476 - DNA, 490 bp, Homo sapiens
tgcttttaaaagtccttttaatacagcatgaagaggctatatttctataggcgagccgtatacagattctccaggaataaggcacacaacggaatgccatcccaagggctgcacttcggagacgtcggagccttctccacgcaccttccgagctgggcccacgggttctgttttgtctttttagctggactcacacgtatggacagacacagacacggacggggtcaccgcatgggggcggaggaggtcggacggcaaggttggcaacagagaaggataagcccgctgccacagcccccaggggaccgcttggccatctcgctgaaggctggaacacccccatttcagggttagtcgttggactgagctacaatgtagtgaggttggattaaatattcgtttagagtagattcaagtctattagatgctggagggctggtgtaagggctccggttgacatttccaagttcaaggagcatggcctggagga

SEQ ID NO: 297477 - DNA, 2242 bp, Homo sapiens
ggctccgagggggcggggcggaagaaggcggggagggagggggcggcaccgccggtcggctccagtcgcctccggaggaaggaagaagaggacgccgggcgcgcagctcggtgctgattatcacaactgtttggtgacctacttcactgacctgtgaggattccttcccttcaagtactggattcttgatctttctgcatcatcaagaatggaaacagactgtaatcccatggagctaagcagtatgtcaggatttgaagaaggttcagagctgaacggttttgaaggaactgacatgaaagacatgaggctcgaagctgaagcagttgtaaatgatgttctctttgctgttaacaacatgtttgtctcgaaaagcctgcggtgtgcggatgatgtggcctatatcaatgtggaaacaaaggaaagaaacagatattgcctagaactcactgaagcagggctcaaggtggtaggctatgcttttgaccaggtagatgatcatttacagactccctaccatgaaacagtctactccttgttggatacactcagccccgcctaccgagaagcatttggaaacgcactgcttcaaagactggaagctttgaaaagagatggacagtcatgactacactttttcctttcagaggggctggtgctggtacagaatgttgatataaagcttaaaattcttgcatatggtcatagaaaatgcatctttggttttgtgtttttatcacttgcttccaacttaggcttttggctcagaagattattgaataatgatttgtcttagtttctgtttcagtaagggaattctgaggccgttgctatgataccatcattaagacattcacatgtcttcatataatatctcttcatttcaaatcctaatcactatttcatactattacagggctttgatgctgccagcactgtcttttacataggaaattctagatttgcacagtaatagaggaattagaagtacctaactatacactttgattcagcctgctaaatcaggggttcaatactagcttggacaaactttgtagtaattaattgctaccagccttattggaaacaaattatcaactagtttcccctgcacaaattttgaaattcactgcttcacttaatctatttatattactaataatggattaataaagatgaattaattatatattacttaactagtattaaatgaaaaacagggactgaaatagttctgtattccgtgtttgcaacagccagccaactaagcagaggataaaccgttagcaaatgaatgtaataattactcatttccaagatatctaagcacataagcaaatacaggaacagacttcattctttttcttaacaaaaaagcatcttcagtgtgtgatttaaaagaaagaagattctggtttcctagaaaacaatattttggcctgtgttgattcttattctgaatgtgtgtttacataatgtacagtatatattcagaaagtatttttgcttcaacgtttactttctatgatgtagtgctttggtattcctacagcaccccaccttccccaacagatgtacagtgttctgtctccattcgaaatctacaatgtaatatgagtgcattgtatgggtttgaaaccaaaggatgaatgaagcattcagagacttaatatttgaaaaaggaatagtcagtattttatattttattacaggtactgatatttataaatttaataaactgtaccatgctgctgcatgttttcaagtacatgttgaacagtaaggattggggagttgttttttaatggtcacctaaagcagctgctatagaaatgttgaactaaaattttgcatctggtcataccttcatgcatttatcatttgcagatatttttccatcattattaaaaaacaggaacttttaggctctgaagatcatgtggaccagagcaaattaaagttcagtttgtgtcacaattcattgccagacttcattggaatgctttgtttgatgatgtatgttcattctcagctttattttcagatgcttaactgggcaatgaagtctaacttcaggttgaactttctcatgtttaatctcaggctaaatgtaaatgatatttgtaaagtttgaataaaattctgtttactcattttgagttagtatgaaaaaaagtgattgtatgtttaagaattgaaattgttcattttgtgataaatgattaattccaaaaaaaaaaat

SEQ ID NO: 297478 - DNA, 2190 bp, Homo sapiens
ggctccgagggggcggggcggaagaaggcggggagggagggggcggcaccgccggtcggctccagtcgcctccggaggaaggaagaagaggacgccgggcgcgcagctcggtgctgattatcacaactgtttggtgacctacttcactgacctgtgaggattccttcccttcaagtactggattcttgatctttctgcatcatcaagaatggaaacagactgtaatcccatggagctaagcagtatgtcaggatttgaagaaggttcagagctgaacggttttgaaggaactgacatgaaagacatgaggctcgaagctgaagcagttgtaaatgatgttctctttgctgttaacaacatgtttgtctcgaaaagcctgcggtgtgcggatgatgtggcctatatcaatgtggaaacaaaggaaagaaacagatattgcctagaactcactgaagcagggctcaaggtggtaggctatgcttttgaccaggtagatgatcatttacagactccctaccatgaaacagtctactccttgttggatacactcagccccgcctaccgagaagcatttggaaacgcactgcttcaaagactggaagctttgaaaagagatggacagtcatgactacactttttcctttcagaggggctggtgctggtacagaatgttgatataaagcttaaaattcttgcatatggtcatagaaaatgcatctttggttttgtgtttttatcacttgcttccaacttaggcttttggctcagaagattattgaataatgatttgtcttagtttctgtttcagtaagggaattctgaggccgttgctatgataccatcattaagacattcacatgtcttcatataatatctcttcatttcaaatcctaatcactatttcatactattacagggctttgatgctgccagcactgtcttttacataggaaattctagatttgcacagtaatagaggaattagaagtacctaactatacactttgattcagcctgctaaatcaggggttcaatactagcttggacaaactttgtagtaattaattgctaccagccttattggaaacaaattatcaactagtttcccctgcacaaattttgaaattcactgcttcacttaatctatttatattactaataatggattaataaagatgaattaattatatattacttaactagtattaaatgaaaaacagggactgaaatagttctgtattccgtgtttgcaacagccagccaactaagcagaggataaaccgttagcaaatgaatgtaataattactcatttccaagatatctaagcacataagcaaatacaggaacagacttcattctttttcttaacaaaaaagcatcttcagtgtgtgatttaaaagaaagaagattctggtttcctagaaaacaatattttggcctgtgttgattcttattctgaatgtgtgtttacataatgtacagtatatattcagaaagtatttttgcttcaacgtttactttctatgatgtagtgctttggtattcctacagcaccccaccttccccaacagatgtacagtgttctgtctccattcgaaatctacaatgtaatatgagtgcattgtatgggtttgaaaccaaaggatgaatgaagcattcagagacttaatatttgaaaaaggaatagtcagtattttatattttattacaggtactgatatttataaatttaataaactgtaccatgctgctgcatgttttcaagtacatgttgaacagtaaggattggggagttgttttttaatggtcacctaaagcagctgctatagaaatgttgaactaaaattttgcatctggtcataccttcatgcatttatcatttgcagatatttttccatcattattaaaaaacaggaacttttaggctctgaagatcatgtggaccagagcaaattaaagttcagtttgtgtcacaattcattgccagacttcattggaatgctttgtttgatgatgtatgttcattctcagctttattttcagatgcttaactgggcaatgaagtctaacttcaggttgaactttctcatgtttaatctcaggctaaatgtaaatgatatttgtaaagtttgaataaaattctgtttactcattttgagttagtatgaaaaaaagtgattgtatgttta

SEQ ID NO: 297479 - DNA, 2389 bp, Homo sapiens
  misc_feature (2378)..(2378): n is a, c, g, or t
ggctccgagggggcggggcggaagaaggcggggagggagggggcggcaccgccggtcggctccagtcgcctccggaggaaggaagaagaggacgccgggcgcgcagctcggtgctgattatcacaactgtttggtgacctacttcactgacctgtgaggattccttcccttcaagtactggattcttgatctttctgcatcatcaagaatggaaacagactgtaatcccatggagctaagcagtatgtcaggatttgaagaaggttcagagctgaacggttttgaaggaactgacatgaaagacatgaggctcgaagctgaagcagttgtaaatgatgttctctttgctgttaacaacatgtttgtctcgaaaagcctgcggtgtgcggatgatgtggcctatatcaatgtggaaacaaaggaaagaaacagatattgcctagaactcactgaagcagggctcaaggtggtaggctatgcttttgaccaggtagatgatcatttacagactccctaccatgaaacagtctactccttgttggatacactcagccccgcctaccgagaagcatttggaaacgcactgcttcaaagactggaagctttgaaaagagatggacagtcatgactacactttttcctttcagaggggctggtgctggtacagaatgttgatataaagcttaaaattcttgcatatggtcatagaaaatgcatctttggttttgtgtttttatcacttgcttccaacttaggcttttggctcagaagattattgaataatgatttgtcttagtttctgtttcagtaagggaattctgaggccgttgctatgataccatcattaagacattcacatgtcttcatataatatctcttcatttcaaatcctaatcactatttcatactattacagggctttgatgctgccagcactgtcttttacataggaaattctagatttgcacagtaatagaggaattagaagtacctaactatacactttgattcagcctgctaaatcaggggttcaatactagcttggacaaactttgtagtaattaattgctaccagccttattggaaacaaattatcaactagtttcccctgcacaaattttgaaattcactgcttcacttaatctatttatattactaataatggattaataaagatgaattaattatatattacttaactagtattaaatgaaaaacagggactgaaatagttctgtattccgtgtttgcaacagccagccaactaagcagaggataaaccgttagcaaatgaatgtaataattactcatttccaagatatctaagcacataagcaaatacaggaacagacttcattctttttcttaacaaaaaagcatcttcagtgtgtgatttaaaagaaagaagattctggtttcctagaaaacaatattttggcctgtgttgattcttattctgaatgtgtgtttacataatgtacagtatatattcagaaagtatttttgcttcaacgtttactttctatgatgtagtgctttggtattcctacagcaccccaccttccccaacagatgtacagtgttctgtctccattcgaaatctacaatgtaatatgagtgcattgtatgggtttgaaaccaaaggatgaatgaagcattcagagacttaatatttgaaaaaggaatagtcagtattttatattttattacaggtactgatatttataaatttaataaactgtaccatgctgctgcatgttttcaagtacatgttgaacagtaaggattggggagttgttttttaatggtcacctaaagcagctgctatagaaatgttgaactaaaattttgcatctggtcataccttcatgcatttatcatttgcagatatttttccatcattattaaaaaacaggaacttttaggctctgaagatcatgtggaccagagcaaattaaagttcagtttgtgtcacaattcattgccagacttcattggaatgctttgtttgatgatgtatgttcattctcagctttattttcagatgcttaactgggcaatgaagtctaacttcaggttgaactttctcatgtttaatctcaggctaaatgtaaatgatatttgtaaagtttgaataaaattctgtttactcattttgagttagtatgaaaaaaagtgattgtatgtttagactggatgtcattgtgataatgattatccagaaaaaaaaaagggggggctaagttcccgagggccagttagcgtccgttgaaagggctaagggggaaaaaaaaccgggggtaacgggaacgtctggtctgggcctttgggttggacccacaaagcggaaaattgaagtcggtggtgtatataatagnagtactataaa

SEQ ID NO: 297480 - DNA, 2192 bp, Homo sapiens
ggctccgagggggcggggcggaagaaggcggggagggagggggcggcaccgccggtcggctccagtcgcctccggaggaaggaagaagaggacgccgggcgcgcagctcggtgctgattatcacaactgtttggtgacctacttcactgacctgtgaggattccttcccttcaagtactggattcttgatctttctgcatcatcaagaatggaaacagactgtaatcccatggagctaagcagtatgtcaggatttgaagaaggttcagagctgaacggttttgaaggaactgacatgaaagacatgaggctcgaagctgaagcagttgtaaatgatgttctctttgctgttaacaacatgtttgtctcgaaaagcctgcggtgtgcggatgatgtggcctatatcaatgtggaaacaaaggaaagaaacagatattgcctagaactcactgaagcagggctcaaggtggtaggctatgcttttgaccaggtagatgatcatttacagactccctaccatgaaacagtctactccttgttggatacactcagccccgcctaccgagaagcatttggaaacgcactgcttcaaagactggaagctttgaaaagagatggacagtcatgactacactttttcctttcagaggggctggtgctggtacagaatgttgatataaagcttaaaattcttgcatatggtcatagaaaatgcatctttggttttgtgtttttatcacttgcttccaacttaggcttttggctcagaagattattgaataatgatttgtcttagtttctgtttcagtaagggaattctgaggccgttgctatgataccatcattaagacattcacatgtcttcatataatatctcttcatttcaaatcctaatcactatttcatactattacagggctttgatgctgccagcactgtcttttacataggaaattctagatttgcacagtaatagaggaattagaagtacctaactatacactttgattcagcctgctaaatcaggggttcaatactagcttggacaaactttgtagtaattaattgctaccagccttattggaaacaaattatcaactagtttcccctgcacaaattttgaaattcactgcttcacttaatctatttatattactaataatggattaataaagatgaattaattatattccgtgtttgcaacagccagccaactaagcagaggataaaccgttagcaaatgaatgtaataattactcatttccaagatatctaagcacataagcaaatacaggaacagacttcattctttttcttaacaaaaaagcatcttcagtgtgtgatttaaaagaaagaagattctggtttcctagaaaacaatattttggcctgtgttgattcttattctgaatgtgtgtttacataatgtacagtatatattcagaaagtatttttgcttcaacgtttactttctatgatgtagtgctttggtattcctacagcaccccaccttccccaacagatgtacagtgttctgtctccattcgaaatctacaatgtaatatgagtgcattgtatgggtttgaaaccaaaggatgaatgaagcattcagagacttaatatttgaaaaaggaatagtcagtattttatattttattacaggtactgatatttataaatttaataaactgtaccatgctgctgcatgttttcaagtacatgttgaacagtaaggattggggagttgttttttaatggtcacctaaagcagctgctatagaaatgttgaactaaaattttgcatctggtcataccttcatgcatttatcatttgcagatatttttccatcattattaaaaaacaggaacttttaggctctgaagatcatgtggaccagagcaaattaaagttcagtttgtgtcacaattcattgccagacttcattggaatgctttgtttgatgatgtatgttcattctcagctttattttcagatgcttaactgggcaatgaagtctaacttcaggttgaactttctcatgtttaatctcaggctaaatgtaaatgatatttgtaaagtttgaataaaattctgtttactcattttgagttagtatgaaaaaaagtgattgtatgtttaagaattgaaattgttcattttgtgataaatgattaattccaaaaaaaaaaat

SEQ ID NO: 297481 - DNA, 2209 bp, Homo sapiens
ggctccgagggggcggggcggaagaaggcggggagggagggggcggcaccgccggtcggctccagtcgcctccggaggaaggaagaagaggacgccgggcgcgcagctcggtgctgattatcacaactgtttggtgacctacttcactgacctgtgaggattccttcccttcaaaatggaaacagactgtaatcccatggagctaagcagtatgtcaggatttgaagaaggttcagagctgaacggttttgaaggaactgacatgaaagacatgaggctcgaagctgaagcagttgtaaatgatgttctctttgctgttaacaacatgtttgtctcgaaaagcctgcggtgtgcggatgatgtggcctatatcaatgtggaaacaaaggaaagaaacagatattgcctagaactcactgaagcagggctcaaggtggtaggctatgcttttgaccaggtagatgatcatttacagactccctaccatgaaacagtctactccttgttggatacactcagccccgcctaccgagaagcatttggaaacgcactgcttcaaagactggaagctttgaaaagagatggacagtcatgactacactttttcctttcagaggggctggtgctggtacagaatgttgatataaagcttaaaattcttgcatatggtcatagaaaatgcatctttggttttgtgtttttatcacttgcttccaacttaggcttttggctcagaagattattgaataatgatttgtcttagtttctgtttcagtaagggaattctgaggccgttgctatgataccatcattaagacattcacatgtcttcatataatatctcttcatttcaaatcctaatcactatttcatactattacagggctttgatgctgccagcactgtcttttacataggaaattctagatttgcacagtaatagaggaattagaagtacctaactatacactttgattcagcctgctaaatcaggggttcaatactagcttggacaaactttgtagtaattaattgctaccagccttattggaaacaaattatcaactagtttcccctgcacaaattttgaaattcactgcttcacttaatctatttatattactaataatggattaataaagatgaattaattatatattacttaactagtattaaatgaaaaacagggactgaaatagttctgtattccgtgtttgcaacagccagccaactaagcagaggataaaccgttagcaaatgaatgtaataattactcatttccaagatatctaagcacataagcaaatacaggaacagacttcattctttttcttaacaaaaaagcatcttcagtgtgtgatttaaaagaaagaagattctggtttcctagaaaacaatattttggcctgtgttgattcttattctgaatgtgtgtttacataatgtacagtatatattcagaaagtatttttgcttcaacgtttactttctatgatgtagtgctttggtattcctacagcaccccaccttccccaacagatgtacagtgttctgtctccattcgaaatctacaatgtaatatgagtgcattgtatgggtttgaaaccaaaggatgaatgaagcattcagagacttaatatttgaaaaaggaatagtcagtattttatattttattacaggtactgatatttataaatttaataaactgtaccatgctgctgcatgttttcaagtacatgttgaacagtaaggattggggagttgttttttaatggtcacctaaagcagctgctatagaaatgttgaactaaaattttgcatctggtcataccttcatgcatttatcatttgcagatatttttccatcattattaaaaaacaggaacttttaggctctgaagatcatgtggaccagagcaaattaaagttcagtttgtgtcacaattcattgccagacttcattggaatgctttgtttgatgatgtatgttcattctcagctttattttcagatgcttaactgggcaatgaagtctaacttcaggttgaactttctcatgtttaatctcaggctaaatgtaaatgatatttgtaaagtttgaataaaattctgtttactcattttgagttagtatgaaaaaaagtgattgtatgtttaagaattgaaattgttcattttgtgataaatgattaattccaaaaaaaaaaat

SEQ ID NO: 297482 - DNA, 2141 bp, Homo sapiens
ggctccgagggggcggggcggaagaaggcggggagggagggggcggcaccgccggtcggctccagtcgcctccggaggaaggaagaagaggacgccgggcgcgcagaatggaaacagactgtaatcccatggagctaagcagtatgtcaggatttgaagaaggttcagagctgaacggttttgaaggaactgacatgaaagacatgaggctcgaagctgaagcagttgtaaatgatgttctctttgctgttaacaacatgtttgtctcgaaaagcctgcggtgtgcggatgatgtggcctatatcaatgtggaaacaaaggaaagaaacagatattgcctagaactcactgaagcagggctcaaggtggtaggctatgcttttgaccaggtagatgatcatttacagactccctaccatgaaacagtctactccttgttggatacactcagccccgcctaccgagaagcatttggaaacgcactgcttcaaagactggaagctttgaaaagagatggacagtcatgactacactttttcctttcagaggggctggtgctggtacagaatgttgatataaagcttaaaattcttgcatatggtcatagaaaatgcatctttggttttgtgtttttatcacttgcttccaacttaggcttttggctcagaagattattgaataatgatttgtcttagtttctgtttcagtaagggaattctgaggccgttgctatgataccatcattaagacattcacatgtcttcatataatatctcttcatttcaaatcctaatcactatttcatactattacagggctttgatgctgccagcactgtcttttacataggaaattctagatttgcacagtaatagaggaattagaagtacctaactatacactttgattcagcctgctaaatcaggggttcaatactagcttggacaaactttgtagtaattaattgctaccagccttattggaaacaaattatcaactagtttcccctgcacaaattttgaaattcactgcttcacttaatctatttatattactaataatggattaataaagatgaattaattatatattacttaactagtattaaatgaaaaacagggactgaaatagttctgtattccgtgtttgcaacagccagccaactaagcagaggataaaccgttagcaaatgaatgtaataattactcatttccaagatatctaagcacataagcaaatacaggaacagacttcattctttttcttaacaaaaaagcatcttcagtgtgtgatttaaaagaaagaagattctggtttcctagaaaacaatattttggcctgtgttgattcttattctgaatgtgtgtttacataatgtacagtatatattcagaaagtatttttgcttcaacgtttactttctatgatgtagtgctttggtattcctacagcaccccaccttccccaacagatgtacagtgttctgtctccattcgaaatctacaatgtaatatgagtgcattgtatgggtttgaaaccaaaggatgaatgaagcattcagagacttaatatttgaaaaaggaatagtcagtattttatattttattacaggtactgatatttataaatttaataaactgtaccatgctgctgcatgttttcaagtacatgttgaacagtaaggattggggagttgttttttaatggtcacctaaagcagctgctatagaaatgttgaactaaaattttgcatctggtcataccttcatgcatttatcatttgcagatatttttccatcattattaaaaaacaggaacttttaggctctgaagatcatgtggaccagagcaaattaaagttcagtttgtgtcacaattcattgccagacttcattggaatgctttgtttgatgatgtatgttcattctcagctttattttcagatgcttaactgggcaatgaagtctaacttcaggttgaactttctcatgtttaatctcaggctaaatgtaaatgatatttgtaaagtttgaataaaattctgtttactcattttgagttagtatgaaaaaaagtgattgtatgtttaagaattgaaattgttcattttgtgataaatgattaattccaaaaaaaaaaat

SEQ ID NO: 297483 - DNA, 2188 bp, Homo sapiens
ggctccgagggggcggggcggaagaaggcggggagggagggggcggcaccgccggtcggctccagtcgcctccggaggaaggaagaagaggacgccgggcgcgcagctcggtgctgattatcacaactgtttggtgacctacttcactgacctaatggaaacagactgtaatcccatggagctaagcagtatgtcaggatttgaagaaggttcagagctgaacggttttgaaggaactgacatgaaagacatgaggctcgaagctgaagcagttgtaaatgatgttctctttgctgttaacaacatgtttgtctcgaaaagcctgcggtgtgcggatgatgtggcctatatcaatgtggaaacaaaggaaagaaacagatattgcctagaactcactgaagcagggctcaaggtggtaggctatgcttttgaccaggtagatgatcatttacagactccctaccatgaaacagtctactccttgttggatacactcagccccgcctaccgagaagcatttggaaacgcactgcttcaaagactggaagctttgaaaagagatggacagtcatgactacactttttcctttcagaggggctggtgctggtacagaatgttgatataaagcttaaaattcttgcatatggtcatagaaaatgcatctttggttttgtgtttttatcacttgcttccaacttaggcttttggctcagaagattattgaataatgatttgtcttagtttctgtttcagtaagggaattctgaggccgttgctatgataccatcattaagacattcacatgtcttcatataatatctcttcatttcaaatcctaatcactatttcatactattacagggctttgatgctgccagcactgtcttttacataggaaattctagatttgcacagtaatagaggaattagaagtacctaactatacactttgattcagcctgctaaatcaggggttcaatactagcttggacaaactttgtagtaattaattgctaccagccttattggaaacaaattatcaactagtttcccctgcacaaattttgaaattcactgcttcacttaatctatttatattactaataatggattaataaagatgaattaattatatattacttaactagtattaaatgaaaaacagggactgaaatagttctgtattccgtgtttgcaacagccagccaactaagcagaggataaaccgttagcaaatgaatgtaataattactcatttccaagatatctaagcacataagcaaatacaggaacagacttcattctttttcttaacaaaaaagcatcttcagtgtgtgatttaaaagaaagaagattctggtttcctagaaaacaatattttggcctgtgttgattcttattctgaatgtgtgtttacataatgtacagtatatattcagaaagtatttttgcttcaacgtttactttctatgatgtagtgctttggtattcctacagcaccccaccttccccaacagatgtacagtgttctgtctccattcgaaatctacaatgtaatatgagtgcattgtatgggtttgaaaccaaaggatgaatgaagcattcagagacttaatatttgaaaaaggaatagtcagtattttatattttattacaggtactgatatttataaatttaataaactgtaccatgctgctgcatgttttcaagtacatgttgaacagtaaggattggggagttgttttttaatggtcacctaaagcagctgctatagaaatgttgaactaaaattttgcatctggtcataccttcatgcatttatcatttgcagatatttttccatcattattaaaaaacaggaacttttaggctctgaagatcatgtggaccagagcaaattaaagttcagtttgtgtcacaattcattgccagacttcattggaatgctttgtttgatgatgtatgttcattctcagctttattttcagatgcttaactgggcaatgaagtctaacttcaggttgaactttctcatgtttaatctcaggctaaatgtaaatgatatttgtaaagtttgaataaaattctgtttactcattttgagttagtatgaaaaaaagtgattgtatgtttaagaattgaaattgttcattttgtgataaatgattaattccaaaaaaaaaaat

SEQ ID NO: 297484 - DNA, 1824 bp, Homo sapiens
  misc_feature (3)..(3): n is a, c, g, or t
  misc_feature (8)..(9): n is a, c, g, or t
ggncacgnncctcgtgccgaattcggcagagctgaagcagggctcaaggtggtaggctatgcttttgaccaggtagatgatcatttacagactccctaccatgaaacagtctactccttgttggatacactcagccccgcctaccgagaagcatttggaaacgcactgcttcaaagactggaagctttgaaaagagatggacagtcatgactacactttttcctttcagaggggctggtgctggtacagaatgttgatataaagcttaaaattcttgcatatggtcatagaaaatgcatctttggttttgtgtttttatcacttgcttccaacttaggcttttggctcagaagattattgaataatgatttgtcttagtttctgtttcagtaagggaattctgaggccgttgctatgataccatcattaagacattcacatgtcttcatataatatctcttcatttcaaatcctaatcactatttcatactattacagggctttgatgctgccagcactgtcttttacataggaaattctagatttgcacagtaatagaggaattagaagtacctaactatacactttgattcagcctgctaaatcaggggttcaatactagcttggacaaactttgtagtaattaattgctaccagccttattggaaacaaattatcaactagtttcccctgcacaaattttgaaattcactgcttcacttaatctatttatattactaataatggattaataaagatgaattaattatatattacttaactagtattaaatgaaaaacagggactgaaatagttctgtattccgtgtttgcaacagccagccaactaagcagaggataaaccgttagcaaatgaatgtaataattactcatttccaagatatctaagcacataagcaaatacaggaacagacttcattctttttcttaacaaaaaagcatcttcagtgtgtgatttaaaagaaagaagattctggtttcctagaaaacaatattttggcctgtgttgattcttattctgaatgtgtgtttacataatgtacagtatatattcagaaagtatttttgcttcaacgtttactttctatgatgtagtgctttggtattcctacagcaccccaccttccccaacagatgtacagtgttctgtctccattcgaaatctacaatgtaatatgagtgcattgtatgggtttgaaaccaaaggatgaatgaagcattcagagacttaatatttgaaaaaggaatagtcagtattttatattttattacaggtactgatatttataaatttaataaactgtaccatgctgctgcatgttttcaagtacatgttgaacagtaaggattggggagttgttttttaatggtcacctaaagcagctgctatagaaatgttgaactaaaattttgcatctggtcataccttcatgcatttatcatttgcagatatttttccatcattattaaaaaacaggaacttttaggctctgaagatcatgtggaccagagcaaattaaagttcagtttgtgtcacaattcattgccagacttcattggaatgctttgtttgatgatgtatgttcattctcagctttattttcagatgcttaactgggcaatgaagtctaacttcaggttgaactttctcatgtttaatctcaggctaaatgtaaatgatatttgtaaagtttgaataaaattctgtttactcattttgagttagtatgaaaaaaagtgattgtatgtttaagaattgaaattgttcattttgtgataaatgattaattccaaaaaaaaaaat

SEQ ID NO: 297485 - DNA, 1677 bp, Homo sapiens
gcgtagagagggacaaaattaagcttaagtagagcctgggtgtttaattggcagagggagaggctgtgtcaaaggcgccatgagcaagatcagcgaggccgtgaagcgcgcccgcgccgccttcagctcgggcaggacccgtccgctgcagttccggatccagcagctggaggcgctgcagcgcctgatccaggagcaggagcaggagctggtgggcgcgctggccgcagacctgcacaagaatgaatggaacgcctactatgaggaggtggtgtacgtcctagaggagatcgagtacatgatccagaagctccctgagtgggccgcggatgagcccgtggagaagacgccccagactcagcaggacgagctctacatccactcggagccactgggcgtggtcctcgtcattggcacctggaactaccccttcaacctcaccatccagcccatggtgggcgccatcgctgcagggaacgcagtggtcctcaagccctcggagctgagtgagaacatggcgagcctgctggctaccatcatcccccagtacctggacaaggatctgtacccagtaatcaatgggggtgtccctgagaccacggagctgctcaaggagaggttcgaccatatcctgtacacgggcagcacgggggtggggaagatcatcatgacggctgctgccaagcacctgacccctgtcacgctggagctgggagggaagagtccctgctacgtggacaagaactgtgacctggacgtggcctgccgacgcatcgcctgggggaaattcatgaacagtggccagacctgcgtggccccagactacatcctctgtgacccctcgatccagaaccaaattgtggagaagctcaagaagtcactgaaagagttctacggggaagatgctaagaaatcccgggactatggaagaatcattagtgcccggcacttccagagggtgatgggcctgattgagggccagaaggtggcttatgggggcaccggggatgccgccactcgctacatagcccccaccatcctcacggacgtggacccccagtccccggtgatgcaagaggagatcttcgggcctgtgctgcccatcgtgtgcgtgcgcagcctggaggaggccatccagttcatcaaccagcgtgagaagcccctggccctctacatgttctccagcaacgacaaggtgattaagaagatgattgcagagacatccagtggtggggtggcggccaacgatgtcatcgtccacatcaccttgcactctctgcccttcgggggcgtggggaacagcggcatgggatcctaccatggcaagaagagcttcgagactttctctcaccgccgctcttgcctggtgaggcctctgatgaatgatgaaggcctgaaggtcagataccccccgagcccggccaagatgacccagcactgaggaggggttgctccgcctggcctggccatactgtgtcccatcggagtgcggaccaccctcactggctctcctggccctgggagaatcgctcctgcagccccagcccagccccactcctctgctgacctgctgacctgtgcacaccccactcccacatgggcccaggcctcaccattccaagtctccacccctttctagaccaataaagagacgaatacaattttctaactcagcaa

SEQ ID NO: 297486 - DNA, 1830 bp, Homo sapiens
aaaataacggactagagtacgaggactccgatgttataatgcaggcacgaggcagaggtccagaggacgccacaccccacatttgaatatttttttttcttgtcacgcaaacttcctgggcaggaactccaagggctcaatggacgggaagcagggtccttaaatacgtcccctcttggctcttgccgttccaggagccccagttaccgggagaggctgtgtcaaaggcgccatgagcaagatcagcgaggccgtgaagcgcgcccgcgccgccttcagctcgggcaggacccgtccgctgcagttccggatccagcagctggaggcgctgcagcgcctgatccaggagcaggagcaggagctggtgggcgcgctggccgcagacctgcacaagaatgaatggaacgcctactatgaggaggtggtgtacgtcctagaggagatcgagtacatgatccagaagctccctgagtgggccgcggatgagcccgtggagaagacgccccagactcagcaggacgagctctacatccactcggagccactgggcgtggtcctcgtcattggcacctggaactaccccttcaacctcaccatccagcccatggtgggcgccatcgctgcagggaacgcagtggtcctcaagccctcggagctgagtgagaacatggcgagcctgctggctaccatcatcccccagtacctggacaaggatctgtacccagtaatcaatgggggtgtccctgagaccacggagctgctcaaggagaggttcgaccatatcctgtacacgggcagcacgggggtggggaagatcatcatgacggctgctgccaagcacctgacccctgtcacgctggagctgggagggaagagtccctgctacgtggacaagaactgtgacctggacgtggcctgccgacgcatcgcctgggggaaattcatgaacagtggccagacctgcgtggccccagactacatcctctgtgacccctcgatccagaaccaaattgtggagaagctcaagaagtcactgaaagagttctacggggaagatgctaagaaatcccgggactatggaagaatcattagtgcccggcacttccagagggtgatgggcctgattgagggccagaaggtggcttatgggggcaccggggatgccgccactcgctacatagcccccaccatcctcacggacgtggacccccagtccccggtgatgcaagaggagatcttcgggcctgtgctgcccatcgtgtgcgtgcgcagcctggaggaggccatccagttcatcaaccagcgtgagaagcccctggccctctacatgttctccagcaacgacaaggtgattaagaagatgattgcagagacatccagtggtggggtggcggccaacgatgtcatcgtccacatcaccttgcactctctgcccttcgggggcgtggggaacagcggcatgggatcctaccatggcaagaagagcttcgagactttctctcaccgccgctcttgcctggtgaggcctctgatgaatgatgaaggcctgaaggtcagataccccccgagcccggccaagatgacccagcactgaggaggggttgctccgcctggcctggccatactgtgtcccatcggagtgcggaccaccctcactggctctcctggccctgggagaatcgctcctgcagccccagcccagccccactcctctgctgacctgctgacctgtgcacaccccactcccacatgggcccaggcctcaccattccaagtctccacccctttctagaccaataaagagacgaatacaattttctaactcagcaa

SEQ ID NO: 297487 - DNA, 1855 bp, Homo sapiens
cccagcagcagttcggcttaggactcgggttgcggcgggtgtcaccttctcaggggctagcaaggcagccagggcccaggcgtctgagtgaggggcgggagaggaggcgaggcagaaagtggaccttccagcggaaaggccattttccccaaggccgagcccagggaagtcccttcctatagaattcaggcagggtgggaggcagggcgcgctcgtgcccctcagccagctgcaggtgctctctgtccccaggcgccatgagcaagatcagcgaggccgtgaagcgcgcccgcgccgccttcagctcgggcaggacccgtccgctgcagttccggatccagcagctggaggcgctgcagcgcctgatccaggagcaggagcaggagctggtgggcgcgctggccgcagacctgcacaagaatgaatggaacgcctactatgaggaggtggtgtacgtcctagaggagatcgagtacatgatccagaagctccctgagtgggccgcggatgagcccgtggagaagacgccccagactcagcaggacgagctctacatccactcggagccactgggcgtggtcctcgtcattggcacctggaactaccccttcaacctcaccatccagcccatggtgggcgccatcgctgcagggaacgcagtggtcctcaagccctcggagctgagtgagaacatggcgagcctgctggctaccatcatcccccagtacctggacaaggatctgtacccagtaatcaatgggggtgtccctgagaccacggagctgctcaaggagaggttcgaccatatcctgtacacgggcagcacgggggtggggaagatcatcatgacggctgctgccaagcacctgacccctgtcacgctggagctgggagggaagagtccctgctacgtggacaagaactgtgacctggacgtggcctgccgacgcatcgcctgggggaaattcatgaacagtggccagacctgcgtggccccagactacatcctctgtgacccctcgatccagaaccaaattgtggagaagctcaagaagtcactgaaagagttctacggggaagatgctaagaaatcccgggactatggaagaatcattagtgcccggcacttccagagggtgatgggcctgattgagggccagaaggtggcttatgggggcaccggggatgccgccactcgctacatagcccccaccatcctcacggacgtggacccccagtccccggtgatgcaagaggagatcttcgggcctgtgctgcccatcgtgtgcgtgcgcagcctggaggaggccatccagttcatcaaccagcgtgagaagcccctggccctctacatgttctccagcaacgacaaggtgattaagaagatgattgcagagacatccagtggtggggtggcggccaacgatgtcatcgtccacatcaccttgcactctctgcccttcgggggcgtggggaacagcggcatgggatcctaccatggcaagaagagcttcgagactttctctcaccgccgctcttgcctggtgaggcctctgatgaatgatgaaggcctgaaggtcagataccccccgagcccggccaagatgacccagcactgaggaggggttgctccgcctggcctggccatactgtgtcccatcggagtgcggaccaccctcactggctctcctggccctgggagaatcgctcctgcagccccagcccagccccactcctctgctgacctgctgacctgtgcacaccccactcccacatgggcccaggcctcaccattccaagtctccacccctttctagaccaataaagagacgaatacaattttctaactcagcaa

SEQ ID NO: 297488 - DNA, 1633 bp, Homo sapiens
ctgggattgtgccatcagctttgcaagcaagcgccatgagcaagatcagcgaggccgtgaagcgcgcccgcgccgccttcagctcgggcaggacccgtccgctgcagttccggatccagcagctggaggcgctgcagcgcctgatccaggagcaggagcaggagctggtgggcgcgctggccgcagacctgcacaagaatgaatggaacgcctactatgaggaggtggtgtacgtcctagaggagatcgagtacatgatccagaagctccctgagtgggccgcggatgagcccgtggagaagacgccccagactcagcaggacgagctctacatccactcggagccactgggcgtggtcctcgtcattggcacctggaactaccccttcaacctcaccatccagcccatggtgggcgccatcgctgcagggaacgcagtggtcctcaagccctcggagctgagtgagaacatggcgagcctgctggctaccatcatcccccagtacctggacaaggatctgtacccagtaatcaatgggggtgtccctgagaccacggagctgctcaaggagaggttcgaccatatcctgtacacgggcagcacgggggtggggaagatcatcatgacggctgctgccaagcacctgacccctgtcacgctggagctgggagggaagagtccctgctacgtggacaagaactgtgacctggacgtggcctgccgacgcatcgcctgggggaaattcatgaacagtggccagacctgcgtggccccagactacatcctctgtgacccctcgatccagaaccaaattgtggagaagctcaagaagtcactgaaagagttctacggggaagatgctaagaaatcccgggactatggaagaatcattagtgcccggcacttccagagggtgatgggcctgattgagggccagaaggtggcttatgggggcaccggggatgccgccactcgctacatagcccccaccatcctcacggacgtggacccccagtccccggtgatgcaagaggagatcttcgggcctgtgctgcccatcgtgtgcgtgcgcagcctggaggaggccatccagttcatcaaccagcgtgagaagcccctggccctctacatgttctccagcaacgacaaggtgattaagaagatgattgcagagacatccagtggtggggtggcggccaacgatgtcatcgtccacatcaccttgcactctctgcccttcgggggcgtggggaacagcggcatgggatcctaccatggcaagaagagcttcgagactttctctcaccgccgctcttgcctggtgaggcctctgatgaatgatgaaggcctgaaggtcagataccccccgagcccggccaagatgacccagcactgaggaggggttgctccgcctggcctggccatactgtgtcccatcggagtgcggaccaccctcactggctctcctggccctgggagaatcgctcctgcagccccagcccagccccactcctctgctgacctgctgacctgtgcacaccccactcccacatgggcccaggcctcaccattccaagtctccacccctttctagaccaataaagagacgaatacaattttctaactcagcaa

SEQ ID NO: 297489 - DNA, 1288 bp, Homo sapiens
gcgtagagagggacaaaattaagcttaagtagagcctgggtgtttaattggcagagggagaggctgtgtcaaaggcgccatgagcaagatcagcgaggccgtgaagcgcgcccgcgccgccttcagctcgggcaggacccgtccgctgcagttccggatccagcagctggaggcgctgcagcgcctgatccaggagcaggagcaggagctggtgggcgcgctggccgcagacctgcacaagaatgaatggaacgcctactatgaggaggtggtgtacgtcctagaggagatcgagtacatgatccagaagctccctgagtgggccgcggatgagcccgtggagaagacgccccagactcagcaggacgagctctacatccactcggagccactgggcgtggtcctcgtcattggcacctggaactaccccttcaacctcaccatccagcccatggtgggcgccatcgctgcagggaacgcagtggtcctcaagccctcggagctgagtgagaacatggcgagcctgctggctaccatcatcccccagtacctggacaaggatctgtacccagtaatcaatgggggtgtccctgagaccacggagctgctcaaggagaggttcgaccatatcctgtacacgggcagcacgggggtggggaagatcatcatgacggctgctgccaagcacctgacccctgtcacgctggagctgggagggaagagtccctgctacgtggacaagaactgtgacctggacgtggcctgccgacgcatcgcctgggggaaattcatgaacagtggccagacctgcgtggccccagactacatcctctgtgacccctcgatccagaaccaaattgtggagaagctcaagaagtcactgaaagagttctacggggaagatgctaagaaatcccgggactatggaagaatcattagtgcccggcacttccagagggtgatgggcctgattgagggccagaaggtggcttatgggggcaccggggatgccgccactcgctacatagcccccaccatcctcacggacgtggacccccagtccccggtgatgcaagaggagatcttcgggcctgtgctgcccatcgtgtgcgtgcgcagcctggaggaggccatccagttcatcaaccagcgtgagaagcccctggccctctacatgttctccagcaacgacaaggtgattaagaagatgattgcagagacatccattccaagtctccacccctttctagaccaataaagagacgaatacaattttctaactcagcaa

SEQ ID NO: 297490 - DNA, 1577 bp, Homo sapiens
gcgtagagagggacaaaattaagcttaagtagagcctgggtgtttaattggcagagggagaggctgtgtcaaaggcgccatgagcaagatcagcgaggccgtgaagcgcgcccgcgccgccttcagctcgggcaggacccgtccgctgcagttccggatccagcagctggaggcgctgcagcgcctgatccaggagcaggagcaggagctggtgggcgcgctggccgcagacctgcacaagaatgaatggaacgcctactatgaggaggtggtgtacgtcctagaggagatcgagtacatgatccagaagctccctgagtgggccgcggatgagcccgtggagaagacgccccagactcagcaggacgagctctacatccactcggagccactgggcgtggtcctcgtcattggcacctggaactaccccttcaacctcaccatccagcccatggtgggcgccatcgctgcagggaacgcagtggtcctcaagccctcggagctgagtgagaacatggcgagcctgctggctaccatcatcccccagtacctggacaaggatctgtacccagtaatcaatgggggtgtccctgagaccacggagctgctcaaggagaggttcgaccatatcctgtacacgggcagcacgggggtggggaagatcatcatgacggctgctgccaagcacctgacccctgtcacgctggagctgggagggaagagtccctgctacgtggacaagaactgtgacctggacgtggcctgccgacgcatcgcctgggggaaattcatgaacagtggccagacctgcgtggccccagactacatcctctgtgacccctcgatccagaaccaaattgtggagaagctcaagaagtcactgaaagagttctacggggaagatgctaagaaatcccgggactatggaagaatcattagtgcccggcacttccagagggtgatgggcctgattgagggccagaaggtggcttatgggggcaccggggatgccgccactcgctacatagcccccaccatcctcacggacgtggacccccagtccccggtgatgcaagaggagatcttcgggcctgtgctgcccatcgtgtgcgtgcgcagcctggaggaggccatccagttcatcaaccagcgtgagaagcccctggccctctacatgttctccagcaacgacaagggaacagcggcatgggatcctaccatggcaagaagagcttcgagactttctctcaccgccgctcttgcctggtgaggcctctgatgaatgatgaaggcctgaaggtcagataccccccgagcccggccaagatgacccagcactgaggaggggttgctccgcctggcctggccatactgtgtcccatcggagtgcggaccaccctcactggctctcctggccctgggagaatcgctcctgcagccccagcccagccccactcctctgctgacctgctgacctgtgcacaccccactcccacatgggcccaggcctcaccattccaagtctccacccctttctagaccaataaagagacgaatacaattttctaactcagcaa

SEQ ID NO: 297491 - DNA, 1663 bp, Homo sapiens
aaaataacggactagagtacgaggactccgatgttataatgcaggcacgaggcagaggtccagaggacgccacaccccacatttgaatatttttttttcttgtcacgcaaacttcctgggcaggaactccaagggctcaatggacgggaagcagggtccttaaatacgtcccctcttggctcttgccgttccaggagccccagttaccgggagaggctgtgtcaaagaatgaatggaacgcctactatgaggaggtggtgtacgtcctagaggagatcgagtacatgatccagaagctccctgagtgggccgcggatgagcccgtggagaagacgccccagactcagcaggacgagctctacatccactcggagccactgggcgtggtcctcgtcattggcacctggaactaccccttcaacctcaccatccagcccatggtgggcgccatcgctgcagggaacgcagtggtcctcaagccctcggagctgagtgagaacatggcgagcctgctggctaccatcatcccccagtacctggacaaggatctgtacccagtaatcaatgggggtgtccctgagaccacggagctgctcaaggagaggttcgaccatatcctgtacacgggcagcacgggggtggggaagatcatcatgacggctgctgccaagcacctgacccctgtcacgctggagctgggagggaagagtccctgctacgtggacaagaactgtgacctggacgtggcctgccgacgcatcgcctgggggaaattcatgaacagtggccagacctgcgtggccccagactacatcctctgtgacccctcgatccagaaccaaattgtggagaagctcaagaagtcactgaaagagttctacggggaagatgctaagaaatcccgggactatggaagaatcattagtgcccggcacttccagagggtgatgggcctgattgagggccagaaggtggcttatgggggcaccggggatgccgccactcgctacatagcccccaccatcctcacggacgtggacccccagtccccggtgatgcaagaggagatcttcgggcctgtgctgcccatcgtgtgcgtgcgcagcctggaggaggccatccagttcatcaaccagcgtgagaagcccctggccctctacatgttctccagcaacgacaaggtgattaagaagatgattgcagagacatccagtggtggggtggcggccaacgatgtcatcgtccacatcaccttgcactctctgcccttcgggggcgtggggaacagcggcatgggatcctaccatggcaagaagagcttcgagactttctctcaccgccgctcttgcctggtgaggcctctgatgaatgatgaaggcctgaaggtcagataccccccgagcccggccaagatgacccagcactgaggaggggttgctccgcctggcctggccatactgtgtcccatcggagtgcggaccaccctcactggctctcctggccctgggagaatcgctcctgcagccccagcccagccccactcctctgctgacctgctgacctgtgcacaccccactcccacatgggcccaggcctcaccattccaagtctccacccctttctagaccaataaagagacgaatacaattttctaactcagcaa

SEQ ID NO: 297492 - DNA, 1859 bp, Homo sapiens
  misc_feature (324)..(324): n is a, c, g, or t
cccagcagcagttcggcttaggactcgggttgcggcgggtgtcaccttctcaggggctagcaaggcagccagggcccaggcgtctgagtgaggggcgggagaggaggcgaggcagaaagtggaccttccagcggaaaggccattttccccaaggccgagcccagggaagtcccttcctatagaattcaggcagggtgggaggcagggcgcgctcgtgcccctcagccagctgcaggtgctctctgtccccaggcgccatgagcaagatcagcgaggccgtgaagcgcgcccgcgccgccttcagctcgggcagagggggggagnggggaacaaaaaaagaaaaagaaatcccctgcgctgcagcgcctgatccaggagcaggagcaggagctggtgggcgcgctggccgcagacctgcacaagaatgaatggaacgcctactatgaggaggtggtgtacgtcctagaggagatcgagtacatgatccagaagctccctgagtgggccgcggatgagcccgtggagaagacgccccagactcagcaggacgagctctacatccactcggagccactgggcgtggtcctcgtcattggcacctggaactaccccttcaacctcaccatccagcccatggtgggcgccatcgctgcagggaacgcagtggtcctcaagccctcggagctgagtgagaacatggcgagcctgctggctaccatcatcccccagtacctggacaaggatctgtacccagtaatcaatgggggtgtccctgagaccacggagctgctcaaggagaggttcgaccatatcctgtacacgggcagcacgggggtggggaagatcatcatgacggctgctgccaagcacctgacccctgtcacgctggagctgggagggaagagtccctgctacgtggacaagaactgtgacctggacgtggcctgccgacgcatcgcctgggggaaattcatgaacagtggccagacctgcgtggccccagactacatcctctgtgacccctcgatccagaaccaaattgtggagaagctcaagaagtcactgaaagagttctacggggaagatgctaagaaatcccgggactatggaagaatcattagtgcccggcacttccagagggtgatgggcctgattgagggccagaaggtggcttatgggggcaccggggatgccgccactcgctacatagcccccaccatcctcacggacgtggacccccagtccccggtgatgcaagaggagatcttcgggcctgtgctgcccatcgtgtgcgtgcgcagcctggaggaggccatccagttcatcaaccagcgtgagaagcccctggccctctacatgttctccagcaacgacaaggtgattaagaagatgattgcagagacatccagtggtggggtggcggccaacgatgtcatcgtccacatcaccttgcactctctgcccttcgggggcgtggggaacagcggcatgggatcctaccatggcaagaagagcttcgagactttctctcaccgccgctcttgcctggtgaggcctctgatgaatgatgaaggcctgaaggtcagataccccccgagcccggccaagatgacccagcactgaggaggggttgctccgcctggcctggccatactgtgtcccatcggagtgcggaccaccctcactggctctcctggccctgggagaatcgctcctgcagccccagcccagccccactcctctgctgacctgctgacctgtgcacaccccactcccacatgggcccaggcctcaccattccaagtctccacccctttctagaccaataaagagacgaatacaattttctaactcagcaa

SEQ ID NO: 297493 - DNA, 1466 bp, Homo sapiens
tggaagctcactccggctctgtcgctgcagaatgaatggaacgcctactatgaggaggtggtgtacgtcctagaggagatcgagtacatgatccagaagctccctgagtgggccgcggatgagcccgtggagaagacgccccagactcagcaggacgagctctacatccactcggagccactgggcgtggtcctcgtcattggcacctggaactaccccttcaacctcaccatccagcccatggtgggcgccatcgctgcagggaacgcagtggtcctcaagccctcggagctgagtgagaacatggcgagcctgctggctaccatcatcccccagtacctggacaaggatctgtacccagtaatcaatgggggtgtccctgagaccacggagctgctcaaggagaggttcgaccatatcctgtacacgggcagcacgggggtggggaagatcatcatgacggctgctgccaagcacctgacccctgtcacgctggagctgggagggaagagtccctgctacgtggacaagaactgtgacctggacgtggcctgccgacgcatcgcctgggggaaattcatgaacagtggccagacctgcgtggccccagactacatcctctgtgacccctcgatccagaaccaaattgtggagaagctcaagaagtcactgaaagagttctacggggaagatgctaagaaatcccgggactatggaagaatcattagtgcccggcacttccagagggtgatgggcctgattgagggccagaaggtggcttatgggggcaccggggatgccgccactcgctacatagcccccaccatcctcacggacgtggacccccagtccccggtgatgcaagaggagatcttcgggcctgtgctgcccatcgtgtgcgtgcgcagcctggaggaggccatccagttcatcaaccagcgtgagaagcccctggccctctacatgttctccagcaacgacaaggtgattaagaagatgattgcagagacatccagtggtggggtggcggccaacgatgtcatcgtccacatcaccttgcactctctgcccttcgggggcgtggggaacagcggcatgggatcctaccatggcaagaagagcttcgagactttctctcaccgccgctcttgcctggtgaggcctctgatgaatgatgaaggcctgaaggtcagataccccccgagcccggccaagatgacccagcactgaggaggggttgctccgcctggcctggccatactgtgtcccatcggagtgcggaccaccctcactggctctcctggccctgggagaatcgctcctgcagccccagcccagccccactcctctgctgacctgctgacctgtgcacaccccactcccacatgggcccaggcctcaccattccaagtctccacccctttctagaccaataaagagacgaatacaattttctaactcagcaa

SEQ ID NO: 297494 - DNA, 1436 bp, Homo sapiens
gcgtagagagggacaaaattaagcttaagtagagcctgggtgtttaattggcagagggagaggctgtgtcaaaggcgccatgagcaagatcagcgaggccgtgaagcgcgcccgcgccgccttcagctcgggcagatccactcggagccactgggcgtggtcctcgtcattggcacctggaactaccccttcaacctcaccatccagcccatggtgggcgccatcgctgcagggaacgcagtggtcctcaagccctcggagctgagtgagaacatggcgagcctgctggctaccatcatcccccagtacctggacaaggatctgtacccagtaatcaatgggggtgtccctgagaccacggagctgctcaaggagaggttcgaccatatcctgtacacgggcagcacgggggtggggaagatcatcatgacggctgctgccaagcacctgacccctgtcacgctggagctgggagggaagagtccctgctacgtggacaagaactgtgacctggacgtggcctgccgacgcatcgcctgggggaaattcatgaacagtggccagacctgcgtggccccagactacatcctctgtgacccctcgatccagaaccaaattgtggagaagctcaagaagtcactgaaagagttctacggggaagatgctaagaaatcccgggactatggaagaatcattagtgcccggcacttccagagggtgatgggcctgattgagggccagaaggtggcttatgggggcaccggggatgccgccactcgctacatagcccccaccatcctcacggacgtggacccccagtccccggtgatgcaagaggagatcttcgggcctgtgctgcccatcgtgtgcgtgcgcagcctggaggaggccatccagttcatcaaccagcgtgagaagcccctggccctctacatgttctccagcaacgacaaggtgattaagaagatgattgcagagacatccagtggtggggtggcggccaacgatgtcatcgtccacatcaccttgcactctctgcccttcgggggcgtggggaacagcggcatgggatcctaccatggcaagaagagcttcgagactttctctcaccgccgctcttgcctggtgaggcctctgatgaatgatgaaggcctgaaggtcagataccccccgagcccggccaagatgacccagcactgaggaggggttgctccgcctggcctggccatactgtgtcccatcggagtgcggaccaccctcactggctctcctggccctgggagaatcgctcctgcagccccagcccagccccactcctctgctgacctgctgacctgtgcacaccccactcccacatgggcccaggcctcaccattccaagtctccacccctttctagaccaataaagagacgaatacaattttctaactcagcaa

SEQ ID NO: 297495 - DNA, 1049 bp, Homo sapiens
ccgttccgcgctctggcggctcctcccgggcgatgcctccgctctgggccctgctggccctcggctgcctgcggttcggctcggctgtgaacctgcagccccaactggccagtgtgactttcgccaccaacaaccccacacttaccactgtggccttggaaaagcctctctgcatgtttgacagcaaagaggccctcactggcacccacgaggtctacctgtatgtcctggtcgactcagccatttccaggaatgcctcagtgcaagacagcaccaacaccccactgggctcaacgttcctacaaacagagggtgggaggacaggtccctacaaagctgtggcctttgacctgatcccctgcagtgacctgcccagcctggatgccattggggatgtgtccaaggcctcacagatcctgaatgcctacctggtcagggtgggtgccaacgggacctgcctgtgggatcccaacttccagggcctctgtaacgcacccctgtcggcagccacggagtacaggttcaagtatgtcctggtcaatatgtccacgggcttggtagaggaccagaccctgtggtcagaccccatccgcaccaaccagctcaccccatactcgacgatcgacacgtggccaggccggcggagcggaggcatgatcgtcatcacttccatcctgggctccctgcccttctttctacttgtgggttttgctggcgccattgccctcagcctcgtggacatggggagttctgatggggaaacgactcacgactcccaaatcactcaggaggctgttcccaagtcgctgggggcctcggagtcttcctacacgtccgtgaaccgggggccgccactggacagggctgaggtgtattccagcaagctccaggactgagcccagcaccacccctgggcagcagcatcctcctctctggccttgccccaggccctgcagcggtggttgtcacaccctgacttcagggaaggtgaaacagggcttgtccctccaactgcaggaaaacccttaataaaatcttctgatgagttc

SEQ ID NO: 297496 - DNA, 1642 bp, Homo sapiens
agagtgaagcaatctttaattttgaaaacagggaaaacaaatatttagaaagtaaaaccgatttccatcctttacatgccattatacatcctatacaaaactctggaaatctgcctattgaggtaattacggagcactacctaatgtgtttcaagggaaagctcccctgtttgggctatgcaggatttacagggagtttaaatcattaaataaccatagttgacccttgcttggttaagagagtaagcaattattgcaaagtcctcttccctgccttccacaaacagcacaaaaacggttctgaagggatttacacaatacatcaacatctgtgctgtacctagagttgttaaaataattgtgatgacaggtgtctaggtaccactttcttaatggttttcaatatccattgatttattgttttgtggctttctcttcccctttacagctttggctttaagaaagagctggggaacagattttgcaccagaggctgattctttattccaatgctgaaaagaactaataaaaataatcacttggcttttaagcagaaagcttccatttacagtatttcacccttaccccgccccgttccaagccccttgttatctaacataatggttagaatacatttccgtctctccccttaataatttcatgcattaacatcctcttcacacactatacacacacgcacgcgcgcacacacacgcgcgcgcacacacacagcaaaaggaaaaaagaggcagcagaaatctcagctgtacttctagcccttttaaaaagtttgctctgtaaattggaatgaggtcagatttggagcttctcattgcacgcggagattattattgcatcgggttccaagccaatgggaagcccgggggaggggtttggcatgaggaagcgttggttacagcagctgattggctgcagccaagactgtgaaaggataaagaggcgcgaggcggaattggggtcggctctaagctgcagcaagagaaactgtgtgtgaggggaagaggcctgtttcgctgtcgggtctctagttcttgcacgctctttaagagtctgcactggaggaactcctgccattaccagctcccttcttgcagaagggagggggaaacatacatttattcatgccagtctgttgcatgcaggctttttggcttcctaccttgcaacaaaataattgcaccaactccttagtgccgattccgcccacagagagtcctggagccacagtcttttttgctttgcattgtaggagagggactaagtgctagagactatgtcgctttcctgagctaccgagagcgctcgtgaactggaatcaactgcttcagggaaaaagaaaaaaaaaaaaaaaaaaaaaaaacatgtcggccggggggaaatcaagtggcttatcatgtatatcgtgtacttaaaatgtattcacaaactactgttgtatttgtataaaatatagacaaagatcataaaaaaaaaaagaccgaaaataaaaaagtcaaaaactgcgaaaaccctggcgatacccaaactaaatcgcattgaaacaaaattccccctctgacagctggccgcactccaaggcccttacccgttgggcgtaccaacaagtgggattgggtttggc

SEQ ID NO: 297497 - DNA, 436 bp, Homo sapiens
  misc_feature (24)..(24): n is a, c, g, or t
  misc_feature (38)..(38): n is a, c, g, or t
tgggttcccccggactggcagganttcgcggccgcgtncgacacggctgcgagaagacgacagaagggggctctaagctgcagcaagagaaactgtgtgtgaggggaagaggcctgtttcgctgtcgggtctctagttcttgcacgctctttaagagtctgcactggaggaactcctgccattaccagctcccttcttgcagaagggagggggaaacatacatttattcatgccagtctgttgcatgcaggctttttggcttcctaccttgcaacaaaataattgcaccaactccttagtgccgattccgcccacagagagtcctggagccacagtcttttttgctttgcattgtaggagagggactaagtgctagagactatgtcgctttcctgagctaccgagagcgctcgtgaactggaatcaactgcttcag

SEQ ID NO: 297498 - DNA, 522 bp, Homo sapiens
ctgtgtgtttaaacctgaacacatatgctatcatcatgccataagactaaaacaattatatttagcgacaagtagaaaggattaaatagtcgctaaatataattgttttagtcttatggcatgatgatagcatatgtgttcaggtttatagctgttgtgtttaaaaattgaaaaaagtggaaaacatctttgtacatttaagtctgtattataataagcaaaaagattgtgtgtatgtatgtttaatataacatgacaggcactaggacgtctgcctttttaaggcagttccgttaagggtttttgtttttaaacttttttttgccatccatcctgtgcaatatgccgtgtagaatatttgtcttaaaattcaaggccacaaaaacaatgtttgggggaaaaaaaagaaaaaatcatgccagctaatcatgtcaagttcactgcctgtcagattgttgatatataccttctgtaaataactttttttgagaaggaaataaaatcagctggaactgaacccta

SEQ ID NO: 297499 - DNA, 1349 bp, Homo sapiens
agagtgaagcaatctttaattttgaaaacagggaaaacaaatatttagaaagtaaaaccgatttccatcctttacatgccattatacatcctatacaaaactctggaaatctgcctattgaggtaattacggagcactacctaatgtgtttcaagggaaagctcccctgtttgggctatgcaggatttacagggagtttaaatcattaaataaccatagttgacccttgcttggttaagagagtaagcaattattgcaaagtcctcttccctgccttccacaaacagcacaaaaacggttctgaagggatttacacaatacatcaacatctgtgctgtacctagagttgttaaaataattgtgatgacaggtgtctaggtaccactttcttaatggttttcaatatccattgatttattgttttgtggctttctcttcccctttacagctttggctttaagaaagagctggggaacagattttgcaccagaggctgattctttattccaatgctgaaaagaactaataaaaataatcacttggcttttaagcagaaagcttccatttacagtatttcacccttaccccgccccgttccaagccccttgttatctaacataatggttagaatacatttccgtctctccccttaataatttcatgcattaacatcctcttcacacactatacacacacgcacgcgcgcacacacacgcgcgcgcacacacacagcaaaaggaaaaaagaggcagcagaaatctcagctgtacttctagcccttttaaaaagtttgctctgtaaattggaatgaggtcagatttggagcttctcattgcacgcggagattattattgcatcgggttccaagccaatgggaagcccgggggaggggtttggcatgaggaagcgttggttacagcagctgattggctgcagccaagactgtgaaaggataaagaggcgcgaggcggaattggggtcggctctaagctgcagcaagagaaactgtgtgtgaggggaagaggcctgtttcgctgtcgggtctctagttcttgcacgctctttaagagtctgcactggaggaactcctgccattaccagctcccttcttgcagaagggagggggaaacatacatttattcatgccagtctgttgcatgcaggctttttggcttcctaccttgcaacaaaataattgcaccaactccttagtgccgattccgcccacagagagtcctggagccacagtcttttttgctttgcattgtaggagagggactaagtgctagagactatgtcgctttcctgagctaccgagagcgctcgtgaactggaatcaactgcttcag

SEQ ID NO: 297500 - DNA, 642 bp, Homo sapiens
tgtacagacacctttgacatcagcaccagaacaaccgttcatcttttcagcaacctttctcaagttgataccacgagttagattcatttttctggagtggattcttaaaatttcagctctagctgcgacacttggaggtggaaattcaatcttcctatctattctaccgggtctcaaaagtgctggatctagaatatctagtctattcgtggccattatgattttgatatttttagctcgtgccgaattcggcacgagttcaggtttatagctgttgtgtttaaaaattgaaaaaagtggaaaacatctttgtacatttaagtctgtattataataagcaaaaagattgtgtgtatgtatgtttaatataacatgacaggcactaggacgtctgcctttttaaggcagttccgttaagggtttttgtttttaaacttttttttgccatccatcctgtgcaatatgccgtgtagaatatttgtcttaaaattcaaggccacaaaaacaatgtttgggggaaaaaaaagaaaaaatcatgccagctaatcatgtcaagttcactgcctgtcagattgttgatatataccttctgtaaataactttttttgagaaggaaataaaatcagctggaactgaacccta

SEQ ID NO: 297501 - DNA, 428 bp, Homo sapiens
aacaacggcagaaaagaaagtcttgaaagggttatttccaaagagtttgtctcctccgacccgcgctccttggacttttggaaagacaggatttccccacaccagttgagaggctcagcttggctgaggcagctttcccacccctggctgcgtgttcggtccctggtctgtaaacctgtgcccagctgccccagaccctggagccccgggttccgcaggccgggctacatggccttcatgccgttgttcttcgacgaagtacatttaagtctgtattataataagcaaaaagattgtgtgtatgtatgtttaatataacatgacaggcactaggacgtctgcctttttaaggcagttccgttaagggtttttgtttttaaacttttttcaatttttaaacacaacagctataaacctgaacacatgcc

SEQ ID NO: 297502 - DNA, 4934 bp, Homo sapiens
  misc_feature (24)..(24): n is a, c, g, or t
  misc_feature (38)..(38): n is a, c, g, or t
tgggttcccccggactggcagganttcgcggccgcgtncgacacggctgcgagaagacgacagaagggggctctaagctgcagcaagagaaactgtgtgtgaggggaagaggcctgtttcgctgtcgggtctctagttcttgcacgctctttaagagtctgcactggaggaactcctgccattaccagctcccttcttgcagaagggagggggaaacatacatttattcatgccagtctgttgcatgcaggctttttggcttcctaccttgcaacaaaataattgcaccaactccttagtgccgattccgcccacagagagtcctggagccacagtcttttttgctttgcattgtaggagagggactaagtgctagagactatgtcgctttcctgagctaccgagagcgctcgtgaactggaatcaactgcttcagggaaaaagaaaaaaaaaaaaaaaagacttgcctgggaggccgcgagaaacttgcattggaagcttcagcaaccagcattcgagaaactcctctctactttagcacggtctccagactcagccgagagacagcaaactgcagcgcggtgagagagcgagagagagggagagagagactctccagcctgggaactataactcctctgcgagaggcggagaactccttccccaaatcttttggggacttttctctctttacccacctccgcccctgcgaggagttgaggggccagttcggccgccgcgcgcgtcttcccgttcggcgtgtgcttggcccggggaaccgggagggcccggcgatcgcgcggcggccgccgcgagggtgtgagcgcgcgtgggcgcccgccgagccgaggccatggtgcagcaaaccaacaatgccgagaacacggaagcgctgctggccggcgagagctcggactcgggcgccggcctcgagctgggaatcgcctcctcccccacgcccggctccaccgcctccacgggcggcaaggccgacgacccgagctggtgcaagaccccgagtgggcacatcaagcgacccatgaacgccttcatggtgtggtcgcagatcgagcggcgcaagatcatggagcagtcgcccgacatgcacaacgccgagatctccaagcggctgggcaaacgctggaagctgctcaaagacagcgacaagatccctttcattcgagaggcggagcggctgcgcctcaagcacatggctgactaccccgactacaagtaccggcccaggaagaaggtgaagtccggcaacgccaactccagctcctcggccgccgcctcctccaagccgggggagaagggagacaaggtcggtggcagtggcgggggcggccatgggggcggcggcggcggcgggagcagcaacgcggggggaggaggcggcggtgcgagtggcggcggcgccaactccaaaccggcgcagaaaaagagctgcggctccaaagtggcgggcggcgcgggcggtggggttagcaaaccgcacgccaagctcatcctggcaggcggcggcggcggcgggaaagcagcggctgccgccgccgcctccttcgccgccgaacaggcgggggccgccgccctgctgcccctgggcgccgccgccgaccaccactcgctgtacaaggcgcggactcccagcgcctcggcctccgcctcctcggcagcctcggcctccgcagcgctcgcggccccgggcaagcacctggcggagaagaaggtgaagcgcgtctacctgttcggcggcctgggcacgtcgtcgtcgcccgtgggcggcgtgggcgcgggagccgaccccagcgaccccctgggcctgtacgaggaggagggcgcgggctgctcgcccgacgcgcccagcctgagcggccgcagcagcgccgcctcgtcccccgccgccggccgctcgcccgccgaccaccgcggctacgccagcctgcgcgccgcctcgcccgccccgtccagcgcgccctcgcacgcgtcctcctcggcctcgtcccactcctcctcttcctcctcctcgggctcctcgtcctccgacgacgagttcgaagacgacctgctcgacctgaaccccagctcaaactttgagagcatgtccctgggcagcttcagttcgtcgtcggcgctcgaccgggacctggattttaacttcgagcccggctccggctcgcacttcgagttcccggactactgcacgcccgaggtgagcgagatgatctcgggagactggctcgagtccagcatctccaacctggttttcacctactgaagggcgcgcaggcagggagaagggccggggggggtaggagaggagaaaaaaaaagtgaaaaaaagaaacgaaaaggacagacgaagagtttaaagagaaaagggaaaaaagaaagaaaaagtaagcagggctggcttcgcccgcgttctcgtcgtcggatcaaggagcgcggcggcgttttggacccgcgctcccatcccccaccttcccgggccggggacccactctgcccagccggagggacgcggaggaggaagagggtagacaggggcgacctgtgattgttgttattgatgttgttgttgatggcaaaaaaaaaaaagcgacttcgagtttgctcccctttgcttgaagagaccccctcccccttccaacgagcttccggacttgtctgcacccccagcaagaaggcgagttagttttctagagacttgaaggagtctcccccttcctgcatcaccaccttggttttgttttattttgcttcttggtcaagaaaggaggggagaacccagcgcacccctccccccctttttttaaacgcgtgatgaagacagaaggctccggggtgacgaatttggccgatggcagatgttttgggggaacgccgggactgagagactccacgcaggcgaattcccgtttggggcttttttttcctccctcttttccccttgccccctctgcagccggaggaggagatgttgaggggaggaggccagccagtgtgaccggcgctaggaaatgacccgagaaccccgttggaagcgcagcagcgggagctaggggcgggggcggaggaggacacgaactggaagggggttcacggtcaaactgaaatggatttgcacgttggggagctggcggcggcggctgctgggcctccgccttcttttctacgtgaaatcagtgaggtgagacttcccagaccccggaggcgtggaggagaggagactgtttgatgtggtacaggggcagtcagtggagggcgagtggtttcggaaaaaaaaaaagaaaaaaagaaaaaaaaagaaaaaaaaaagatttttttcttctcttaatcggaatcgtgatggtgttggattatttcaatggtggggttaatatagcatgttatcctgtctatcttttaaagatttctgtataagactgttgagcagtttttaaaatagtgtaggataatataaaaagcagatagatggcgctatgtttgattcctacaacgaaattatcaccagctttttttcattcttaactctttaaaggattcaaacgcaactcaaatctgtgctggactttaaaaaaacaattcaggaccaaattttttctcagtgtgtgtgtttattccttataggtgtaaatgagaagacgtgtttttttccttcaccgatgctccatcctcgtatttctttttccttgtaaatgtaatcagatgccattttatatgtggacgtatttatactggccaaacatattttttcttttgtccctttttttctttcctttctttttacttcctttatttctttattccttccttttcctttttttctttttttttctttttttttttttttttgggtagttgttgttacccacgccattttacgtctccttcactgaagggctagagttttaacttttaattttttatatttaaatgtagacttttgacacttttaaaaaacaaaaaaagacaagagagatgaaaacgtttgattattttctcagtgtatttttgtaaaaaatatataaagggggtgttaatcggtgtaaatcgctgtttggatttcctgattttataacagggcggctggttaatatctcacacagtttaaaaaatcagcccctaatttctccatgtttacacttcaatctgcaggcttcttaaagtgacagtatcccttaacctgccaccagtgtccaccctccggcccccgtcttgtaaaaaggggaggagaattagccaaacactgtaagcttttaagaaaaacaaagttttaaacgaaatactgctctgtccagaggctttaaaactggtgcaattacagcaaaaagggattctgtagctttaacttgtaaaccacatcttttttgcactttttttataagcaaaaacgtgccgtttaaaccactggatctatctaaatgccgatttgagttcgcgacactatgtactgcgtttttcattcttgtatttgactatttaatcctttctacttgtcgctaaatataattgttttagtcttatggcatgatgatagcatatgtgttcaggtttatagctgttgtgtttaaaaattgaaaaaagtggaaaacatctttgtacatttaagtctgtattataataagcaaaaagattgtgtgtatgtatgtttaatataacatgacaggcactaggacgtctgcctttttaaggcagttccgttaagggtttttgtttttaaacttttttttgccatccatcctgtgcaatatgccgtgtagaatatttgtcttaaaattcaaggccacaaaaacaatgtttgggggaaaaaaaagaaaaaatcatgccagctaatcatgtcaagttcactgcctgtcagattgttgatatataccttctgtaaataactttttttgagaaggaaataaaatcagctggaactgaacccta

SEQ ID NO: 297503 - DNA, 5004 bp, Homo sapiens
  misc_feature (24)..(24): n is a, c, g, or t
  misc_feature (38)..(38): n is a, c, g, or t
tgggttcccccggactggcagganttcgcggccgcgtncgacacggctgcgagaagacgacagaagggggctctaagctgcagcaagagaaactgtgtgtgaggggaagaggcctgtttcgctgtcgggtctctagttcttgcacgctctttaagagtctgcactggaggaactcctgccattaccagctcccttcttgcagaagggagggggaaacatacatttattcatgccagtctgttgcatgcaggctttttggcttcctaccttgcaacaaaataattgcaccaactccttagtgccgattccgcccacagagagtcctggagccacagtcttttttgctttgcattgtaggagagggactaagtgctagagactatgtcgctttcctgagctaccgagagcgctcgtgaactggaatcaactgcttcagggaaaaagaaaaaaaaaaaaaaaagacttgcctgggaggccgcgagaaacttgcattggaagcttcagcaaccagcattcgagaaactcctctctactttagcacggtctccagactcagccgagagacagcaaactgcagcgcggtgagagagcgagagagagggagagagagactctccagcctgggaactataactcctctgcgagaggcggagaactccttccccaaatcttttggggacttttctctctttacccacctccgcccctgcgaggagttgaggggccagttcggccgccgcgcgcgtcttcccgttcggcgtgtgcttggcccggggaaccgggagggcccggcgatcgcgcggcggccgccgcgagggtgtgagcgcgcgtgggcgcccgccgagccgaggccatggtgcagcaaaccaacaatgccgagaacacggaagcgctgctggccggcgagagctcggactcgggcgccggcctcgagctgggaatcgcctcctcccccacgcccggctccaccgcctccacgggcggcaaggccgacgacccgagctggtgcaagaccccgagtgggcacatcaagcgacccatgaacgccttcatggtgtggtcgcagatcgagcggcgcaagatcatggagcagtcgcccgacatgcacaacgccgagatctccaagcggctgggcaaacgctggaagctgctcaaagacagcgacaagatccctttcattcgagaggcggagcggctgcgcctcaagcacatggctgactaccccgactacaagtaccggcccaggaagaaggtgaagtccggcaacgccaactccagctcctcggccgccgcctcctccaagccgggggagaagggagacaaggtcggtggcagtggcgggggcggccatgggggcggcggcggcggcgggagcagcaacgcggggggaggaggcggcggtgcgagtggcggcggcgccaactccaaaccggcgcagaaaaagagctgcggctccaaagtggcgggcggcgcgggcggtggggttagcaaaccgcacgccaagctcatcctggcaggcggcggcggcggcgggaaagcagcggctgccgccgccgcctccttcgccgccgaacaggcgggggccgccgccctgctgcccctgggcgccgccgccgaccaccactcgctgtacaaggcgcggactcccagcgcctcggcctccgcctcctcggcagcctcggcctccgcagcgctcgcggccccgggcaagcacctggcggagaagaaggtgaagcgcgtctacctgttcggcggcctgggcacgtcgtcgtcgcccgtgggcggcgtgggcgcgggagccgaccccagcgaccccctgggcctgtacgaggaggagggcgcgggctgctcgcccgacgcgcccagcctgagcggccgcagcagcgccgcctcgtcccccgccgccggccgctcgcccgccgaccaccgcggctacgccagcctgcgcgccgcctcgcccgccccgtccagcgcgccctcgcacgcgtcctcctcggcctcgtcccactcctcctcttcctcctcctcgggctcctcgtcctccgacgacgagttcgaagacgacctgctcgacctgaaccccagctcaaactttgagagcatgtccctgggcagcttcagttcgtcgtcggcgctcgaccgggacctggattttaacttcgagcccggctccggctcgcacttcgagttcccggactactgcacgcccgaggtgagcgagatgatctcgggagactggctcgagtccagcatctccaacctggttttcacctactgaagggcgcgcaggcagggagaagggccggggggggtaggagaggagaaaaaaaaagtgaaaaaaagaaacgaaaaggacagacgaagagtttaaagagaaaagggaaaaaagaaagaaaaagtaagcagggctggcttcgcccgcgttctcgtcgtcggatcaaggagcgcggcggcgttttggacccgcgctcccatcccccaccttcccgggccggggacccactctgcccagccggagggacgcggaggaggaagagggtagacaggggcgacctgtgattgttgttattgatgttgttgttgatggcaaaaaaaaaaaagcgacttcgagtttgctcccctttgcttgaagagaccccctcccccttccaacgagcttccggacttgtctgcacccccagcaagaaggcgagttagttttctagagacttgaaggagtctcccccttcctgcatcaccaccttggttttgttttattttgcttcttggtcaagaaaggaggggagaacccagcgcacccctccccccctttttttaaacgcgtgatgaagacagaaggctccggggtgacgaatttggccgatggcagatgttttgggggaacgccgggactgagagactccacgcaggcgaattcccgtttggggcttttttttcctccctcttttccccttgccccctctgcagccggaggaggagatgttgaggggaggaggccagccagtgtgaccggcgctaggaaatgacccgagaaccccgttggaagcgcagcagcgggagctaggggcgggggcggaggaggacacgaactggaagggggttcacggtcaaactgaaatggatttgcacgttggggagctggcggcggcggctgctgggcctccgccttcttttctacgtgaaatcagtgaggtgagacttcccagaccccggaggcgtggaggagaggagactgtttgatgtggtacaggggcagtcagtggagggcgagtggtttcggaaaaaaaaaaagaaaaaaagaaaaaaaaagaaaaaaaaaagatttttttcttctcttaatcggaatcgtgatggtgttggattatttcaatggtggggttaatatagcatgttatcctgtctatcttttaaagatttctgtataagactgttgagcagtttttaaaatagtgtaggataatataaaaagcagatagatggcgctatgtttgattcctacaacgaaattatcaccagctttttttcattcttaactctttaaaggattcaaacgcaactcaaatctgtgctggactttaaaaaaacaattcaggaccaaattttttctcagtgtgtgtgtttattccttataggtgtaaatgagaagacgtgtttttttccttcaccgatgctccatcctcgtatttctttttccttgtaaatgtaatcagatgccattttatatgtggacgtatttatactggccaaacatattttttcttttgtccctttttttctttcctttctttttacttcctttatttctttattccttccttttcctttttttctttttttttctttttttttttttttttgggtagttgttgttacccacgccattttacgtctccttcactgaagggctagagttttaacttttaattttttatatttaaatgtagacttttgacacttttaaaaaacaaaaaaagacaagagagatgaaaacgtttgattattttctcagtgtatttttgtaaaaaatatataaagggggtgttaatcggtgtaaatcgctgtttggatttcctgattttataacagggcggctggttaatatctcacacagtttaaaaaatcagcccctaatttctccatgtttacacttcaatctgcaggcttcttaaagtgacagtatcccttaacctgccaccagtgtccaccctccggcccccgtcttgtaaaaaggggaggagaattagccaaacactgtaagcttttaagaaaaacaaagttttaaacgaaatactgctctgtccagaggctttaaaactggtgcaattacagcaaaaagggattctgtagctttaacttgtaaaccacatcttttttgcactttttttataagcaaaaacgtgccgtttaaaccactggatctatctaaatgccgatttgagttcgcgacactatgtactgcgtttttcattcttgtatttgactatttaatcctttctacttgtcgctaaatataattgttttagtcttatggcatgatgatagcatatgtgttcaggtttatagctgttgtgtttaaaaattgaaaaaagtggaaaacatctttgtacatttaagtctgtattataataagcaaaaagattgtgtgtatgtatgtttaatataacatgacaggcactaggacgtctgcctttttaaggcagttccgttaagggtttttgtttttaaacttttttttgccatccatcctgtgcaatatgccgtgtagaatatttgtcttaaaattcaaggccacaaaaacaatgtttgggggaaaaaaaagaaaaaatcatgccagctaatcatgtcaagttcactgcctgtcagattgttgatatataccttctgtaaataactttttttgagaaggaaataaaatcagctggaactgaaccctaaaaaaaaacttttgtcgttattatgcccaatgcctaagattggaaaggccctacagtatctggacactac

SEQ ID NO: 297504 - DNA, 5847 bp, Homo sapiens
agagtgaagcaatctttaattttgaaaacagggaaaacaaatatttagaaagtaaaaccgatttccatcctttacatgccattatacatcctatacaaaactctggaaatctgcctattgaggtaattacggagcactacctaatgtgtttcaagggaaagctcccctgtttgggctatgcaggatttacagggagtttaaatcattaaataaccatagttgacccttgcttggttaagagagtaagcaattattgcaaagtcctcttccctgccttccacaaacagcacaaaaacggttctgaagggatttacacaatacatcaacatctgtgctgtacctagagttgttaaaataattgtgatgacaggtgtctaggtaccactttcttaatggttttcaatatccattgatttattgttttgtggctttctcttcccctttacagctttggctttaagaaagagctggggaacagattttgcaccagaggctgattctttattccaatgctgaaaagaactaataaaaataatcacttggcttttaagcagaaagcttccatttacagtatttcacccttaccccgccccgttccaagccccttgttatctaacataatggttagaatacatttccgtctctccccttaataatttcatgcattaacatcctcttcacacactatacacacacgcacgcgcgcacacacacgcgcgcgcacacacacagcaaaaggaaaaaagaggcagcagaaatctcagctgtacttctagcccttttaaaaagtttgctctgtaaattggaatgaggtcagatttggagcttctcattgcacgcggagattattattgcatcgggttccaagccaatgggaagcccgggggaggggtttggcatgaggaagcgttggttacagcagctgattggctgcagccaagactgtgaaaggataaagaggcgcgaggcggaattggggtcggctctaagctgcagcaagagaaactgtgtgtgaggggaagaggcctgtttcgctgtcgggtctctagttcttgcacgctctttaagagtctgcactggaggaactcctgccattaccagctcccttcttgcagaagggagggggaaacatacatttattcatgccagtctgttgcatgcaggctttttggcttcctaccttgcaacaaaataattgcaccaactccttagtgccgattccgcccacagagagtcctggagccacagtcttttttgctttgcattgtaggagagggactaagtgctagagactatgtcgctttcctgagctaccgagagcgctcgtgaactggaatcaactgcttcagggaaaaagaaaaaaaaaaaaaaaagacttgcctgggaggccgcgagaaacttgcattggaagcttcagcaaccagcattcgagaaactcctctctactttagcacggtctccagactcagccgagagacagcaaactgcagcgcggtgagagagcgagagagagggagagagagactctccagcctgggaactataactcctctgcgagaggcggagaactccttccccaaatcttttggggacttttctctctttacccacctccgcccctgcgaggagttgaggggccagttcggccgccgcgcgcgtcttcccgttcggcgtgtgcttggcccggggaaccgggagggcccggcgatcgcgcggcggccgccgcgagggtgtgagcgcgcgtgggcgcccgccgagccgaggccatggtgcagcaaaccaacaatgccgagaacacggaagcgctgctggccggcgagagctcggactcgggcgccggcctcgagctgggaatcgcctcctcccccacgcccggctccaccgcctccacgggcggcaaggccgacgacccgagctggtgcaagaccccgagtgggcacatcaagcgacccatgaacgccttcatggtgtggtcgcagatcgagcggcgcaagatcatggagcagtcgcccgacatgcacaacgccgagatctccaagcggctgggcaaacgctggaagctgctcaaagacagcgacaagatccctttcattcgagaggcggagcggctgcgcctcaagcacatggctgactaccccgactacaagtaccggcccaggaagaaggtgaagtccggcaacgccaactccagctcctcggccgccgcctcctccaagccgggggagaagggagacaaggtcggtggcagtggcgggggcggccatgggggcggcggcggcggcgggagcagcaacgcggggggaggaggcggcggtgcgagtggcggcggcgccaactccaaaccggcgcagaaaaagagctgcggctccaaagtggcgggcggcgcgggcggtggggttagcaaaccgcacgccaagctcatcctggcaggcggcggcggcggcgggaaagcagcggctgccgccgccgcctccttcgccgccgaacaggcgggggccgccgccctgctgcccctgggcgccgccgccgaccaccactcgctgtacaaggcgcggactcccagcgcctcggcctccgcctcctcggcagcctcggcctccgcagcgctcgcggccccgggcaagcacctggcggagaagaaggtgaagcgcgtctacctgttcggcggcctgggcacgtcgtcgtcgcccgtgggcggcgtgggcgcgggagccgaccccagcgaccccctgggcctgtacgaggaggagggcgcgggctgctcgcccgacgcgcccagcctgagcggccgcagcagcgccgcctcgtcccccgccgccggccgctcgcccgccgaccaccgcggctacgccagcctgcgcgccgcctcgcccgccccgtccagcgcgccctcgcacgcgtcctcctcggcctcgtcccactcctcctcttcctcctcctcgggctcctcgtcctccgacgacgagttcgaagacgacctgctcgacctgaaccccagctcaaactttgagagcatgtccctgggcagcttcagttcgtcgtcggcgctcgaccgggacctggattttaacttcgagcccggctccggctcgcacttcgagttcccggactactgcacgcccgaggtgagcgagatgatctcgggagactggctcgagtccagcatctccaacctggttttcacctactgaagggcgcgcaggcagggagaagggccggggggggtaggagaggagaaaaaaaaagtgaaaaaaagaaacgaaaaggacagacgaagagtttaaagagaaaagggaaaaaagaaagaaaaagtaagcagggctggcttcgcccgcgttctcgtcgtcggatcaaggagcgcggcggcgttttggacccgcgctcccatcccccaccttcccgggccggggacccactctgcccagccggagggacgcggaggaggaagagggtagacaggggcgacctgtgattgttgttattgatgttgttgttgatggcaaaaaaaaaaaagcgacttcgagtttgctcccctttgcttgaagagaccccctcccccttccaacgagcttccggacttgtctgcacccccagcaagaaggcgagttagttttctagagacttgaaggagtctcccccttcctgcatcaccaccttggttttgttttattttgcttcttggtcaagaaaggaggggagaacccagcgcacccctccccccctttttttaaacgcgtgatgaagacagaaggctccggggtgacgaatttggccgatggcagatgttttgggggaacgccgggactgagagactccacgcaggcgaattcccgtttggggcttttttttcctccctcttttccccttgccccctctgcagccggaggaggagatgttgaggggaggaggccagccagtgtgaccggcgctaggaaatgacccgagaaccccgttggaagcgcagcagcgggagctaggggcgggggcggaggaggacacgaactggaagggggttcacggtcaaactgaaatggatttgcacgttggggagctggcggcggcggctgctgggcctccgccttcttttctacgtgaaatcagtgaggtgagacttcccagaccccggaggcgtggaggagaggagactgtttgatgtggtacaggggcagtcagtggagggcgagtggtttcggaaaaaaaaaaagaaaaaaagaaaaaaaaagaaaaaaaaaagatttttttcttctcttaatcggaatcgtgatggtgttggattatttcaatggtggggttaatatagcatgttatcctgtctatcttttaaagatttctgtataagactgttgagcagtttttaaaatagtgtaggataatataaaaagcagatagatggcgctatgtttgattcctacaacgaaattatcaccagctttttttcattcttaactctttaaaggattcaaacgcaactcaaatctgtgctggactttaaaaaaacaattcaggaccaaattttttctcagtgtgtgtgtttattccttataggtgtaaatgagaagacgtgtttttttccttcaccgatgctccatcctcgtatttctttttccttgtaaatgtaatcagatgccattttatatgtggacgtatttatactggccaaacatattttttcttttgtccctttttttctttcctttctttttacttcctttatttctttattccttccttttcctttttttctttttttttctttttttttttttttttgggtagttgttgttacccacgccattttacgtctccttcactgaagggctagagttttaacttttaattttttatatttaaatgtagacttttgacacttttaaaaaacaaaaaaagacaagagagatgaaaacgtttgattattttctcagtgtatttttgtaaaaaatatataaagggggtgttaatcggtgtaaatcgctgtttggatttcctgattttataacagggcggctggttaatatctcacacagtttaaaaaatcagcccctaatttctccatgtttacacttcaatctgcaggcttcttaaagtgacagtatcccttaacctgccaccagtgtccaccctccggcccccgtcttgtaaaaaggggaggagaattagccaaacactgtaagcttttaagaaaaacaaagttttaaacgaaatactgctctgtccagaggctttaaaactggtgcaattacagcaaaaagggattctgtagctttaacttgtaaaccacatcttttttgcactttttttataagcaaaaacgtgccgtttaaaccactggatctatctaaatgccgatttgagttcgcgacactatgtactgcgtttttcattcttgtatttgactatttaatcctttctacttgtcgctaaatataattgttttagtcttatggcatgatgatagcatatgtgttcaggtttatagctgttgtgtttaaaaattgaaaaaagtggaaaacatctttgtacatttaagtctgtattataataagcaaaaagattgtgtgtatgtatgtttaatataacatgacaggcactaggacgtctgcctttttaaggcagttccgttaagggtttttgtttttaaacttttttttgccatccatcctgtgcaatatgccgtgtagaatatttgtcttaaaattcaaggccacaaaaacaatgtttgggggaaaaaaaagaaaaaatcatgccagctaatcatgtcaagttcactgcctgtcagattgttgatatataccttctgtaaataactttttttgagaaggaaataaaatcagctggaactgaacccta

SEQ ID NO: 297505 - DNA, 5045 bp, Homo sapiens
  misc_feature (24)..(24): n is a, c, g, or t
  misc_feature (38)..(38): n is a, c, g, or t
tgggttcccccggactggcagganttcgcggccgcgtncgacacggctgcgagaagacgacagaagggggctgacagagcgagattctatcctaaaaaaaaaaaaaaaaaaaaaaaaaaaaaagcggccgctcgaattcgcggccgcgtcgacacggctgcgagaagacgacagaagggggctctaagctgcagcaagagaaactgtgtgtgaggggaagaggcctgtttcgctgtcgggtctctagttcttgcacgctctttaagagtctgcactggaggaactcctgccattaccagctcccttcttgcagaagggagggggaaacatacatttattcatgccagtctgttgcatgcaggctttttggcttcctaccttgcaacaaaataattgcaccaactccttagtgccgattccgcccacagagagtcctggagccacagtcttttttgctttgcattgtaggagagggactaagtgctagagactatgtcgctttcctgagctaccgagagcgctcgtgaactggaatcaactgcttcagggaaaaagaaaaaaaaaaaaaaaagacttgcctgggaggccgcgagaaacttgcattggaagcttcagcaaccagcattcgagaaactcctctctactttagcacggtctccagactcagccgagagacagcaaactgcagcgcggtgagagagcgagagagagggagagagagactctccagcctgggaactataactcctctgcgagaggcggagaactccttccccaaatcttttggggacttttctctctttacccacctccgcccctgcgaggagttgaggggccagttcggccgccgcgcgcgtcttcccgttcggcgtgtgcttggcccggggaaccgggagggcccggcgatcgcgcggcggccgccgcgagggtgtgagcgcgcgtgggcgcccgccgagccgaggccatggtgcagcaaaccaacaatgccgagaacacggaagcgctgctggccggcgagagctcggactcgggcgccggcctcgagctgggaatcgcctcctcccccacgcccggctccaccgcctccacgggcggcaaggccgacgacccgagctggtgcaagaccccgagtgggcacatcaagcgacccatgaacgccttcatggtgtggtcgcagatcgagcggcgcaagatcatggagcagtcgcccgacatgcacaacgccgagatctccaagcggctgggcaaacgctggaagctgctcaaagacagcgacaagatccctttcattcgagaggcggagcggctgcgcctcaagcacatggctgactaccccgactacaagtaccggcccaggaagaaggtgaagtccggcaacgccaactccagctcctcggccgccgcctcctccaagccgggggagaagggagacaaggtcggtggcagtggcgggggcggccatgggggcggcggcggcggcgggagcagcaacgcggggggaggaggcggcggtgcgagtggcggcggcgccaactccaaaccggcgcagaaaaagagctgcggctccaaagtggcgggcggcgcgggcggtggggttagcaaaccgcacgccaagctcatcctggcaggcggcggcggcggcgggaaagcagcggctgccgccgccgcctccttcgccgccgaacaggcgggggccgccgccctgctgcccctgggcgccgccgccgaccaccactcgctgtacaaggcgcggactcccagcgcctcggcctccgcctcctcggcagcctcggcctccgcagcgctcgcggccccgggcaagcacctggcggagaagaaggtgaagcgcgtctacctgttcggcggcctgggcacgtcgtcgtcgcccgtgggcggcgtgggcgcgggagccgaccccagcgaccccctgggcctgtacgaggaggagggcgcgggctgctcgcccgacgcgcccagcctgagcggccgcagcagcgccgcctcgtcccccgccgccggccgctcgcccgccgaccaccgcggctacgccagcctgcgcgccgcctcgcccgccccgtccagcgcgccctcgcacgcgtcctcctcggcctcgtcccactcctcctcttcctcctcctcgggctcctcgtcctccgacgacgagttcgaagacgacctgctcgacctgaaccccagctcaaactttgagagcatgtccctgggcagcttcagttcgtcgtcggcgctcgaccgggacctggattttaacttcgagcccggctccggctcgcacttcgagttcccggactactgcacgcccgaggtgagcgagatgatctcgggagactggctcgagtccagcatctccaacctggttttcacctactgaagggcgcgcaggcagggagaagggccggggggggtaggagaggagaaaaaaaaagtgaaaaaaagaaacgaaaaggacagacgaagagtttaaagagaaaagggaaaaaagaaagaaaaagtaagcagggctggcttcgcccgcgttctcgtcgtcggatcaaggagcgcggcggcgttttggacccgcgctcccatcccccaccttcccgggccggggacccactctgcccagccggagggacgcggaggaggaagagggtagacaggggcgacctgtgattgttgttattgatgttgttgttgatggcaaaaaaaaaaaagcgacttcgagtttgctcccctttgcttgaagagaccccctcccccttccaacgagcttccggacttgtctgcacccccagcaagaaggcgagttagttttctagagacttgaaggagtctcccccttcctgcatcaccaccttggttttgttttattttgcttcttggtcaagaaaggaggggagaacccagcgcacccctccccccctttttttaaacgcgtgatgaagacagaaggctccggggtgacgaatttggccgatggcagatgttttgggggaacgccgggactgagagactccacgcaggcgaattcccgtttggggcttttttttcctccctcttttccccttgccccctctgcagccggaggaggagatgttgaggggaggaggccagccagtgtgaccggcgctaggaaatgacccgagaaccccgttggaagcgcagcagcgggagctaggggcgggggcggaggaggacacgaactggaagggggttcacggtcaaactgaaatggatttgcacgttggggagctggcggcggcggctgctgggcctccgccttcttttctacgtgaaatcagtgaggtgagacttcccagaccccggaggcgtggaggagaggagactgtttgatgtggtacaggggcagtcagtggagggcgagtggtttcggaaaaaaaaaaagaaaaaaagaaaaaaaaagaaaaaaaaaagatttttttcttctcttaatcggaatcgtgatggtgttggattatttcaatggtggggttaatatagcatgttatcctgtctatcttttaaagatttctgtataagactgttgagcagtttttaaaatagtgtaggataatataaaaagcagatagatggcgctatgtttgattcctacaacgaaattatcaccagctttttttcattcttaactctttaaaggattcaaacgcaactcaaatctgtgctggactttaaaaaaacaattcaggaccaaattttttctcagtgtgtgtgtttattccttataggtgtaaatgagaagacgtgtttttttccttcaccgatgctccatcctcgtatttctttttccttgtaaatgtaatcagatgccattttatatgtggacgtatttatactggccaaacatattttttcttttgtccctttttttctttcctttctttttacttcctttatttctttattccttccttttcctttttttctttttttttctttttttttttttttttgggtagttgttgttacccacgccattttacgtctccttcactgaagggctagagttttaacttttaattttttatatttaaatgtagacttttgacacttttaaaaaacaaaaaaagacaagagagatgaaaacgtttgattattttctcagtgtatttttgtaaaaaatatataaagggggtgttaatcggtgtaaatcgctgtttggatttcctgattttataacagggcggctggttaatatctcacacagtttaaaaaatcagcccctaatttctccatgtttacacttcaatctgcaggcttcttaaagtgacagtatcccttaacctgccaccagtgtccaccctccggcccccgtcttgtaaaaaggggaggagaattagccaaacactgtaagcttttaagaaaaacaaagttttaaacgaaatactgctctgtccagaggctttaaaactggtgcaattacagcaaaaagggattctgtagctttaacttgtaaaccacatcttttttgcactttttttataagcaaaaacgtgccgtttaaaccactggatctatctaaatgccgatttgagttcgcgacactatgtactgcgtttttcattcttgtatttgactatttaatcctttctacttgtcgctaaatataattgttttagtcttatggcatgatgatagcatatgtgttcaggtttatagctgttgtgtttaaaaattgaaaaaagtggaaaacatctttgtacatttaagtctgtattataataagcaaaaagattgtgtgtatgtatgtttaatataacatgacaggcactaggacgtctgcctttttaaggcagttccgttaagggtttttgtttttaaacttttttttgccatccatcctgtgcaatatgccgtgtagaatatttgtcttaaaattcaaggccacaaaaacaatgtttgggggaaaaaaaagaaaaaatcatgccagctaatcatgtcaagttcactgcctgtcagattgttgatatataccttctgtaaataactttttttgagaaggaaataaaatcagctggaactgaacccta

SEQ ID NO: 297506 - DNA, 4881 bp, Homo sapiens
  misc_feature (24)..(24): n is a, c, g, or t
  misc_feature (38)..(38): n is a, c, g, or t
tgggttcccccggactggcagganttcgcggccgcgtncgacacggctgcgagaagacgacagaagggggctctaagctgcagcaagagaaactgtgtgtgaggggaagaggcctgtttcgctgtcgggtctctagttcttgcacgctctttaagagtctgcactggaggaactcctgccattaccagctcccttcttgcagaagggagggggaaacatacatttattcatgccagtctgttgcatgcaggctttttggcttcctaccttgcaacaaaataattgcaccaactccttagtgccgattccgcccacagagagtcctggagccacagtcttttttgctttgcattgtaggagagggactaagtgctagagactatgtcgctttcctgagctaccgagagcgctcgtgaactggaatcaactgcttcagggaaaaagaaaaaaaaaaaaaaaagacttgcctgggaggccgcgagaaacttgcattggaagcttcagcaaccagcattcgagaaactcctctctactttagcacggtctccagactcagccgagagacagcaaactgcagcgcggtgagagagcgagagagagggagagagagactctccagcctgggaactataactcctctgcgagaggcggagaactccttccccaaatcttttggggacttttctctctttacccacctccgcccctgcgaggagttgaggggccagttcggccgccgcgcgcgtcttcccgttcggcgtgtgcttggcccggggaaccgggagggcccggcgatcgcgcggcggccgccgcgagggtgtgagcgcgcgtgggcgcccgccgagccgaggccatggtgcagcaaaccaacaatgccgagaacacggaagcgctgctggccggcgagagctcggactcgggcgccggcctcgagctgggaatcgcctcctcccccacgcccggctccaccgcctccacgggcggcaaggccgacgacccgagctggtgcaagaccccgagtgggcacatcaagcgacccatgaacgccttcatggtgtggtcgcagatcgagcggcgcaagatcatggagcagtcgcccgacatgcacaacgccgagatctccaagcggctgggcaaacgctggaagctgctcaaagacagcgacaagatccctttcattcgagaggcggagcggctgcgcctcaagcacatggctgactaccccgactacaagtaccggcccaggaagaaggtgaagtccggcaacgccaactccagctcctcggccgccgcctcctccaagccgggggagaagggagacaaggtcggtggcagtggcgggggcggccatgggggcggcggcggcggcgggagcagcaacgcggggggaggaggcggcggtgcgagtggcggcggcgccaactccaaaccggcgcagaaaaagagctgcggctccaaagtggcgggcggcgcgggcggtggggttagcaaaccgcacgccaagctcatcctggcaggcggcggcggcggcgggaaagcagcggctgccgccgccgcctccttcgccgccgaacaggcgggggccgccgccctgctgcccctgggcgccgccgccgaccaccactcgctgtacaaggcgcggactcccagcgcctcggcctccgcctcctcggcagcctcggcctccgcagcgctcgcggccccgggcaagcacctggcggagaagaaggtgaagcgcgtctacctgttcggcggcctgggcacgtcgtcgtcgcccgtgggcggcgtgggcgcgggagccgaccccagcgaccccctgggcctgtacgaggaggagggcgcgggctgctcgcccgacgcgcccagcctgagcggccgcagcagcgccgcctcgtcccccgccgccggccgctcgcccgccgaccaccgcggctacgccagcctgcgcgccgcctcgcccgccccgtccagcgcgccctcgcacgcgtcctcctcggcctcgtcccactcctcctcttcctcctcctcgggctcctcgtcctccgacgacgagttcgaagacgacctgctcgacctgaaccccagctcaaactttgagagcatgtccctgggcagcttcagttcgtcgtcggcgctcgaccgggacctggattttaacttcgagcccggctccggctcgcacttcgagttcccggactactgcacgcccgaggtgagcgagatgatctcgggagactggctcgagtccagcatctccaacctggttttcacctactgaagggcgcgcaggcagggagaagggccggggggggtaggagaggagaaaaaaaaagtgaaaaaaagaaacgaaaaggacagacgaagagtttaaagagaaaagggaaaaaagaaagaaaaagtaagcagggctggcttcgcccgcgttctcgtcgtcggatcaaggagcgcggcggcgttttggacccgcgctcccatcccccaccttcccgggccggggacccactctgcccagccggagggacgcggaggaggaagagggtagacaggggcgacctgtgattgttgttattgatgttgttgttgatggcaaaaaaaaaaaagcgacttcgagtttgctcccctttgcttgaagagaccccctcccccttccaacgagcttccggacttgtctgcacccccagcaagaaggcgagttagttttctagagacttgaaggagtctcccccttcctgcatcaccaccttggttttgttttattttgcttcttggtcaagaaaggaggggagaacccagcgcacccctccccccctttttttaaacgcgtgatgaagacagaaggctccggggtgacgaatttggccgatggcagatgttttgggggaacgccgggactgagagactccacgcaggcgaattcccgtttggggcttttttttcctccctcttttccccttgccccctctgcagccggaggaggagatgttgaggggaggaggccagccagtgtgaccggcgctaggaaatgacccgagaaccccgttggaagcgcagcagcgggagctaggggcgggggcggaggaggacacgaactggaagggggttcacggtcaaactgaaatggatttgcacgttggggagctggcggcggcggctgctgggcctccgccttcttttctacgtgaaatcagtgaggtgagacttcccagaccccggaggcgtggaggagaggagactgtttgatgtggtacaggggcagtcagtggagggcgagtggtttcggaaaaaaaaaaagaaaaaaagaaaaaaaaagaaaaaaaaaagatttttttcttctcttaatcggaatcgtgatggtgttggattatttcaatggtggggttaatatagcatgttatcctgtctatcttttaaagatttctgtataagactgttgagcagtttttaaaatagtgtaggataatataaaaagcagatagatggcgctatgtttgattcctacaacgaaattatcaccagctttttttcattcttaactctttaaaggattcaaacgcaactcaaatctgtgctggactttaaaaaaacaattcaggaccaaattttttctcagtgtgtgtgtttattccttataggtgtaaatgagaagacgtgtttttttccttcaccgatgctccatcctcgtatttctttttccttgtaaatgtaatcagatgccattttatatgtggacgtatttatactggccaaacatattttttcttttgtccctttttttctttcctttctttttacttcctttatttctttattccttccttttcctttttttctttttttttctttttttttttttttttgggtagttgttgttacccacgccattttacgtctccttcactgaagggctagagttttaacttttaattttttatatttaaatgtagacttttgacacttttaaaaaacaaaaaaagacaagagagatgaaaacgtttgattattttctcagtgtatttttgtaaaaaatatataaagggggtgttaatcggtgtaaatcgctgtttggatttcctgattttataacagggcggctggttaatatctcacacagtttaaaaaatcagcccctaatttctccatgtttacacttcaatctgcaggcttcttaaagtgacagtatcccttaacctgccaccagtgtccaccctccggcccccgtcttgtaaaaaggggaggagaattagccaaacactgtaagcttttaagaaaaacaaagttttaaacgaaatactgctctgtccagaggctttaaaactggtgcaattacagcaaaaagggattctgtagctttaacttgtaaaccacatcttttttgcactttttttataagcaaaaacgtgccgtttaaaccactggatctatctaaatgccgatttgagttcgcgacactatgtactgcgtttttcattcttgtatttgactatttaatcctttctacttgtcgctaaatataattgttttagtcttatggcatgatgatagcatatgtgttcaggtttatagctgttgtgtttaaaaattgaaaaaagtggtatgtatgtttaatataacatgacaggcactaggacgtctgcctttttaaggcagttccgttaagggtttttgtttttaaacttttttttgccatccatcctgtgcaatatgccgtgtagaatatttgtcttaaaattcaaggccacaaaaacaatgtttgggggaaaaaaaagaaaaaatcatgccagctaatcatgtcaagttcactgcctgtcagattgttgatatataccttctgtaaataactttttttgagaaggaaataaaatcagctggaactgaacccta

SEQ ID NO: 297507 - DNA, 5104 bp, Homo sapiens
gcagcaaaccaacaatgccgagaacacggaagcgctgctggccggcgagagctcggactcgggcgccggcctcgagctgggaatcgcctcctcccccacgcccggctccaccgcctccacgggcggcaaggccgacgacccgagctggtgcaagaccccgagtgggcacatcaagcgacccatgaacgccttcatggtgtggtcgcagatcgagcggcgcaagatcatggagcagtcgcccgacatgcacaacgccgagatctccaagcggctgggcaaacgcctgtttcgctgtcgggtctctagttcttgcacgctctttaagagtctgcactggaggaactcctgccattaccagctcccttcttgcagaagggagggggaaacatacatttattcatgccagtctgttgcatgcaggctttttggcttcctaccttgcaacaaaataattgcaccaactccttagtgccgattccgcccacagagagtcctggagccacagtcttttttgctttgcattgtaggagagggactaagtgctagagactatgtcgctttcctgagctaccgagagcgctcgtgaactggaatcaactgcttcagggaaaaagaaaaaaaaaaaaaaaagacttgcctgggaggccgcgagaaacttgcattggaagcttcagcaaccagcattcgagaaactcctctctactttagcacggtctccagactcagccgagagacagcaaactgcagcgcggtgagagagcgagagagagggagagagagactctccagcctgggaactataactcctctgcgagaggcggagaactccttccccaaatcttttggggacttttctctctttacccacctccgcccctgcgaggagttgaggggccagttcggccgccgcgcgcgtcttcccgttcggcgtgtgcttggcccggggaaccgggagggcccggcgatcgcgcggcggccgccgcgagggtgtgagcgcgcgtgggcgcccgccgagccgaggccatggtgcagcaaaccaacaatgccgagaacacggaagcgctgctggccggcgagagctcggactcgggcgccggcctcgagctgggaatcgcctcctcccccacgcccggctccaccgcctccacgggcggcaaggccgacgacccgagctggtgcaagaccccgagtgggcacatcaagcgacccatgaacgccttcatggtgtggtcgcagatcgagcggcgcaagatcatggagcagtcgcccgacatgcacaacgccgagatctccaagcggctgggcaaacgctggaagctgctcaaagacagcgacaagatccctttcattcgagaggcggagcggctgcgcctcaagcacatggctgactaccccgactacaagtaccggcccaggaagaaggtgaagtccggcaacgccaactccagctcctcggccgccgcctcctccaagccgggggagaagggagacaaggtcggtggcagtggcgggggcggccatgggggcggcggcggcggcgggagcagcaacgcggggggaggaggcggcggtgcgagtggcggcggcgccaactccaaaccggcgcagaaaaagagctgcggctccaaagtggcgggcggcgcgggcggtggggttagcaaaccgcacgccaagctcatcctggcaggcggcggcggcggcgggaaagcagcggctgccgccgccgcctccttcgccgccgaacaggcgggggccgccgccctgctgcccctgggcgccgccgccgaccaccactcgctgtacaaggcgcggactcccagcgcctcggcctccgcctcctcggcagcctcggcctccgcagcgctcgcggccccgggcaagcacctggcggagaagaaggtgaagcgcgtctacctgttcggcggcctgggcacgtcgtcgtcgcccgtgggcggcgtgggcgcgggagccgaccccagcgaccccctgggcctgtacgaggaggagggcgcgggctgctcgcccgacgcgcccagcctgagcggccgcagcagcgccgcctcgtcccccgccgccggccgctcgcccgccgaccaccgcggctacgccagcctgcgcgccgcctcgcccgccccgtccagcgcgccctcgcacgcgtcctcctcggcctcgtcccactcctcctcttcctcctcctcgggctcctcgtcctccgacgacgagttcgaagacgacctgctcgacctgaaccccagctcaaactttgagagcatgtccctgggcagcttcagttcgtcgtcggcgctcgaccgggacctggattttaacttcgagcccggctccggctcgcacttcgagttcccggactactgcacgcccgaggtgagcgagatgatctcgggagactggctcgagtccagcatctccaacctggttttcacctactgaagggcgcgcaggcagggagaagggccggggggggtaggagaggagaaaaaaaaagtgaaaaaaagaaacgaaaaggacagacgaagagtttaaagagaaaagggaaaaaagaaagaaaaagtaagcagggctggcttcgcccgcgttctcgtcgtcggatcaaggagcgcggcggcgttttggacccgcgctcccatcccccaccttcccgggccggggacccactctgcccagccggagggacgcggaggaggaagagggtagacaggggcgacctgtgattgttgttattgatgttgttgttgatggcaaaaaaaaaaaagcgacttcgagtttgctcccctttgcttgaagagaccccctcccccttccaacgagcttccggacttgtctgcacccccagcaagaaggcgagttagttttctagagacttgaaggagtctcccccttcctgcatcaccaccttggttttgttttattttgcttcttggtcaagaaaggaggggagaacccagcgcacccctccccccctttttttaaacgcgtgatgaagacagaaggctccggggtgacgaatttggccgatggcagatgttttgggggaacgccgggactgagagactccacgcaggcgaattcccgtttggggcttttttttcctccctcttttccccttgccccctctgcagccggaggaggagatgttgaggggaggaggccagccagtgtgaccggcgctaggaaatgacccgagaaccccgttggaagcgcagcagcgggagctaggggcgggggcggaggaggacacgaactggaagggggttcacggtcaaactgaaatggatttgcacgttggggagctggcggcggcggctgctgggcctccgccttcttttctacgtgaaatcagtgaggtgagacttcccagaccccggaggcgtggaggagaggagactgtttgatgtggtacaggggcagtcagtggagggcgagtggtttcggaaaaaaaaaaagaaaaaaagaaaaaaaaagaaaaaaaaaagatttttttcttctcttaatcggaatcgtgatggtgttggattatttcaatggtggggttaatatagcatgttatcctgtctatcttttaaagatttctgtataagactgttgagcagtttttaaaatagtgtaggataatataaaaagcagatagatggcgctatgtttgattcctacaacgaaattatcaccagctttttttcattcttaactctttaaaggattcaaacgcaactcaaatctgtgctggactttaaaaaaacaattcaggaccaaattttttctcagtgtgtgtgtttattccttataggtgtaaatgagaagacgtgtttttttccttcaccgatgctccatcctcgtatttctttttccttgtaaatgtaatcagatgccattttatatgtggacgtatttatactggccaaacatattttttcttttgtccctttttttctttcctttctttttacttcctttatttctttattccttccttttcctttttttctttttttttctttttttttttttttttgggtagttgttgttacccacgccattttacgtctccttcactgaagggctagagttttaacttttaattttttatatttaaatgtagacttttgacacttttaaaaaacaaaaaaagacaagagagatgaaaacgtttgattattttctcagtgtatttttgtaaaaaatatataaagggggtgttaatcggtgtaaatcgctgtttggatttcctgattttataacagggcggctggttaatatctcacacagtttaaaaaatcagcccctaatttctccatgtttacacttcaatctgcaggcttcttaaagtgacagtatcccttaacctgccaccagtgtccaccctccggcccccgtcttgtaaaaaggggaggagaattagccaaacactgtaagcttttaagaaaaacaaagttttaaacgaaatactgctctgtccagaggctttaaaactggtgcaattacagcaaaaagggattctgtagctttaacttgtaaaccacatcttttttgcactttttttataagcaaaaacgtgccgtttaaaccactggatctatctaaatgccgatttgagttcgcgacactatgtactgcgtttttcattcttgtatttgactatttaatcctttctacttgtcgctaaatataattgttttagtcttatggcatgatgatagcatatgtgttcaggtttatagctgttgtgtttaaaaattgaaaaaagtggaaaacatctttgtacatttaagtctgtattataataagcaaaaagattgtgtgtatgtatgtttaatataacatgacaggcactaggacgtctgcctttttaaggcagttccgttaagggtttttgtttttaaacttttttttgccatccatcctgtgcaatatgccgtgtagaatatttgtcttaaaattcaaggccacaaaaacaatgtttgggggaaaaaaaagaaaaaatcatgccagctaatcatgtcaagttcactgcctgtcagattgttgatatataccttctgtaaataactttttttgagaaggaaataaaatcagctggaactgaacccta

SEQ ID NO: 297508 - DNA, 4774 bp, Homo sapiens
  misc_feature (24)..(24): n is a, c, g, or t
  misc_feature (38)..(38): n is a, c, g, or t
tgggttcccccggactggcagganttcgcggccgcgtncgacacggctgcgagaagacgacagaagggggctctaagctgcagcaagagaaactgtgtgtgaggggaagaggcctgtttcgctgtcgggtctctagttcttgcacgctctttaagagtctgcactggaggaactcctgccattaccagctcccttcttgcagaagggagggggaaacatacatttattcatgccagtctgttgcatgcaggctttttggcttcctaccttgcaacaaaataattgcaccaactccttagtgccgattccgcccacagagagtcctggagccacagtcttttttgctttgcattgtaggagagggactaagtgctagagactatgtcgctttcctgagctaccgagagcgctcgtgaactggaatcaactgcttcagggaaaaagaaaaaaaaaaaaaaaagacttgcctgggaggccgcgagaaacttgcattggaagcttcagcaaccagcattcgagaaactcctctctactttagcacggtctccagactcagccgagagacagcaaactgcagcgcggtgagagagcgagagagagggagagagagactctccagcctgggaactataactcctctgcgagaggcggagaactccttccccaaatcttttggggacttttctctctttacccacctccgcccctgcgaggagttgaggggccagttcggccgccgcgcgcgtcttcccgttcggcgtgtgcttggcccggggaaccgggagggcccggcgatcgcgcggcggccgccgcgagggtgtgagcgcgcgtgggcgcccgccgagccgaggccatggtgcagcaaaccaacaatgccgagaacacggaagcgctgctggccggcgagagctcggactcgggcgccggcctcgagctgggaatcgcctcctcccccacgcccggctccaccgcctccacgggcggcaaggccgacgacccgagctggtgcaagaccccgagtgggcacatcaagcgacccatgaacgccttcatggtgtggtcgcagatcgagcggcgcaagatcatggagcagtcgcccgacatgcacaacgccgagatctccaagcggctgggcaaacgctggaagctgctcaaagacagcgacaagatccctttcattcgagaggcggagcggctgcgcctcaagcacatggctgactaccccgactacaagtaccggcccaggaagaaggtgaagtccggcaacgccaactccagctcctcggccgccgcctcctccaagccgggggagaagggagacaaggtcggtggcagtggcgggggcggccatgggggcggcggcggcggcgggagcagcaacgcggggggaggaggcggcggtgcgagtggcggcggcgccaactccaaaccggcgcagaaaaagagctgcggctccaaagtggcgggcggcgcgggcggtggggttagcaaaccgcacgccaagctcatcctggcaggcggcggcggcggcgggaaagcagcggctgccgccgccgcctccttcgccgccgaacaggcgggggccgccgccctgctgcccctgggcgccgccgccgaccaccactcgctgtacaaggcgcggactcccagcgcctcggcctccgcctcctcggcagcctcggcctccgcagcgctcgcggccccgggcaagcacctggcggagaagaaggtgaagcgcgtctacctgttcggcggcctgggcacgtcgtcgtcgcccgtgggcggcgtgggcgcgggagccgaccccagcgaccccctgggcctgtacgaggaggagggcgcgggctgctcgcccgacgcgcccagcctgagcggccgcagcagcgccgcctcgtcccccgccgccggccgctcgcccgccgaccaccgcggctacgccagcctgcgcgccgcctcgcccgccccgtccagcgcgccctcgcacgcgtcctcctcggcctcgtcccactcctcctcttcctcctcctcgggctcctcgtcctccgacgacgagttcgaagacgacctgctcgacctgaaccccagctcaaactttgagagcatgtccctgggcagcttcagttcgtcgtcggcgctcgaccgggacctggattttaacttcgagcccggctccggctcgcacttcgagttcccggactactgcacgcccgaggtgagcgagatgatctcgggagactggctcgagtccagcatctccaacctggttttcacctactgaagggcgcgcaggcagggagaagggccggggggggtaggagaggagaaaaaaaaagtgaaaaaaagaaacgaaaaggacagacgaagagtttaaagagaaaagggaaaaaagaaagaaaaagtaagcagggctggcttcgcccgcgttctcgtcgtcggatcaaggagcgcggcggcgttttggacccgcgctcccatcccccaccttcccgggccggggacccactctgcccagccggagggacgcggaggaggaagagggtagacaggggcgacctgtgattgttgttattgatgttgttgttgatggcaaaaaaaaaaaagcgacttcgagtttgctcccctttgcttgaagagaccccctcccccttccaacgagcttccggacttgtctgcacccccagcaagggtgacgaatttggccgatggcagatgttttgggggaacgccgggactgagagactccacgcaggcgaattcccgtttggggcttttttttcctccctcttttccccttgccccctctgcagccggaggaggagatgttgaggggaggaggccagccagtgtgaccggcgctaggaaatgacccgagaaccccgttggaagcgcagcagcgggagctaggggcgggggcggaggaggacacgaactggaagggggttcacggtcaaactgaaatggatttgcacgttggggagctggcggcggcggctgctgggcctccgccttcttttctacgtgaaatcagtgaggtgagacttcccagaccccggaggcgtggaggagaggagactgtttgatgtggtacaggggcagtcagtggagggcgagtggtttcggaaaaaaaaaaagaaaaaaagaaaaaaaaagaaaaaaaaaagatttttttcttctcttaatcggaatcgtgatggtgttggattatttcaatggtggggttaatatagcatgttatcctgtctatcttttaaagatttctgtataagactgttgagcagtttttaaaatagtgtaggataatataaaaagcagatagatggcgctatgtttgattcctacaacgaaattatcaccagctttttttcattcttaactctttaaaggattcaaacgcaactcaaatctgtgctggactttaaaaaaacaattcaggaccaaattttttctcagtgtgtgtgtttattccttataggtgtaaatgagaagacgtgtttttttccttcaccgatgctccatcctcgtatttctttttccttgtaaatgtaatcagatgccattttatatgtggacgtatttatactggccaaacatattttttcttttgtccctttttttctttcctttctttttacttcctttatttctttattccttccttttcctttttttctttttttttctttttttttttttttttgggtagttgttgttacccacgccattttacgtctccttcactgaagggctagagttttaacttttaattttttatatttaaatgtagacttttgacacttttaaaaaacaaaaaaagacaagagagatgaaaacgtttgattattttctcagtgtatttttgtaaaaaatatataaagggggtgttaatcggtgtaaatcgctgtttggatttcctgattttataacagggcggctggttaatatctcacacagtttaaaaaatcagcccctaatttctccatgtttacacttcaatctgcaggcttcttaaagtgacagtatcccttaacctgccaccagtgtccaccctccggcccccgtcttgtaaaaaggggaggagaattagccaaacactgtaagcttttaagaaaaacaaagttttaaacgaaatactgctctgtccagaggctttaaaactggtgcaattacagcaaaaagggattctgtagctttaacttgtaaaccacatcttttttgcactttttttataagcaaaaacgtgccgtttaaaccactggatctatctaaatgccgatttgagttcgcgacactatgtactgcgtttttcattcttgtatttgactatttaatcctttctacttgtcgctaaatataattgttttagtcttatggcatgatgatagcatatgtgttcaggtttatagctgttgtgtttaaaaattgaaaaaagtggaaaacatctttgtacatttaagtctgtattataataagcaaaaagattgtgtgtatgtatgtttaatataacatgacaggcactaggacgtctgcctttttaaggcagttccgttaagggtttttgtttttaaacttttttttgccatccatcctgtgcaatatgccgtgtagaatatttgtcttaaaattcaaggccacaaaaacaatgtttgggggaaaaaaaagaaaaaatcatgccagctaatcatgtcaagttcactgcctgtcagattgttgatatataccttctgtaaataactttttttgagaaggaaataaaatcagctggaactgaacccta

SEQ ID NO: 297509 - DNA, 4877 bp, Homo sapiens
  misc_feature (24)..(24): n is a, c, g, or t
  misc_feature (38)..(38): n is a, c, g, or t
tgggttcccccggactggcagganttcgcggccgcgtncgacacggctgcgagaagacgacagaagggggctctaagctgcagcaagagaaactgtgtgtgaggggaagaggcctgtttcgctgtcgggtctctagttcttgcacgctctttaagagtctgcactggaggaactcctgccattaccagctcccttcttgcagaagggagggggaaacatacatttattcatgccagtctgttgcatgcaggctttttggcttcctaccttgcaacaaaataattgcaccaactccttagtgccgattccgcccacagagagtcctggagccacagtcttttttgctttgcattgtaggagagggactaagtgctagagactatgtcgctttcctgagctaccgagagcgctcgtgaactggaatcaactgcttcagggaaaaagaaaaaaaaaaaaaaaagacttgcctgggaggccgcgagaaacttgcattggaagcttcagcaaccagcattcgagaaactcctctctactttagcacggtctccagactcagccgagagacagcaaactgcagcgcggtgagagagcgagagagagggagagagagactctccagcctgggaactataactcctctgcgagaggcggagaactccttccccaaatcttttggggacttttctctctttacccacctccgcccctgcgaggagttgaggggccagttcggccgccgcgcgcgtcttcccgttcggcgtgtgcttggcccggggaaccgggagggcccggcgatcgcgcggcggccgccgcgagggtgtgagcgcgcgtgggcgcccgccgagccgaggccatggtgcagcaaaccaacaatgccgagaacacggaagcgctgctggccggcgagagctcggactcgggcgccggcctcgagctgggaatcgcctcctcccccacgcccggctccaccgcctccacgggcggcaaggccgacgacccgagctggtgcaagaccccgagtgggcacatcaagcgacccatgaacgccttcatggtgtggtcgcagatcgagcggcgcaagatcatggagcagtcgcccgacatgcacaacgccgagatctccaagcggctgggcaaacgctggaagctgctcaaagacagcgacaagatccctttcattcgagaggcggagcggctgcgcctcaagcacatggctgactaccccgactacaagtaccggcccaggaagaaggtgaagtccggcaacgccaactccagctcctcggccgccgcctcctccaagccgggggagaagggagacaaggtcggtggcagtggcgggggcggccatgggggcggcggcggcggcgggagcagcaacgcggggggaggaggcggcggtgcgagtggcggcggcgccaactccaaaccggcgcagaaaaagagctgcggctccaaagtggcgggcggcgcgggcggtggggttagcaaaccgcacgccaagctcatcctggcaggcggcggcggcggcgggaaagcagcggctgccgccgccgcctccttcgccgccgaacaggcgggggccgccgccctgctgcccctgggcgccgccgccgaccaccactcgctgtacaaggcgcggactcccagcgcctcggcctccgcctcctcggcagcctcggcctccgcagcgctcgcggccccgggcaagcacctggcggagaagaaggtgaagcgcgtctacctgttcggcggcctgggcacgtcgtcgtcgcccgtgggcggcgtgggcgcgggagccgaccccagcgaccccctgggcctgtacgaggaggagggcgcgggctgctcgcccgacgcgcccagcctgagcggccgcagcagcgccgcctcgtcccccgccgccggccgctcgcccgccgaccaccgcggctacgccagcctgcgcgccgcctcgcccgccccgtccagcgcgccctcgcacgcgtcctcctcggcctcgtcccactcctcctcttcctcctcctcgggctcctcgtcctccgacgacgagttcgaagacgacctgctcgacctgaaccccagctcaaactttgagagcatgtccctgggcagcttcagttcgtcgtcggcgctcgaccgggacctggattttaacttcgagcccggctccggctcgcacttcgagttcccggactactgcacgcccgaggtgagcgagatgatctcgggagactggctcgagtccagcatctccaacctggttttcacctactgaagggcgcgcaggcagggagaagggccggggggggtaggagaggagaaaaaaaaagtgaaaaaaagaaacgaaaaggacagacgaagagtttaaagagaaaagggaaaaaagaaagaaaaagtaagcagggctggcttcgcccgcgttctcgtcgtcggatcaaggagcgcggcggcgttttggacccgcgctcccatcccccaccttcccgggccggggacccactctgcccagccggagggacgcggaggaggaagagggtagacaggggcgacctgtgattgttgttattgatgttgttgttgatggcaaaaaaaaaaaagcgacttcgagtttgctcccctttgcttgaagagaccccctcccccttccaacgagcttccggacttgtctgcacccccagcaagaaggcgagttagttttctagagacttgaaggagtctcccccttcctgcatcaccaccttggttttgttttattttgcttcttggtcaagaaaggaggggagaacccagcgcacccctccccccctttttttaaacgcgtgatgaagacagaaggctccggggtgacgaatttggccgatggcagatgttttgggggaacgccgggactgagagactccacgcaggcgaattcccgtttggggcttttttttcctccctcttttccccttgccccctctgcagccggaggaggagatgttgaggggaggaggccagccagtgtgaccggcgctaggaaatgacccgaactggaagggggttcacggtcaaactgaaatggatttgcacgttggggagctggcggcggcggctgctgggcctccgccttcttttctacgtgaaatcagtgaggtgagacttcccagaccccggaggcgtggaggagaggagactgtttgatgtggtacaggggcagtcagtggagggcgagtggtttcggaaaaaaaaaaagaaaaaaagaaaaaaaaagaaaaaaaaaagatttttttcttctcttaatcggaatcgtgatggtgttggattatttcaatggtggggttaatatagcatgttatcctgtctatcttttaaagatttctgtataagactgttgagcagtttttaaaatagtgtaggataatataaaaagcagatagatggcgctatgtttgattcctacaacgaaattatcaccagctttttttcattcttaactctttaaaggattcaaacgcaactcaaatctgtgctggactttaaaaaaacaattcaggaccaaattttttctcagtgtgtgtgtttattccttataggtgtaaatgagaagacgtgtttttttccttcaccgatgctccatcctcgtatttctttttccttgtaaatgtaatcagatgccattttatatgtggacgtatttatactggccaaacatattttttcttttgtccctttttttctttcctttctttttacttcctttatttctttattccttccttttcctttttttctttttttttctttttttttttttttttgggtagttgttgttacccacgccattttacgtctccttcactgaagggctagagttttaacttttaattttttatatttaaatgtagacttttgacacttttaaaaaacaaaaaaagacaagagagatgaaaacgtttgattattttctcagtgtatttttgtaaaaaatatataaagggggtgttaatcggtgtaaatcgctgtttggatttcctgattttataacagggcggctggttaatatctcacacagtttaaaaaatcagcccctaatttctccatgtttacacttcaatctgcaggcttcttaaagtgacagtatcccttaacctgccaccagtgtccaccctccggcccccgtcttgtaaaaaggggaggagaattagccaaacactgtaagcttttaagaaaaacaaagttttaaacgaaatactgctctgtccagaggctttaaaactggtgcaattacagcaaaaagggattctgtagctttaacttgtaaaccacatcttttttgcactttttttataagcaaaaacgtgccgtttaaaccactggatctatctaaatgccgatttgagttcgcgacactatgtactgcgtttttcattcttgtatttgactatttaatcctttctacttgtcgctaaatataattgttttagtcttatggcatgatgatagcatatgtgttcaggtttatagctgttgtgtttaaaaattgaaaaaagtggaaaacatctttgtacatttaagtctgtattataataagcaaaaagattgtgtgtatgtatgtttaatataacatgacaggcactaggacgtctgcctttttaaggcagttccgttaagggtttttgtttttaaacttttttttgccatccatcctgtgcaatatgccgtgtagaatatttgtcttaaaattcaaggccacaaaaacaatgtttgggggaaaaaaaagaaaaaatcatgccagctaatcatgtcaagttcactgcctgtcagattgttgatatataccttctgtaaataactttttttgagaaggaaataaaatcagctggaactgaacccta

SEQ ID NO: 297510 - DNA, 4597 bp, Homo sapiens
tgcgcttccaacggggttctcgggtcatttcctagcgccggtcacactggttggcctcctcccctcaacatctcctcctccggctgcagagggggcaagggaaaaagaaaaaaaaaaaaaaaagacttgcctgggaggccgcgagaaacttgcattggaagcttcagcaaccagcattcgagaaactcctctctactttagcacggtctccagactcagccgagagacagcaaactgcagcgcggtgagagagcgagagagagggagagagagactctccagcctgggaactataactcctctgcgagaggcggagaactccttccccaaatcttttggggacttttctctctttacccacctccgcccctgcgaggagttgaggggccagttcggccgccgcgcgcgtcttcccgttcggcgtgtgcttggcccggggaaccgggagggcccggcgatcgcgcggcggccgccgcgagggtgtgagcgcgcgtgggcgcccgccgagccgaggccatggtgcagcaaaccaacaatgccgagaacacggaagcgctgctggccggcgagagctcggactcgggcgccggcctcgagctgggaatcgcctcctcccccacgcccggctccaccgcctccacgggcggcaaggccgacgacccgagctggtgcaagaccccgagtgggcacatcaagcgacccatgaacgccttcatggtgtggtcgcagatcgagcggcgcaagatcatggagcagtcgcccgacatgcacaacgccgagatctccaagcggctgggcaaacgctggaagctgctcaaagacagcgacaagatccctttcattcgagaggcggagcggctgcgcctcaagcacatggctgactaccccgactacaagtaccggcccaggaagaaggtgaagtccggcaacgccaactccagctcctcggccgccgcctcctccaagccgggggagaagggagacaaggtcggtggcagtggcgggggcggccatgggggcggcggcggcggcgggagcagcaacgcggggggaggaggcggcggtgcgagtggcggcggcgccaactccaaaccggcgcagaaaaagagctgcggctccaaagtggcgggcggcgcgggcggtggggttagcaaaccgcacgccaagctcatcctggcaggcggcggcggcggcgggaaagcagcggctgccgccgccgcctccttcgccgccgaacaggcgggggccgccgccctgctgcccctgggcgccgccgccgaccaccactcgctgtacaaggcgcggactcccagcgcctcggcctccgcctcctcggcagcctcggcctccgcagcgctcgcggccccgggcaagcacctggcggagaagaaggtgaagcgcgtctacctgttcggcggcctgggcacgtcgtcgtcgcccgtgggcggcgtgggcgcgggagccgaccccagcgaccccctgggcctgtacgaggaggagggcgcgggctgctcgcccgacgcgcccagcctgagcggccgcagcagcgccgcctcgtcccccgccgccggccgctcgcccgccgaccaccgcggctacgccagcctgcgcgccgcctcgcccgccccgtccagcgcgccctcgcacgcgtcctcctcggcctcgtcccactcctcctcttcctcctcctcgggctcctcgtcctccgacgacgagttcgaagacgacctgctcgacctgaaccccagctcaaactttgagagcatgtccctgggcagcttcagttcgtcgtcggcgctcgaccgggacctggattttaacttcgagcccggctccggctcgcacttcgagttcccggactactgcacgcccgaggtgagcgagatgatctcgggagactggctcgagtccagcatctccaacctggttttcacctactgaagggcgcgcaggcagggagaagggccggggggggtaggagaggagaaaaaaaaagtgaaaaaaagaaacgaaaaggacagacgaagagtttaaagagaaaagggaaaaaagaaagaaaaagtaagcagggctggcttcgcccgcgttctcgtcgtcggatcaaggagcgcggcggcgttttggacccgcgctcccatcccccaccttcccgggccggggacccactctgcccagccggagggacgcggaggaggaagagggtagacaggggcgacctgtgattgttgttattgatgttgttgttgatggcaaaaaaaaaaaagcgacttcgagtttgctcccctttgcttgaagagaccccctcccccttccaacgagcttccggacttgtctgcacccccagcaagaaggcgagttagttttctagagacttgaaggagtctcccccttcctgcatcaccaccttggttttgttttattttgcttcttggtcaagaaaggaggggagaacccagcgcacccctccccccctttttttaaacgcgtgatgaagacagaaggctccggggtgacgaatttggccgatggcagatgttttgggggaacgccgggactgagagactccacgcaggcgaattcccgtttggggcttttttttcctccctcttttccccttgccccctctgcagccggaggaggagatgttgaggggaggaggccagccagtgtgaccggcgctaggaaatgacccgagaaccccgttggaagcgcagcagcgggagctaggggcgggggcggaggaggacacgaactggaagggggttcacggtcaaactgaaatggatttgcacgttggggagctggcggcggcggctgctgggcctccgccttcttttctacgtgaaatcagtgaggtgagacttcccagaccccggaggcgtggaggagaggagactgtttgatgtggtacaggggcagtcagtggagggcgagtggtttcggaaaaaaaaaaagaaaaaaagaaaaaaaaagaaaaaaaaaagatttttttcttctcttaatcggaatcgtgatggtgttggattatttcaatggtggggttaatatagcatgttatcctgtctatcttttaaagatttctgtataagactgttgagcagtttttaaaatagtgtaggataatataaaaagcagatagatggcgctatgtttgattcctacaacgaaattatcaccagctttttttcattcttaactctttaaaggattcaaacgcaactcaaatctgtgctggactttaaaaaaacaattcaggaccaaattttttctcagtgtgtgtgtttattccttataggtgtaaatgagaagacgtgtttttttccttcaccgatgctccatcctcgtatttctttttccttgtaaatgtaatcagatgccattttatatgtggacgtatttatactggccaaacatattttttcttttgtccctttttttctttcctttctttttacttcctttatttctttattccttccttttcctttttttctttttttttctttttttttttttttttgggtagttgttgttacccacgccattttacgtctccttcactgaagggctagagttttaacttttaattttttatatttaaatgtagacttttgacacttttaaaaaacaaaaaaagacaagagagatgaaaacgtttgattattttctcagtgtatttttgtaaaaaatatataaagggggtgttaatcggtgtaaatcgctgtttggatttcctgattttataacagggcggctggttaatatctcacacagtttaaaaaatcagcccctaatttctccatgtttacacttcaatctgcaggcttcttaaagtgacagtatcccttaacctgccaccagtgtccaccctccggcccccgtcttgtaaaaaggggaggagaattagccaaacactgtaagcttttaagaaaaacaaagttttaaacgaaatactgctctgtccagaggctttaaaactggtgcaattacagcaaaaagggattctgtagctttaacttgtaaaccacatcttttttgcactttttttataagcaaaaacgtgccgtttaaaccactggatctatctaaatgccgatttgagttcgcgacactatgtactgcgtttttcattcttgtatttgactatttaatcctttctacttgtcgctaaatataattgttttagtcttatggcatgatgatagcatatgtgttcaggtttatagctgttgtgtttaaaaattgaaaaaagtggaaaacatctttgtacatttaagtctgtattataataagcaaaaagattgtgtgtatgtatgtttaatataacatgacaggcactaggacgtctgcctttttaaggcagttccgttaagggtttttgtttttaaacttttttttgccatccatcctgtgcaatatgccgtgtagaatatttgtcttaaaattcaaggccacaaaaacaatgtttgggggaaaaaaaagaaaaaatcatgccagctaatcatgtcaagttcactgcctgtcagattgttgatatataccttctgtaaataactttttttgagaaggaaataaaatcagctggaactgaacccta

SEQ ID NO: 297511 - DNA, 4157 bp, Homo sapiens
  misc_feature (24)..(24): n is a, c, g, or t
  misc_feature (38)..(38): n is a, c, g, or t
tgggttcccccggactggcagganttcgcggccgcgtncgacacggctgcgagaagacgacagaagggggctctaagctgcagcaagagaaactgtgtgtgaggggaagaggcctgtttcgctgtcgggtctctagttcttgcacgctctttaagagtctgcactggaggaactcctgccattaccagctcccttcttgcagaagggagggggaaacatacatttattcatgccagtctgttgcatgcaggctttttggcttcctaccttgcaacaaaataattgcaccaactccttagtgccgattccgcccacagagagtcctggagccacagtcttttttgctttgcattgtaggagagggactaagtgctagagactatgtcgctttcctgagctaccgagagcgctcgtgaactggaatcaactgcttcagggaaaaagaaaaaaaaaaaaaaaagacttgcctgggaggccgcgagaaacttgcattggaagcttcagcaaccagcattcgagaaactcctctctactttagcacggtctccagactcagccgagagacagcaaactgcagcgcggcggcggcggcgggagcagcaacgcggggggaggaggcggcggtgcgagtggcggcggcgccaactccaaaccggcgcagaaaaagagctgcggctccaaagtggcgggcggcgcgggcggtggggttagcaaaccgcacgccaagctcatcctggcaggcggcggcggcggcgggaaagcagcggctgccgccgccgcctccttcgccgccgaacaggcgggggccgccgccctgctgcccctgggcgccgccgccgaccaccactcgctgtacaaggcgcggactcccagcgcctcggcctccgcctcctcggcagcctcggcctccgcagcgctcgcggccccgggcaagcacctggcggagaagaaggtgaagcgcgtctacctgttcggcggcctgggcacgtcgtcgtcgcccgtgggcggcgtgggcgcgggagccgaccccagcgaccccctgggcctgtacgaggaggagggcgcgggctgctcgcccgacgcgcccagcctgagcggccgcagcagcgccgcctcgtcccccgccgccggccgctcgcccgccgaccaccgcggctacgccagcctgcgcgccgcctcgcccgccccgtccagcgcgccctcgcacgcgtcctcctcggcctcgtcccactcctcctcttcctcctcctcgggctcctcgtcctccgacgacgagttcgaagacgacctgctcgacctgaaccccagctcaaactttgagagcatgtccctgggcagcttcagttcgtcgtcggcgctcgaccgggacctggattttaacttcgagcccggctccggctcgcacttcgagttcccggactactgcacgcccgaggtgagcgagatgatctcgggagactggctcgagtccagcatctccaacctggttttcacctactgaagggcgcgcaggcagggagaagggccggggggggtaggagaggagaaaaaaaaagtgaaaaaaagaaacgaaaaggacagacgaagagtttaaagagaaaagggaaaaaagaaagaaaaagtaagcagggctggcttcgcccgcgttctcgtcgtcggatcaaggagcgcggcggcgttttggacccgcgctcccatcccccaccttcccgggccggggacccactctgcccagccggagggacgcggaggaggaagagggtagacaggggcgacctgtgattgttgttattgatgttgttgttgatggcaaaaaaaaaaaagcgacttcgagtttgctcccctttgcttgaagagaccccctcccccttccaacgagcttccggacttgtctgcacccccagcaagaaggcgagttagttttctagagacttgaaggagtctcccccttcctgcatcaccaccttggttttgttttattttgcttcttggtcaagaaaggaggggagaacccagcgcacccctccccccctttttttaaacgcgtgatgaagacagaaggctccggggtgacgaatttggccgatggcagatgttttgggggaacgccgggactgagagactccacgcaggcgaattcccgtttggggcttttttttcctccctcttttccccttgccccctctgcagccggaggaggagatgttgaggggaggaggccagccagtgtgaccggcgctaggaaatgacccgagaaccccgttggaagcgcagcagcgggagctaggggcgggggcggaggaggacacgaactggaagggggttcacggtcaaactgaaatggatttgcacgttggggagctggcggcggcggctgctgggcctccgccttcttttctacgtgaaatcagtgaggtgagacttcccagaccccggaggcgtggaggagaggagactgtttgatgtggtacaggggcagtcagtggagggcgagtggtttcggaaaaaaaaaaagaaaaaaagaaaaaaaaagaaaaaaaaaagatttttttcttctcttaatcggaatcgtgatggtgttggattatttcaatggtggggttaatatagcatgttatcctgtctatcttttaaagatttctgtataagactgttgagcagtttttaaaatagtgtaggataatataaaaagcagatagatggcgctatgtttgattcctacaacgaaattatcaccagctttttttcattcttaactctttaaaggattcaaacgcaactcaaatctgtgctggactttaaaaaaacaattcaggaccaaattttttctcagtgtgtgtgtttattccttataggtgtaaatgagaagacgtgtttttttccttcaccgatgctccatcctcgtatttctttttccttgtaaatgtaatcagatgccattttatatgtggacgtatttatactggccaaacatattttttcttttgtccctttttttctttcctttctttttacttcctttatttctttattccttccttttcctttttttctttttttttctttttttttttttttttgggtagttgttgttacccacgccattttacgtctccttcactgaagggctagagttttaacttttaattttttatatttaaatgtagacttttgacacttttaaaaaacaaaaaaagacaagagagatgaaaacgtttgattattttctcagtgtatttttgtaaaaaatatataaagggggtgttaatcggtgtaaatcgctgtttggatttcctgattttataacagggcggctggttaatatctcacacagtttaaaaaatcagcccctaatttctccatgtttacacttcaatctgcaggcttcttaaagtgacagtatcccttaacctgccaccagtgtccaccctccggcccccgtcttgtaaaaaggggaggagaattagccaaacactgtaagcttttaagaaaaacaaagttttaaacgaaatactgctctgtccagaggctttaaaactggtgcaattacagcaaaaagggattctgtagctttaacttgtaaaccacatcttttttgcactttttttataagcaaaaacgtgccgtttaaaccactggatctatctaaatgccgatttgagttcgcgacactatgtactgcgtttttcattcttgtatttgactatttaatcctttctacttgtcgctaaatataattgttttagtcttatggcatgatgatagcatatgtgttcaggtttatagctgttgtgtttaaaaattgaaaaaagtggaaaacatctttgtacatttaagtctgtattataataagcaaaaagattgtgtgtatgtatgtttaatataacatgacaggcactaggacgtctgcctttttaaggcagttccgttaagggtttttgtttttaaacttttttttgccatccatcctgtgcaatatgccgtgtagaatatttgtcttaaaattcaaggccacaaaaacaatgtttgggggaaaaaaaagaaaaaatcatgccagctaatcatgtcaagttcactgcctgtcagattgttgatatataccttctgtaaataactttttttgagaaggaaataaaatcagctggaactgaacccta

SEQ ID NO: 297512 - DNA, 3147 bp, Homo sapiens
  misc_feature (24)..(24): n is a, c, g, or t
  misc_feature (38)..(38): n is a, c, g, or t
tgggttcccccggactggcagganttcgcggccgcgtncgacacggctgcgagaagacgacagaagggggctctaagctgcagcaagagaaactgtgtgtgaggggaagaggcctgtttcgctgtcgggtctctagttcttgcacgctctttaagagtctgcactggaggaactcctgccattaccagctcccttcttgcagaagggagggggaaacatacatttattcatgccagtctgttgcatgcaggctttttggcttcctaccttgcaacaaaataattgcaccaactccttagtgccgattccgcccacagagagtcctggagccacagtcttttttgctttgcattgtaggagagggactaagtgctagagactatgtcgctttcctgagctaccgagagcgctcgtgaactggaatcaactgcttcagggaaaaagaaaaaaaaaaaaaaaagacttgcctgggaggccgcgagaaacttgcattggaagcttcagcaaccagcattcgagaaactcctctctactttagcacggtctccagactcagccgagagacagcaaactgcagcgcggtgagagagcgagagagagggagagagagactctccagcctgggaactataactcctctgcgagaggcggagaactccttccccaaatcttttggggacttttctctctttacccacctccgcccctgcgaggagttgaggggccagttcggccgccgcgcgcgtcttcccgttcggcgtgtgcttggcccggggaaccgggagggcccggcgatcgcgcggcggccgccgcgagggtgtgagcgcgcgtgggcgcccgccgagccgaggccatggtgcagcaaaccaacaatgccgagaacacggaagcgctgctggccggcgagagctcggactcgggcgccggcctcgagctgggaatcgcctcctcccccacgcccggctccaccgcctccacgggcggcaaggccgacgacccgagctggtgcaagaccccgagtgggcacatcaagcgacccatgaacgccttcatggtgtggtcgcagatcgagcggcgcaagatcatggagcagtcgcccgacatgcacaacgccgagatctccaagcggctgggcaaacgctggaagctgctcaaagacagcgacaagatccctttcattcgagaggcggagcggctgcgcctcaagcacatggctgactaccccgactacaagtaccggcccaggaagaaggtgaagtccggcaacgccaactccagctcctcggccgccgcctcctccaagccgggggagaagggagacaaggtcggtggcagtggcgggggcggccatgggggcggcggcggcggcgggagcagcaacgcggggggaggaggcggcggtgcgagtggcggcggcgccaactccaaaccggcgcagaaaaagagctgcggctccaaagtggcgggcggcgcgggcggtggggttagcaaaccgcacgccaagctcatcctggcaggcggcggcggcggcgggaaagcagcggctgccgccgccgcctccttcgccgccgaacaggcgggggccgccgccctgctgcccctgggcgccgccgccgaccaccactcgctgtacaaggcgcggactcccagcgcctcggcctccgcctcctcggcagcctcggcctccgcagcgctcgcggccccgggcaagcacctggcggagaagaaggtgaagcgcgtctacctgttcggcggcctgggcacgtcgtcgtcgcccgtgggcggcgtgggcgcgggagccgaccccagcgaccccctgggcctgtacgaggaggagggcgcgggctgctcgcccgacgcgcccagcctgagcggccgcagcagcgccgcctcgtcccccgccgccggccgctcgcccgccgaccaccgcggctacgccagcctgcgcgccgcctcgcccgccccgtccagcgcgccctcgcacgcgtcctcctcggcctcgtcccactcctcctcttcctcctcctcgggctcctcgtcctccgacgacgagttcgaagacgacctgctcgacctgaaccccagctcaaactttgagagcatgtccctgggcagcttcagttcgtcgtcggcgctcgaccgggacctggattttaacttcgagcccggctccggctcgcacttcgagttcccggactactgcacgcccgaggtgagcgagatgatctcgggagactggctcgagtccagcatctccaacctggttttcacctactgaagggcgcgcaggcagggagaagggccggggggggtaggagaggagaaaaaaaaagtgaaaaaaagaaacgaaaaggacagacgaagagtttaaagagaaaagggaaaaaagaaagaaaaagtaagcagggctggcttcgcccgcgttctcgtcgtcggatcaaggagcgcggcggcgttttggacccgcgctcccatcccccaccttcccgggccggggacccactctgcccagccggagggacgcggaggaggaagagggtagacaggggcgacctgtgattgttgttattgatgttgttgttgatggcaaaaaaaaaaaagcgacttcgagtttgctcccctttgcttgaagagaccccctcccccttccaacgagcttccggacttgtctgcacccccagcaagaaggcgagttagttttctagagacttgaaggagtctcccccttcctgcatcaccacagtcttttttgctttgcattgtaggagagggactaagtgctagagactatgtcgctttcctgagctaccgagagcgctcgtgaactggaatcaactgcttcagggaaaaagaaaaaaaaaaaaaaaagacttgcctgggaggccgcgagaaacttgcattggaagcttcagcaaccagcattcgagaaactcctctctactttagcacggcctccgcagcgctcgcggccccgggcaagcacctggcggagaagaaggtgaagcgcgtctacctgttcggcggcctgggcacgtcgtcgtcgcccgtgggcggcgtgggcgcgggagccgaccccagcgaccccctgggcctgtacgaggaggagggcgcgggctgctcgcccgacgcgcccagcctgagcggccg

SEQ ID NO: 297513 - DNA, 4891 bp, Homo sapiens
  misc_feature (24)..(24): n is a, c, g, or t
  misc_feature (38)..(38): n is a, c, g, or t
tgggttcccccggactggcagganttcgcggccgcgtncgacacggctgcgagaagacgacagaagggggctctaagctgcagcaagagaaactgtgtgtgaggggaagaggcctgtttcgctgtcgggtctctagttcttgcacgctctttaagagtctgcactggaggaactcctgccattaccagctcccttcttgcagaagggagggggaaacatacatttattcatgccagtctgttgcatgcaggctttttggcttcctaccttgcaacaaaataattgcaccaactccttagtgccgattccgcccacagagagtcctggagccacagtcttttttgctttgcattgtaggagagggactaagtgctagagactatgtcgctttcctgagctaccgagagcgctcgtgaactggaatcaactgcttcagggaaaaagaaaaaaaaaaaaaaaagacttgcctgggaggccgcgagaaacttgcattggaagcttcagcaaccagcattcgagaaactcctctctactttagcacggtctccagactcagccgagagacagcaaactgcagcgcggtgagagagcgagagagagggagagagagactctccagcctgggaactataactcctctgcgagaggcggagaactccttccccaaatcttttggggacttttctctctttacccacctccgcccctgcgaggagttgaggggccagttcggccgccgcgcgcgtcttcccgttcggcgtgtgcttggcccggggaaccgggagggcccggcgatcgcgcggcggccgccgcgagggtgtgagcgcgcgtgggcgcccgccgagccgaggccatggtgcagcaaaccaacaatgccgagaacacggaagcgctgctggccggcgagagctcggactcgggcgccggcctcgagctgggaatcgcctcctcccccacgcccggctccaccgcctccacgggcggcaaggccgacgacccgagctggtgcaagaccccgagtgggcacatcaagcgacccatgaacgccttcatggtgtggtcgcagatcgagcggcgcaagatcatggagcagtcgcccgacatgcacaacgccgagatctccaagcggctgggcaaacgctggaagctgctcaaagacagcgacaagatccctttcattcgagaggcggagcggctgcgcctcaagcacatggctgactaccccgactacaagtaccggcccaggaagaaggtgaagtccggcaacgccaactccagctcctcggccgccgcctcctccaagccgggggagaagggagacaaggtcggtggcagtggcgggggcggccatgggggcggcggcggcggcgggagcagcaacgcggggggaggaggcggcggtgcgagtggcggcggcgccaactccaaaccggcgcagaaaaagagctgcggctccaaagtggcgggcggcgcgggcggtggggttagcaaaccgcacgccaagctcatcctggcaggcggcggcggcggcgggaaagcagcggctgccgccgccgcctccttcgccgccgaacaggcgggggccgccgccctgctgcccctgggcgccgccgccgaccaccactcgctgtacaaggcgcggactcccagcgcctcggcctccgcctcctcggcagcctcggcctccgcagcgctcgcggccccgggcaagcacctggcggagaagaaggtgaagcgcgtctacctgttcggcggcctgggcacgtcgtcgtcgcccgtgggcggcgtgggcgcgggagccgaccccagcgaccccctgggcctgtacgaggaggagggcgcgggctgctcgcccgacgcgcccagcctgagcggccgcagcagcgccgcctcgtcccccgccgccggccgctcgcccgccgaccaccgcggctacgccagcctgcgcgccgcctctcgtcccactcctcctcttcctcctcctcgggctcctcgtcctccgacgacgagttcgaagacgacctgctcgacctgaaccccagctcaaactttgagagcatgtccctgggcagcttcagttcgtcgtcggcgctcgaccgggacctggattttaacttcgagcccggctccggctcgcacttcgagttcccggactactgcacgcccgaggtgagcgagatgatctcgggagactggctcgagtccagcatctccaacctggttttcacctactgaagggcgcgcaggcagggagaagggccggggggggtaggagaggagaaaaaaaaagtgaaaaaaagaaacgaaaaggacagacgaagagtttaaagagaaaagggaaaaaagaaagaaaaagtaagcagggctggcttcgcccgcgttctcgtcgtcggatcaaggagcgcggcggcgttttggacccgcgctcccatcccccaccttcccgggccggggacccactctgcccagccggagggacgcggaggaggaagagggtagacaggggcgacctgtgattgttgttattgatgttgttgttgatggcaaaaaaaaaaaagcgacttcgagtttgctcccctttgcttgaagagaccccctcccccttccaacgagcttccggacttgtctgcacccccagcaagaaggcgagttagttttctagagacttgaaggagtctcccccttcctgcatcaccaccttggttttgttttattttgcttcttggtcaagaaaggaggggagaacccagcgcacccctccccccctttttttaaacgcgtgatgaagacagaaggctccggggtgacgaatttggccgatggcagatgttttgggggaacgccgggactgagagactccacgcaggcgaattcccgtttggggcttttttttcctccctcttttccccttgccccctctgcagccggaggaggagatgttgaggggaggaggccagccagtgtgaccggcgctaggaaatgacccgagaaccccgttggaagcgcagcagcgggagctaggggcgggggcggaggaggacacgaactggaagggggttcacggtcaaactgaaatggatttgcacgttggggagctggcggcggcggctgctgggcctccgccttcttttctacgtgaaatcagtgaggtgagacttcccagaccccggaggcgtggaggagaggagactgtttgatgtggtacaggggcagtcagtggagggcgagtggtttcggaaaaaaaaaaagaaaaaaagaaaaaaaaagaaaaaaaaaagatttttttcttctcttaatcggaatcgtgatggtgttggattatttcaatggtggggttaatatagcatgttatcctgtctatcttttaaagatttctgtataagactgttgagcagtttttaaaatagtgtaggataatataaaaagcagatagatggcgctatgtttgattcctacaacgaaattatcaccagctttttttcattcttaactctttaaaggattcaaacgcaactcaaatctgtgctggactttaaaaaaacaattcaggaccaaattttttctcagtgtgtgtgtttattccttataggtgtaaatgagaagacgtgtttttttccttcaccgatgctccatcctcgtatttctttttccttgtaaatgtaatcagatgccattttatatgtggacgtatttatactggccaaacatattttttcttttgtccctttttttctttcctttctttttacttcctttatttctttattccttccttttcctttttttctttttttttctttttttttttttttttgggtagttgttgttacccacgccattttacgtctccttcactgaagggctagagttttaacttttaattttttatatttaaatgtagacttttgacacttttaaaaaacaaaaaaagacaagagagatgaaaacgtttgattattttctcagtgtatttttgtaaaaaatatataaagggggtgttaatcggtgtaaatcgctgtttggatttcctgattttataacagggcggctggttaatatctcacacagtttaaaaaatcagcccctaatttctccatgtttacacttcaatctgcaggcttcttaaagtgacagtatcccttaacctgccaccagtgtccaccctccggcccccgtcttgtaaaaaggggaggagaattagccaaacactgtaagcttttaagaaaaacaaagttttaaacgaaatactgctctgtccagaggctttaaaactggtgcaattacagcaaaaagggattctgtagctttaacttgtaaaccacatcttttttgcactttttttataagcaaaaacgtgccgtttaaaccactggatctatctaaatgccgatttgagttcgcgacactatgtactgcgtttttcattcttgtatttgactatttaatcctttctacttgtcgctaaatataattgttttagtcttatggcatgatgatagcatatgtgttcaggtttatagctgttgtgtttaaaaattgaaaaaagtggaaaacatctttgtacatttaagtctgtattataataagcaaaaagattgtgtgtatgtatgtttaatataacatgacaggcactaggacgtctgcctttttaaggcagttccgttaagggtttttgtttttaaacttttttttgccatccatcctgtgcaatatgccgtgtagaatatttgtcttaaaattcaaggccacaaaaacaatgtttgggggaaaaaaaagaaaaaatcatgccagctaatcatgtcaagttcactgcctgtcagattgttgatatataccttctgtaaataactttttttgagaaggaaataaaatcagctggaactgaacccta

SEQ ID NO: 297514 - DNA, 4180 bp, Homo sapiens
  misc_feature (24)..(24): n is a, c, g, or t
  misc_feature (38)..(38): n is a, c, g, or t
tgggttcccccggactggcagganttcgcggccgcgtncgacacggctgcgagaagacgacagaagggggctctaagctgcagcaagagaaactgtgtgtgaggggaagaggcctgtttcgctgtcgggtctctagttcttgcacgctctttaagagtctgcactggaggaactcctgccattaccagctcccttcttgcagaagggagggggaaacatacatttattcatgccagtctgttgcatgcaggctttttggcttcctaccttgcaacaaaataattgcaccaactccttagtgccgattccgcccacagagagtcctggagccacagtcttttttgctttgcattgtaggagagggactaagtgctagagactatgtcgctttcctgagctaccgagagcgctcgtgaactggaatcaactgcttcagggaaaaagaaaaaaaaaaaaaaaagacttgcctgggaggccgcgagaaacttgcattggaagcttcagcaaccagcattcgagaaactcctctctactttagcacggtctccagactcagccgagagacagcaaactgcagcgcggtgagagagcgagagagagggagagagagactctccagcctgggaactataactcctctgcgagaggcggagaactccttccccaaatcttttggggacttttctctctttacccacctccgcccctgcgaggagttgaggggccagttcggccgccgcgcgcgtcttcccgttcggcgtgtgcttggcccggggaaccgggagggcccggcgatcgcgcggcggccgccgcgagggtgtgagcgcgcgtgggcgcccgccgagccgaggccatggtgcagcaaaccaacaatgccgagaacacggaagcgctgctggccggcgagagctcggactcgggcgccggcctcgagctgggaatcgcctcctcccccacgcccggctccaccgcctccacgggcggcaaggccgacgacccgagctggtgcaagaccccgagtgggcacatcaagcgacccatgaacgccttcatggtgtggtcgcagatcgagcggcgcaagatcatggagcagtcgcccgacatgcacaacgccgagatctccaagcggctgggcaaacgctggaagctgctcaaagacagcgacaagatccctttcattcgagaggcggagcggctgcgccgcccgccccgtccagcgcgccctcgcacgcgtcctcctcggcctcgtcccactcctcctcttcctcctcctcgggctcctcgtcctccgacgacgagttcgaagacgacctgctcgacctgaaccccagctcaaactttgagagcatgtccctgggcagcttcagttcgtcgtcggcgctcgaccgggacctggattttaacttcgagcccggctccggctcgcacttcgagttcccggactactgcacgcccgaggtgagcgagatgatctcgggagactggctcgagtccagcatctccaacctggttttcacctactgaagggcgcgcaggcagggagaagggccggggggggtaggagaggagaaaaaaaaagtgaaaaaaagaaacgaaaaggacagacgaagagtttaaagagaaaagggaaaaaagaaagaaaaagtaagcagggctggcttcgcccgcgttctcgtcgtcggatcaaggagcgcggcggcgttttggacccgcgctcccatcccccaccttcccgggccggggacccactctgcccagccggagggacgcggaggaggaagagggtagacaggggcgacctgtgattgttgttattgatgttgttgttgatggcaaaaaaaaaaaagcgacttcgagtttgctcccctttgcttgaagagaccccctcccccttccaacgagcttccggacttgtctgcacccccagcaagaaggcgagttagttttctagagacttgaaggagtctcccccttcctgcatcaccaccttggttttgttttattttgcttcttggtcaagaaaggaggggagaacccagcgcacccctccccccctttttttaaacgcgtgatgaagacagaaggctccggggtgacgaatttggccgatggcagatgttttgggggaacgccgggactgagagactccacgcaggcgaattcccgtttggggcttttttttcctccctcttttccccttgccccctctgcagccggaggaggagatgttgaggggaggaggccagccagtgtgaccggcgctaggaaatgacccgagaaccccgttggaagcgcagcagcgggagctaggggcgggggcggaggaggacacgaactggaagggggttcacggtcaaactgaaatggatttgcacgttggggagctggcggcggcggctgctgggcctccgccttcttttctacgtgaaatcagtgaggtgagacttcccagaccccggaggcgtggaggagaggagactgtttgatgtggtacaggggcagtcagtggagggcgagtggtttcggaaaaaaaaaaagaaaaaaagaaaaaaaaagaaaaaaaaaagatttttttcttctcttaatcggaatcgtgatggtgttggattatttcaatggtggggttaatatagcatgttatcctgtctatcttttaaagatttctgtataagactgttgagcagtttttaaaatagtgtaggataatataaaaagcagatagatggcgctatgtttgattcctacaacgaaattatcaccagctttttttcattcttaactctttaaaggattcaaacgcaactcaaatctgtgctggactttaaaaaaacaattcaggaccaaattttttctcagtgtgtgtgtttattccttataggtgtaaatgagaagacgtgtttttttccttcaccgatgctccatcctcgtatttctttttccttgtaaatgtaatcagatgccattttatatgtggacgtatttatactggccaaacatattttttcttttgtccctttttttctttcctttctttttacttcctttatttctttattccttccttttcctttttttctttttttttctttttttttttttttttgggtagttgttgttacccacgccattttacgtctccttcactgaagggctagagttttaacttttaattttttatatttaaatgtagacttttgacacttttaaaaaacaaaaaaagacaagagagatgaaaacgtttgattattttctcagtgtatttttgtaaaaaatatataaagggggtgttaatcggtgtaaatcgctgtttggatttcctgattttataacagggcggctggttaatatctcacacagtttaaaaaatcagcccctaatttctccatgtttacacttcaatctgcaggcttcttaaagtgacagtatcccttaacctgccaccagtgtccaccctccggcccccgtcttgtaaaaaggggaggagaattagccaaacactgtaagcttttaagaaaaacaaagttttaaacgaaatactgctctgtccagaggctttaaaactggtgcaattacagcaaaaagggattctgtagctttaacttgtaaaccacatcttttttgcactttttttataagcaaaaacgtgccgtttaaaccactggatctatctaaatgccgatttgagttcgcgacactatgtactgcgtttttcattcttgtatttgactatttaatcctttctacttgtcgctaaatataattgttttagtcttatggcatgatgatagcatatgtgttcaggtttatagctgttgtgtttaaaaattgaaaaaagtggaaaacatctttgtacatttaagtctgtattataataagcaaaaagattgtgtgtatgtatgtttaatataacatgacaggcactaggacgtctgcctttttaaggcagttccgttaagggtttttgtttttaaacttttttttgccatccatcctgtgcaatatgccgtgtagaatatttgtcttaaaattcaaggccacaaaaacaatgtttgggggaaaaaaaagaaaaaatcatgccagctaatcatgtcaagttcactgcctgtcagattgttgatatataccttctgtaaataactttttttgagaaggaaataaaatcagctggaactgaacccta

SEQ ID NO: 297515 - DNA, 4090 bp, Homo sapiens
  misc_feature (24)..(24): n is a, c, g, or t
  misc_feature (38)..(38): n is a, c, g, or t
tgggttcccccggactggcagganttcgcggccgcgtncgacacggctgcgagaagacgacagaagggggctctaagctgcagcaagagaaactgtgtgtgaggggaagaggcctgtttcgctgtcgggtctctagttcttgcacgctctttaagagtctgcactggaggaactcctgccattaccagctcccttcttgcagaagggagggggaaacatacatttattcatgccagtctgttgcatgcaggctttttggcttcctaccttgcaacaaaataattgcaccaactccttagtgccgattccgcccacagagagtcctggagccacagtcttttttgctttgcattgtaggagagggactaagtgctagagactatgtcgctttcctgagctaccgagagcgctcgtgaactggaatcaactgcttcagggaaaaagaaaaaaaaaaaaaaaagacttgcctgggaggccgcgagaaacttgcattggaagcttcagcaaccagcattcgagaaactcctctctactttagcacggtctccagactcagccgagagacagcaaactgcagcgcggtgagagagcgagagagagggagagagagactctccagcctgggaactataactcctctgcgagaggcggagaactccttccccaaatcttttggggacttttctctctttacccacctccgcccctgcgaggagttgaggggccagttcggccgccgcgcgcgtcttcccgttcggcgtgtgcttggcccggggaaccgggagggcccggcgatcgcgcggcggccgccgcgagggtgtgagcgcgcgtgggcgcccgccgagccgaggccatggtgcagcaaaccaacaatgccgagaacacggaagcgctgctggccggcgagagctcggactcgggcgccggcctcgagctgggaatcgcctcctcccccacgcccggctccaccgcctccacgggcggcaaggccgacgacccgagctggtgcaagaccccgagtgggcacatcaagcgacccatgaacgccttcatggtgtggtcgcagatcgagcggcgcaagatcatggagcagtcgcccgacatgcacaaccgcccgccccgtccagcgcgccctcgcacgcgtcctcctcggcctcgtcccactcctcctcttcctcctcctcgggctcctcgtcctccgacgacgagttcgaagacgacctgctcgacctgaaccccagctcaaactttgagagcatgtccctgggcagcttcagttcgtcgtcggcgctcgaccgggacctggattttaacttcgagcccggctccggctcgcacttcgagttcccggactactgcacgcccgaggtgagcgagatgatctcgggagactggctcgagtccagcatctccaacctggttttcacctactgaagggcgcgcaggcagggagaagggccggggggggtaggagaggagaaaaaaaaagtgaaaaaaagaaacgaaaaggacagacgaagagtttaaagagaaaagggaaaaaagaaagaaaaagtaagcagggctggcttcgcccgcgttctcgtcgtcggatcaaggagcgcggcggcgttttggacccgcgctcccatcccccaccttcccgggccggggacccactctgcccagccggagggacgcggaggaggaagagggtagacaggggcgacctgtgattgttgttattgatgttgttgttgatggcaaaaaaaaaaaagcgacttcgagtttgctcccctttgcttgaagagaccccctcccccttccaacgagcttccggacttgtctgcacccccagcaagaaggcgagttagttttctagagacttgaaggagtctcccccttcctgcatcaccaccttggttttgttttattttgcttcttggtcaagaaaggaggggagaacccagcgcacccctccccccctttttttaaacgcgtgatgaagacagaaggctccggggtgacgaatttggccgatggcagatgttttgggggaacgccgggactgagagactccacgcaggcgaattcccgtttggggcttttttttcctccctcttttccccttgccccctctgcagccggaggaggagatgttgaggggaggaggccagccagtgtgaccggcgctaggaaatgacccgagaaccccgttggaagcgcagcagcgggagctaggggcgggggcggaggaggacacgaactggaagggggttcacggtcaaactgaaatggatttgcacgttggggagctggcggcggcggctgctgggcctccgccttcttttctacgtgaaatcagtgaggtgagacttcccagaccccggaggcgtggaggagaggagactgtttgatgtggtacaggggcagtcagtggagggcgagtggtttcggaaaaaaaaaaagaaaaaaagaaaaaaaaagaaaaaaaaaagatttttttcttctcttaatcggaatcgtgatggtgttggattatttcaatggtggggttaatatagcatgttatcctgtctatcttttaaagatttctgtataagactgttgagcagtttttaaaatagtgtaggataatataaaaagcagatagatggcgctatgtttgattcctacaacgaaattatcaccagctttttttcattcttaactctttaaaggattcaaacgcaactcaaatctgtgctggactttaaaaaaacaattcaggaccaaattttttctcagtgtgtgtgtttattccttataggtgtaaatgagaagacgtgtttttttccttcaccgatgctccatcctcgtatttctttttccttgtaaatgtaatcagatgccattttatatgtggacgtatttatactggccaaacatattttttcttttgtccctttttttctttcctttctttttacttcctttatttctttattccttccttttcctttttttctttttttttctttttttttttttttttgggtagttgttgttacccacgccattttacgtctccttcactgaagggctagagttttaacttttaattttttatatttaaatgtagacttttgacacttttaaaaaacaaaaaaagacaagagagatgaaaacgtttgattattttctcagtgtatttttgtaaaaaatatataaagggggtgttaatcggtgtaaatcgctgtttggatttcctgattttataacagggcggctggttaatatctcacacagtttaaaaaatcagcccctaatttctccatgtttacacttcaatctgcaggcttcttaaagtgacagtatcccttaacctgccaccagtgtccaccctccggcccccgtcttgtaaaaaggggaggagaattagccaaacactgtaagcttttaagaaaaacaaagttttaaacgaaatactgctctgtccagaggctttaaaactggtgcaattacagcaaaaagggattctgtagctttaacttgtaaaccacatcttttttgcactttttttataagcaaaaacgtgccgtttaaaccactggatctatctaaatgccgatttgagttcgcgacactatgtactgcgtttttcattcttgtatttgactatttaatcctttctacttgtcgctaaatataattgttttagtcttatggcatgatgatagcatatgtgttcaggtttatagctgttgtgtttaaaaattgaaaaaagtggaaaacatctttgtacatttaagtctgtattataataagcaaaaagattgtgtgtatgtatgtttaatataacatgacaggcactaggacgtctgcctttttaaggcagttccgttaagggtttttgtttttaaacttttttttgccatccatcctgtgcaatatgccgtgtagaatatttgtcttaaaattcaaggccacaaaaacaatgtttgggggaaaaaaaagaaaaaatcatgccagctaatcatgtcaagttcactgcctgtcagattgttgatatataccttctgtaaataactttttttgagaaggaaataaaatcagctggaactgaacccta

SEQ ID NO: 297516 - DNA, 4769 bp, Homo sapiens
  misc_feature (24)..(24): n is a, c, g, or t
  misc_feature (38)..(38): n is a, c, g, or t
tgggttcccccggactggcagganttcgcggccgcgtncgacacggctgcgagaagacgacagaagggggctctaagctgcagcaagagaaactgtgtgtgaggggaagaggcctgtttcgctgtcgggtctctagttcttgcacgctctttaagagtctgcactggaggaactcctgccattaccagctcccttcttgcagaagggagggggaaacatacatttattcatgccagtctgttgcatgcaggctttttggcttcctaccttgcaacaaaataattgcaccaactccttagtgccgattccgcccacagagagtcctggagccacagtcttttttgctttgcattgtaggagagggactaagtgctagagactatgtcgctttcctgagctaccgagagcgctcgtgaactggaatcaactgcttcagggaaaaagaaaaaaaaaaaaaaaagacttgcctgggaggccgcgagaaacttgcattggaagcttcagcaaccagcattcgagaaactcctctctactttagcacggtctccagactcagccgagagacagcaaactgcagcgcggtgagagagcgagagagagggagagagagactctccagcctgggaactataactcctctgcgagaggcggagaactccttccccaaatcttttggggacttttctctctttacccacctccgcccctgcgaggagttgaggggccagttcggccgccgcgcgcgtcttcccgttcggcgtgtgcttggcccggggaaccgggagggcccggcgatcgcgcggcggccgccgcgagggtgtgagcgcgcgtgggcgcccgccgagccgaggccatggtgcagcaaaccaacaatgccgagaacacggaagcgctgctggccggcgagagctcggactcgggcgccggcctcgagctgggaatcgcctcctcccccacgcccggctccaccgcctccacgggcggcaaggccgacgacccgagctggtgcaagaccccgagtgggcacatcaagcgacccatgaacgccttcatggtgtggtcgcagatcgagcggcgcaagatcatggagcagtcgcccgacatgcacaacgccgagatctccaagcggctgggcaaacgctggaagctgctcaaagacagcgacaagatccctttcattcgagaggcggagcggctgcgcctcaagcacatggctgactaccccgactacaagtaccggcccaggaagaaggtgaagtccggcaacgccaactccagctcctcggccgccgcctcctccaagccgggggagaagggagacaaggtcggtggcagtggcgggggcggccatgggggcggcggcggcggcgggagcagcaacgcggggggaggaggcggcggtgcgagtggcggcggcgccaactccaaaccggcgcagaaaaagagctgcggctccaaagtggcgggcggcgcgggcggtggggttagcaaaccgcacgccaagctcatcctggcaggcggcggcggcggcgggaaagcagcggctgccgccgccgcctccttcgccgccgaacaggcgggggccgccgccctgctgcccctgggcgccgccgccgaccaccactcgctgtacaaggcgcggactcccagcgcctcggcctccgcctcctcggcagcctcggcctccgcagcgctcgcggccccgggcaagcacctggcggagaagaaggtgaagcgcgtctacctgttcggcggcctgggcacgtcgtcgtcgcccgtgggcggcgtgggcgcgggagccgaccccagcgaccccctgggcctgtacgaggaggagggcgcgggctgctcgcccgacgcgcccagcctgagcggccgcagcagcgccgcctcgtcccccgccgccggccgctcgcccgccgaccaccgcggctacgccagcctgcgcgccgcctcgcccgccccgtccagcgcgccctcgcacgcgtcctcctcggcctcgtcccactcctcctcttcctcctccccggactactgcacgcccgaggtgagcgagatgatctcgggagactggctcgagtccagcatctccaacctggttttcacctactgaagggcgcgcaggcagggagaagggccggggggggtaggagaggagaaaaaaaaagtgaaaaaaagaaacgaaaaggacagacgaagagtttaaagagaaaagggaaaaaagaaagaaaaagtaagcagggctggcttcgcccgcgttctcgtcgtcggatcaaggagcgcggcggcgttttggacccgcgctcccatcccccaccttcccgggccggggacccactctgcccagccggagggacgcggaggaggaagagggtagacaggggcgacctgtgattgttgttattgatgttgttgttgatggcaaaaaaaaaaaagcgacttcgagtttgctcccctttgcttgaagagaccccctcccccttccaacgagcttccggacttgtctgcacccccagcaagaaggcgagttagttttctagagacttgaaggagtctcccccttcctgcatcaccaccttggttttgttttattttgcttcttggtcaagaaaggaggggagaacccagcgcacccctccccccctttttttaaacgcgtgatgaagacagaaggctccggggtgacgaatttggccgatggcagatgttttgggggaacgccgggactgagagactccacgcaggcgaattcccgtttggggcttttttttcctccctcttttccccttgccccctctgcagccggaggaggagatgttgaggggaggaggccagccagtgtgaccggcgctaggaaatgacccgagaaccccgttggaagcgcagcagcgggagctaggggcgggggcggaggaggacacgaactggaagggggttcacggtcaaactgaaatggatttgcacgttggggagctggcggcggcggctgctgggcctccgccttcttttctacgtgaaatcagtgaggtgagacttcccagaccccggaggcgtggaggagaggagactgtttgatgtggtacaggggcagtcagtggagggcgagtggtttcggaaaaaaaaaaagaaaaaaagaaaaaaaaagaaaaaaaaaagatttttttcttctcttaatcggaatcgtgatggtgttggattatttcaatggtggggttaatatagcatgttatcctgtctatcttttaaagatttctgtataagactgttgagcagtttttaaaatagtgtaggataatataaaaagcagatagatggcgctatgtttgattcctacaacgaaattatcaccagctttttttcattcttaactctttaaaggattcaaacgcaactcaaatctgtgctggactttaaaaaaacaattcaggaccaaattttttctcagtgtgtgtgtttattccttataggtgtaaatgagaagacgtgtttttttccttcaccgatgctccatcctcgtatttctttttccttgtaaatgtaatcagatgccattttatatgtggacgtatttatactggccaaacatattttttcttttgtccctttttttctttcctttctttttacttcctttatttctttattccttccttttcctttttttctttttttttctttttttttttttttttgggtagttgttgttacccacgccattttacgtctccttcactgaagggctagagttttaacttttaattttttatatttaaatgtagacttttgacacttttaaaaaacaaaaaaagacaagagagatgaaaacgtttgattattttctcagtgtatttttgtaaaaaatatataaagggggtgttaatcggtgtaaatcgctgtttggatttcctgattttataacagggcggctggttaatatctcacacagtttaaaaaatcagcccctaatttctccatgtttacacttcaatctgcaggcttcttaaagtgacagtatcccttaacctgccaccagtgtccaccctccggcccccgtcttgtaaaaaggggaggagaattagccaaacactgtaagcttttaagaaaaacaaagttttaaacgaaatactgctctgtccagaggctttaaaactggtgcaattacagcaaaaagggattctgtagctttaacttgtaaaccacatcttttttgcactttttttataagcaaaaacgtgccgtttaaaccactggatctatctaaatgccgatttgagttcgcgacactatgtactgcgtttttcattcttgtatttgactatttaatcctttctacttgtcgctaaatataattgttttagtcttatggcatgatgatagcatatgtgttcaggtttatagctgttgtgtttaaaaattgaaaaaagtggaaaacatctttgtacatttaagtctgtattataataagcaaaaagattgtgtgtatgtatgtttaatataacatgacaggcactaggacgtctgcctttttaaggcagttccgttaagggtttttgtttttaaacttttttttgccatccatcctgtgcaatatgccgtgtagaatatttgtcttaaaattcaaggccacaaaaacaatgtttgggggaaaaaaaagaaaaaatcatgccagctaatcatgtcaagttcactgcctgtcagattgttgatatataccttctgtaaataactttttttgagaaggaaataaaatcagctggaactgaacccta

SEQ ID NO: 297517 - DNA, 3947 bp, Homo sapiens
  misc_feature (24)..(24): n is a, c, g, or t
  misc_feature (38)..(38): n is a, c, g, or t
tgggttcccccggactggcagganttcgcggccgcgtncgacacggctgcgagaagacgacagaagggggctctaagctgcagcaagagaaactgtgtgtgaggggaagaggcctgtttcgctgtcgggtctctagttcttgcacgctctttaagagtctgcactggaggaactcctgccattaccagctcccttcttgcagaagggagggggaaacatacatttattcatgccagtctgttgcatgcaggctttttggcttcctaccttgcaacaaaataattgcaccaactccttagtgccgattccgcccacagagagtcctggagccacagtcttttttgctttgcattgtaggagagggactaagtgctagagactatgtcgctttcctgagctaccgagagcgctcgtgaactggaatcaactgcttcagggaaaaagaaaaaaaaaaaaaaaagacttgcctgggaggccgcgagaaacttgcattggaagcttcagcaaccagcattcgagaaactcctctctactttagcacggtctccagactcagccgagagacagcaaactgcagcgcggtgagagagcgagagagagggagagagagactctccagcctgggaactataactcctctgcgagaggcggagaactccttccccaaatcttttggggacttttctctctttacccacctccgcccctgcgaggagttgaggggccagttcggccgccgcgcgcgtcttcccgttcggcgtgtgcttggcccggggaaccgggagggcccggcgatcgcgcggcggccgccgcgagggtgtgagcgcgcgtgggcgcccgccgagccgaggccatggtgcagcaaaccaacaatgccgagaacacggaagcgctgctggccggcgagagctcggactcgggcgccggcctcgagctgggaatcgcctcctcccccacgcccggctccaccgcctccacgggcggcaaggccgacgacccgagctggtgcaagaccccgagtgggcacatcaagcgacccatgaacgccttcatggtgtggtcgcagatcgagcggcgcaagatcatggagcagtcgcccgacatgcacaacgccgagatctccaagcggctgggcaaacgctggaagctgctcaaagacagcgacaagatccctttcattcgagaggcggagcggctgcgcctcaagcacatggctgactaccccgactacaagtaccggcccaggaagaaggtgaagtccggcaacgccaactccagctcctcggccgccgcctcctccaagcagggagaagggccggggggggtaggagaggagaaaaaaaaagtgaaaaaaagaaacgaaaaggacagacgaagagtttaaagagaaaagggaaaaaagaaagaaaaagtaagcagggctggcttcgcccgcgttctcgtcgtcggatcaaggagcgcggcggcgttttggacccgcgctcccatcccccaccttcccgggccggggacccactctgcccagccggagggacgcggaggaggaagagggtagacaggggcgacctgtgattgttgttattgatgttgttgttgatggcaaaaaaaaaaaagcgacttcgagtttgctcccctttgcttgaagagaccccctcccccttccaacgagcttccggacttgtctgcacccccagcaagaaggcgagttagttttctagagacttgaaggagtctcccccttcctgcatcaccaccttggttttgttttattttgcttcttggtcaagaaaggaggggagaacccagcgcacccctccccccctttttttaaacgcgtgatgaagacagaaggctccggggtgacgaatttggccgatggcagatgttttgggggaacgccgggactgagagactccacgcaggcgaattcccgtttggggcttttttttcctccctcttttccccttgccccctctgcagccggaggaggagatgttgaggggaggaggccagccagtgtgaccggcgctaggaaatgacccgagaaccccgttggaagcgcagcagcgggagctaggggcgggggcggaggaggacacgaactggaagggggttcacggtcaaactgaaatggatttgcacgttggggagctggcggcggcggctgctgggcctccgccttcttttctacgtgaaatcagtgaggtgagacttcccagaccccggaggcgtggaggagaggagactgtttgatgtggtacaggggcagtcagtggagggcgagtggtttcggaaaaaaaaaaagaaaaaaagaaaaaaaaagaaaaaaaaaagatttttttcttctcttaatcggaatcgtgatggtgttggattatttcaatggtggggttaatatagcatgttatcctgtctatcttttaaagatttctgtataagactgttgagcagtttttaaaatagtgtaggataatataaaaagcagatagatggcgctatgtttgattcctacaacgaaattatcaccagctttttttcattcttaactctttaaaggattcaaacgcaactcaaatctgtgctggactttaaaaaaacaattcaggaccaaattttttctcagtgtgtgtgtttattccttataggtgtaaatgagaagacgtgtttttttccttcaccgatgctccatcctcgtatttctttttccttgtaaatgtaatcagatgccattttatatgtggacgtatttatactggccaaacatattttttcttttgtccctttttttctttcctttctttttacttcctttatttctttattccttccttttcctttttttctttttttttctttttttttttttttttgggtagttgttgttacccacgccattttacgtctccttcactgaagggctagagttttaacttttaattttttatatttaaatgtagacttttgacacttttaaaaaacaaaaaaagacaagagagatgaaaacgtttgattattttctcagtgtatttttgtaaaaaatatataaagggggtgttaatcggtgtaaatcgctgtttggatttcctgattttataacagggcggctggttaatatctcacacagtttaaaaaatcagcccctaatttctccatgtttacacttcaatctgcaggcttcttaaagtgacagtatcccttaacctgccaccagtgtccaccctccggcccccgtcttgtaaaaaggggaggagaattagccaaacactgtaagcttttaagaaaaacaaagttttaaacgaaatactgctctgtccagaggctttaaaactggtgcaattacagcaaaaagggattctgtagctttaacttgtaaaccacatcttttttgcactttttttataagcaaaaacgtgccgtttaaaccactggatctatctaaatgccgatttgagttcgcgacactatgtactgcgtttttcattcttgtatttgactatttaatcctttctacttgtcgctaaatataattgttttagtcttatggcatgatgatagcatatgtgttcaggtttatagctgttgtgtttaaaaattgaaaaaagtggaaaacatctttgtacatttaagtctgtattataataagcaaaaagattgtgtgtatgtatgtttaatataacatgacaggcactaggacgtctgcctttttaaggcagttccgttaagggtttttgtttttaaacttttttttgccatccatcctgtgcaatatgccgtgtagaatatttgtcttaaaattcaaggccacaaaaacaatgtttgggggaaaaaaaagaaaaaatcatgccagctaatcatgtcaagttcactgcctgtcagattgttgatatataccttctgtaaataactttttttgagaaggaaataaaatcagctggaactgaacccta

SEQ ID NO: 297518 - DNA, 2359 bp, Homo sapiens
  misc_feature (24)..(24): n is a, c, g, or t
  misc_feature (38)..(38): n is a, c, g, or t
  misc_feature (2329)..(2329): n is a, c, g, or t
tgggttcccccggactggcagganttcgcggccgcgtncgacacggctgcgagaagacgacagaagggggctctaagctgcagcaagagaaactgtgtgtgaggggaagaggcctgtttcgctgtcgggtctctagttcttgcacgctctttaagagtctgcactggaggaactcctgccattaccagctcccttcttgcagaagggagggggaaacatacatttattcatgccagtctgttgcatgcaggctttttggcttcctaccttgcaacaaaataattgcaccaactccttagtgccgattccgcccacagagagtcctggagccacagtcttttttgctttgcattgtaggagagggactaagtgctagagactatgtcgctttcctgagctaccgagagcgctcgtgaactggaatcaactgcttcagggaaaaagaaaaaaaaaaaaaaaagacttgcctgggaggccgcgagaaacttgcattggaagcttcagcaaccagcattcgagaaactcctctctactttagcacggtctccagactcagccgagagacagcaaactgcagcgcggtgagagagcgagagagagggagagagagactctccagcctgggaactataactcctctgcgagaggcggagaactccttccccaaatcttttggggacttttctctctttacccacctccgcccctgcgaggagttgaggggccagttcggccgccgcgcgcgtcttcccgttcggcgtgtgcttggcccggggaaccgggagggcccggcgatcgcgcggcggccgccgcgagggtgtgagcgcgcgtgggcgcccgccgagccgaggccatggtgcagcaaaccaacaatgccgagaacacggaagcgctgctggccggcgagagctcggactcgggcgccggcctcgagctgggaatcgcctcctcccccacgcccggctccaccgcctccacgggcggcaaggccgacgacccgagctggtgcaagaccccgagtgggcacatcaagcgacccatgaacgccttcatggtgtggtcgcagatcgagcggcgcaagatcatggagcagtcgcccgacatgcacaacgccgagatctccaagcggctgggcaaacgctggaagctgctcaaagacagcgacaagatccctttcattcgagaggcggagcggctgcgcctcaagcacatggctgactaccccgactacaagtaccggcccaggaagaaggtgaagtccggcaacgccaactccagctcctcggccgccgcctcctccaagccgggggagaagggagacaaggtcggtggcagtggcgggggcggccatgggggcggcggcggcggcgggagcagcaacgcggggggaggaggcggcggtgcgagtggcggcggcgccaactccaaaccggcgcagaaaaagagctgcggctccaaagtggcgggcggcgcgggcggtggggttagcaaaccgcacgccaagctcatcctggcaggcggcggcggcggcgggaaagcagcggctgccgccgccgcctccttcgccgccgaacaggcgggggccgccgccctgctgcccctgggcgccgccgccgaccaccactcgctgtacaaggcgcggactcccagcgcctcggcctccgcctcctcggcagcctcggcctccgcagcgctcgcggccccgggcaagcacctggcggagaagaaggtgaagcgcgtctacctgttcggcggcctgggcacgtcgtcgtcgcccgtgggcggcgtgggcgcgggagccgaccccagcgaccccctgggcctgtacgaggaggagggcgcgggctgctcgcccgacgcgcccagcctgagcggccgcagcagcgccgcctcgtcccccgccgccggccgctcgcccgccgaccaccgcggctacgccagcctgcgcgccgcctcgcccgccccgtccagcgcgccctcgcacgcgtcctcctcggcctcgtcccactcctcctcttcctcctcctcgggctcctcgtcctccgacgacgagttcgaagacgacctgctcgacctgaaccccagctcaaactttgagagcatgtccctgggcagcttcagttcgtcgtcggcgctcgaccgggacctggattttaacttcgagcccggctccggctcgcacttcgagttcccggactactgcacgcccgaggtgagcgagatgatctcgggagactggctcgagtccagcatctccaacctggttttcacctactgaagggcgcgcaggcagggagaagggccggggggggtaggagaggctggctcnagtccagcatctccaacctggttttcacct

SEQ ID NO: 297519 - DNA, 2895 bp, Homo sapiens
gcggccgcctactactactactactactgctcgaattcaagcttctaacgatgtacggggacatgtccctgggcagcttcagttcgtcgtcggcgctcgaccgggacctggattttaacttcgagcccggctccggctcgcacttcgagttcccggactactgcacgcccgaggtgagcgagatgatctcgggagactggctcgagtccagcatctccaacctggttttcacctactgaagggcgcgcaggcagggagaagggccggggggggtaggagaggagaaaaaaaaagtgaaaaaaagaaacgaaaaggacagacgaagagtttaaagagaaaagggaaaaaagaaagaaaaagtaagcagggctggcttcgcccgcgttctcgtcgtcggatcaaggagcgcggcggcgttttggacccgcgctcccatcccccaccttcccgggccggggacccactctgcccagccggagggacgcggaggaggaagagggtagacaggggcgacctgtgattgttgttattgatgttgttgttgatggcaaaaaaaaaaaagcgacttcgagtttgctcccctttgcttgaagagaccccctcccccttccaacgagcttccggacttgtctgcacccccagcaagaaggcgagttagttttctagagacttgaaggagtctcccccttcctgcatcaccaccttggttttgttttattttgcttcttggtcaagaaaggaggggagaacccagcgcacccctccccccctttttttaaacgcgtgatgaagacagaaggctccggggtgacgaatttggccgatggcagatgttttgggggaacgccgggactgagagactccacgcaggcgaattcccgtttggggcttttttttcctccctcttttccccttgccccctctgcagccggaggaggagatgttgaggggaggaggccagccagtgtgaccggcgctaggaaatgacccgagaaccccgttggaagcgcagcagcgggagctaggggcgggggcggaggaggacacgaactggaagggggttcacggtcaaactgaaatggatttgcacgttggggagctggcggcggcggctgctgggcctccgccttcttttctacgtgaaatcagtgaggtgagacttcccagaccccggaggcgtggaggagaggagactgtttgatgtggtacaggggcagtcagtggagggcgagtggtttcggaaaaaaaaaaagaaaaaaagaaaaaaaaagaaaaaaaaaagatttttttcttctcttaatcggaatcgtgatggtgttggattatttcaatggtggggttaatatagcatgttatcctgtctatcttttaaagatttctgtataagactgttgagcagtttttaaaatagtgtaggataatataaaaagcagatagatggcgctatgtttgattcctacaacgaaattatcaccagctttttttcattcttaactctttaaaggattcaaacgcaactcaaatctgtgctggactttaaaaaaacaattcaggaccaaattttttctcagtgtgtgtgtttattccttataggtgtaaatgagaagacgtgtttttttccttcaccgatgctccatcctcgtatttctttttccttgtaaatgtaatcagatgccattttatatgtggacgtatttatactggccaaacatattttttcttttgtccctttttttctttcctttctttttacttcctttatttctttattccttccttttcctttttttctttttttttctttttttttttttttttgggtagttgttgttacccacgccattttacgtctccttcactgaagggctagagttttaacttttaattttttatatttaaatgtagacttttgacacttttaaaaaacaaaaaaagacaagagagatgaaaacgtttgattattttctcagtgtatttttgtaaaaaatatataaagggggtgttaatcggtgtaaatcgctgtttggatttcctgattttataacagggcggctggttaatatctcacacagtttaaaaaatcagcccctaatttctccatgtttacacttcaatctgcaggcttcttaaagtgacagtatcccttaacctgccaccagtgtccaccctccggcccccgtcttgtaaaaaggggaggagaattagccaaacactgtaagcttttaagaaaaacaaagttttaaacgaaatactgctctgtccagaggctttaaaactggtgcaattacagcaaaaagggattctgtagctttaacttgtaaaccacatcttttttgcactttttttataagcaaaaacgtgccgtttaaaccactggatctatctaaatgccgatttgagttcgcgacactatgtactgcgtttttcattcttgtatttgactatttaatcctttctacttgtcgctaaatataattgttttagtcttatggcatgatgatagcatatgtgttcaggtttatagctgttgtgtttaaaaattgaaaaaagtggaaaacatctttgtacatttaagtctgtattataataagcaaaaagattgtgtgtatgtatgtttaatataacatgacaggcactaggacgtctgcctttttaaggcagttccgttaagggtttttgtttttaaacttttttttgccatccatcctgtgcaatatgccgtgtagaatatttgtcttaaaattcaaggccacaaaaacaatgtttgggggaaaaaaaagaaaaaatcatgccagctaatcatgtcaagttcactgcctgtcagattgttgatatataccttctgtaaataactttttttgagaaggaaataaaatcagctggaactgaacccta

SEQ ID NO: 297520 - DNA, 3181 bp, Homo sapiens
tcgtcccccgccgccggccgctcgcccgccgaccaccgcggctacgccagcctgcgcgccgcctcgcccgcccgccgagccgaggccatggtgcagcaaaccaacaatgccgagaacacggaagcgctgctggccggcgagagctcggactcgggcgccggcctcgagctgggaatcgcctcctcccccacgcccggctccaccgcctccacgggcggcaaggccgacgacccgagctggtgcaagaccccgagtgggcacatcaagcgacccatgaacgccttcatggtgtggtcgcagatcgagcggcgcaagatcatggagcagtcgcccgacatgcacaacgccgagatctccaagcggctgggcaaacgctggaagctgctcaaagacagcgacaagatccctttcattcgagaggcggagcggctgcgcctcaagcacatggctgactaccccgactacaagtaccggcccaggaagaaggtgaagtccggcaacgccaactccagctcctcggccgccgcctcctccaagcagggagaagggccggggggggtaggagaggagaaaaaaaaagtgaaaaaaagaaacgaaaaggacagacgaagagtttaaagagaaaagggaaaaaagaaagaaaaagtaagcagggctggcttcgcccgcgttctcgtcgtcggatcaaggagcgcggcggcgttttggacccgcgctcccatcccccaccttcccgggccggggacccactctgcccagccggagggacgcggaggaggaagagggtagacaggggcgacctgtgattgttgttattgatgttgttgttgatggcaaaaaaaaaaaagcgacttcgagtttgctcccctttgcttgaagagaccccctcccccttccaacgagcttccggacttgtctgcacccccagcaagaaggcgagttagttttctagagacttgaaggagtctcccccttcctgcatcaccaccttggttttgttttattttgcttcttggtcaagaaaggaggggagaacccagcgcacccctccccccctttttttaaacgcgtgatgaagacagaaggctccggggtgacgaatttggccgatggcagatgttttgggggaacgccgggactgagagactccacgcaggcgaattcccgtttggggcttttttttcctccctcttttccccttgccccctctgcagccggaggaggagatgttgaggggaggaggccagccagtgtgaccggcgctaggaaatgacccgagaaccccgttggaagcgcagcagcgggagctaggggcgggggcggaggaggacacgaactggaagggggttcacggtcaaactgaaatggatttgcacgttggggagctggcggcggcggctgctgggcctccgccttcttttctacgtgaaatcagtgaggtgagacttcccagaccccggaggcgtggaggagaggagactgtttgatgtggtacaggggcagtcagtggagggcgagtggtttcggaaaaaaaaaaagaaaaaaagaaaaaaaaagaaaaaaaaaagatttttttcttctcttaatcggaatcgtgatggtgttggattatttcaatggtggggttaatatagcatgttatcctgtctatcttttaaagatttctgtataagactgttgagcagtttttaaaatagtgtaggataatataaaaagcagatagatggcgctatgtttgattcctacaacgaaattatcaccagctttttttcattcttaactctttaaaggattcaaacgcaactcaaatctgtgctggactttaaaaaaacaattcaggaccaaattttttctcagtgtgtgtgtttattccttataggtgtaaatgagaagacgtgtttttttccttcaccgatgctccatcctcgtatttctttttccttgtaaatgtaatcagatgccattttatatgtggacgtatttatactggccaaacatattttttcttttgtccctttttttctttcctttctttttacttcctttatttctttattccttccttttcctttttttctttttttttctttttttttttttttttgggtagttgttgttacccacgccattttacgtctccttcactgaagggctagagttttaacttttaattttttatatttaaatgtagacttttgacacttttaaaaaacaaaaaaagacaagagagatgaaaacgtttgattattttctcagtgtatttttgtaaaaaatatataaagggggtgttaatcggtgtaaatcgctgtttggatttcctgattttataacagggcggctggttaatatctcacacagtttaaaaaatcagcccctaatttctccatgtttacacttcaatctgcaggcttcttaaagtgacagtatcccttaacctgccaccagtgtccaccctccggcccccgtcttgtaaaaaggggaggagaattagccaaacactgtaagcttttaagaaaaacaaagttttaaacgaaatactgctctgtccagaggctttaaaactggtgcaattacagcaaaaagggattctgtagctttaacttgtaaaccacatcttttttgcactttttttataagcaaaaacgtgccgtttaaaccactggatctatctaaatgccgatttgagttcgcgacactatgtactgcgtttttcattcttgtatttgactatttaatcctttctacttgtcgctaaatataattgttttagtcttatggcatgatgatagcatatgtgttcaggtttatagctgttgtgtttaaaaattgaaaaaagtggaaaacatctttgtacatttaagtctgtattataataagcaaaaagattgtgtgtatgtatgtttaatataacatgacaggcactaggacgtctgcctttttaaggcagttccgttaagggtttttgtttttaaacttttttttgccatccatcctgtgcaatatgccgtgtagaatatttgtcttaaaattcaaggccacaaaaacaatgtttgggggaaaaaaaagaaaaaatcatgccagctaatcatgtcaagttcactgcctgtcagattgttgatatataccttctgtaaataactttttttgagaaggaaataaaatcagctggaactgaacccta

SEQ ID NO: 297521 - DNA, 3033 bp, Homo sapiens
  misc_feature (8)..(8): n is a, c, g, or t
  misc_feature (25)..(25): n is a, c, g, or t
  misc_feature (51)..(51): n is a, c, g, or t
  misc_feature (279)..(279): n is a, c, g, or t
taaccccntcaacttaaaggggaancaaaaaaccttggagcttcccacgcnggttggccgcccgcttcttagaactaagttgaatccccccggcttgcaaggaattcggcacgagtgttgaggggaggaggccaagccagtgtgaccggcgcttaggaaatgacccgagaaccccgttggaagcgcagcagcgggagctaggggcgggggcggaggaggacacgaactggaagggggttcacggtcaaactgaaatggatttgcacgttggggagctgngcggcggcggctgcttggcctccgccttcttttctacgtgaaatcagtgaggtgagacttcccagaccccggaggcgtggaggagaggagactgtttgatgtggtacaggcagggagaagggccggggggggtaggagaggagaaaaaaaaagtgaaaaaaagaaacgaaaaggacagacgaagagtttaaagagaaaagggaaaaaagaaagaaaaagtaagcagggctggcttcgcccgcgttctcgtcgtcggatcaaggagcgcggcggcgttttggacccgcgctcccatcccccaccttcccgggccggggacccactctgcccagccggagggacgcggaggaggaagagggtagacaggggcgacctgtgattgttgttattgatgttgttgttgatggcaaaaaaaaaaaagcgacttcgagtttgctcccctttgcttgaagagaccccctcccccttccaacgagcttccggacttgtctgcacccccagcaagaaggcgagttagttttctagagacttgaaggagtctcccccttcctgcatcaccaccttggttttgttttattttgcttcttggtcaagaaaggaggggagaacccagcgcacccctccccccctttttttaaacgcgtgatgaagacagaaggctccggggtgacgaatttggccgatggcagatgttttgggggaacgccgggactgagagactccacgcaggcgaattcccgtttggggcttttttttcctccctcttttccccttgccccctctgcagccggaggaggagatgttgaggggaggaggccagccagtgtgaccggcgctaggaaatgacccgagaaccccgttggaagcgcagcagcgggagctaggggcgggggcggaggaggacacgaactggaagggggttcacggtcaaactgaaatggatttgcacgttggggagctggcggcggcggctgctgggcctccgccttcttttctacgtgaaatcagtgaggtgagacttcccagaccccggaggcgtggaggagaggagactgtttgatgtggtacaggggcagtcagtggagggcgagtggtttcggaaaaaaaaaaagaaaaaaagaaaaaaaaagaaaaaaaaaagatttttttcttctcttaatcggaatcgtgatggtgttggattatttcaatggtggggttaatatagcatgttatcctgtctatcttttaaagatttctgtataagactgttgagcagtttttaaaatagtgtaggataatataaaaagcagatagatggcgctatgtttgattcctacaacgaaattatcaccagctttttttcattcttaactctttaaaggattcaaacgcaactcaaatctgtgctggactttaaaaaaacaattcaggaccaaattttttctcagtgtgtgtgtttattccttataggtgtaaatgagaagacgtgtttttttccttcaccgatgctccatcctcgtatttctttttccttgtaaatgtaatcagatgccattttatatgtggacgtatttatactggccaaacatattttttcttttgtccctttttttctttcctttctttttacttcctttatttctttattccttccttttcctttttttctttttttttctttttttttttttttttgggtagttgttgttacccacgccattttacgtctccttcactgaagggctagagttttaacttttaattttttatatttaaatgtagacttttgacacttttaaaaaacaaaaaaagacaagagagatgaaaacgtttgattattttctcagtgtatttttgtaaaaaatatataaagggggtgttaatcggtgtaaatcgctgtttggatttcctgattttataacagggcggctggttaatatctcacacagtttaaaaaatcagcccctaatttctccatgtttacacttcaatctgcaggcttcttaaagtgacagtatcccttaacctgccaccagtgtccaccctccggcccccgtcttgtaaaaaggggaggagaattagccaaacactgtaagcttttaagaaaaacaaagttttaaacgaaatactgctctgtccagaggctttaaaactggtgcaattacagcaaaaagggattctgtagctttaacttgtaaaccacatcttttttgcactttttttataagcaaaaacgtgccgtttaaaccactggatctatctaaatgccgatttgagttcgcgacactatgtactgcgtttttcattcttgtatttgactatttaatcctttctacttgtcgctaaatataattgttttagtcttatggcatgatgatagcatatgtgttcaggtttatagctgttgtgtttaaaaattgaaaaaagtggaaaacatctttgtacatttaagtctgtattataataagcaaaaagattgtgtgtatgtatgtttaatataacatgacaggcactaggacgtctgcctttttaaggcagttccgttaagggtttttgtttttaaacttttttttgccatccatcctgtgcaatatgccgtgtagaatatttgtcttaaaattcaaggccacaaaaacaatgtttgggggaaaaaaaagaaaaaatcatgccagctaatcatgtcaagttcactgcctgtcagattgttgatatataccttctgtaaataactttttttgagaaggaaataaaatcagctggaactgaacccta

SEQ ID NO: 297522 - DNA, 2922 bp, Homo sapiens
agctgcacttcctggttccaaatcctggctcttcccctcatccctgggtaagttgagggatgagagcaagagaaggttgatcctgactcagatctctgcatggggcatgtcactgatgacggcggcattccctgagagagggaacactaagtttgaagttgggcatagtgagcactattttggatgagttaagtttagaagtgcctgaagacatccaagtggaagaagtggctgcatggactgaagatacagactgggaaacgttaacaccatcaaggaactggagtcctgcacagcccttcaagacagagaaaaaaaaagtgaaaaaaagaaacgaaaaggacagacgaagagtttaaagagaaaagggaaaaaagaaagaaaaagtaagcagggctggcttcgcccgcgttctcgtcgtcggatcaaggagcgcggcggcgttttggacccgcgctcccatcccccaccttcccgggccggggacccactctgcccagccggagggacgcggaggaggaagagggtagacaggggcgacctgtgattgttgttattgatgttgttgttgatggcaaaaaaaaaaaagcgacttcgagtttgctcccctttgcttgaagagaccccctcccccttccaacgagcttccggacttgtctgcacccccagcaagaaggcgagttagttttctagagacttgaaggagtctcccccttcctgcatcaccaccttggttttgttttattttgcttcttggtcaagaaaggaggggagaacccagcgcacccctccccccctttttttaaacgcgtgatgaagacagaaggctccggggtgacgaatttggccgatggcagatgttttgggggaacgccgggactgagagactccacgcaggcgaattcccgtttggggcttttttttcctccctcttttccccttgccccctctgcagccggaggaggagatgttgaggggaggaggccagccagtgtgaccggcgctaggaaatgacccgagaaccccgttggaagcgcagcagcgggagctaggggcgggggcggaggaggacacgaactggaagggggttcacggtcaaactgaaatggatttgcacgttggggagctggcggcggcggctgctgggcctccgccttcttttctacgtgaaatcagtgaggtgagacttcccagaccccggaggcgtggaggagaggagactgtttgatgtggtacaggggcagtcagtggagggcgagtggtttcggaaaaaaaaaaagaaaaaaagaaaaaaaaagaaaaaaaaaagatttttttcttctcttaatcggaatcgtgatggtgttggattatttcaatggtggggttaatatagcatgttatcctgtctatcttttaaagatttctgtataagactgttgagcagtttttaaaatagtgtaggataatataaaaagcagatagatggcgctatgtttgattcctacaacgaaattatcaccagctttttttcattcttaactctttaaaggattcaaacgcaactcaaatctgtgctggactttaaaaaaacaattcaggaccaaattttttctcagtgtgtgtgtttattccttataggtgtaaatgagaagacgtgtttttttccttcaccgatgctccatcctcgtatttctttttccttgtaaatgtaatcagatgccattttatatgtggacgtatttatactggccaaacatattttttcttttgtccctttttttctttcctttctttttacttcctttatttctttattccttccttttcctttttttctttttttttctttttttttttttttttgggtagttgttgttacccacgccattttacgtctccttcactgaagggctagagttttaacttttaattttttatatttaaatgtagacttttgacacttttaaaaaacaaaaaaagacaagagagatgaaaacgtttgattattttctcagtgtatttttgtaaaaaatatataaagggggtgttaatcggtgtaaatcgctgtttggatttcctgattttataacagggcggctggttaatatctcacacagtttaaaaaatcagcccctaatttctccatgtttacacttcaatctgcaggcttcttaaagtgacagtatcccttaacctgccaccagtgtccaccctccggcccccgtcttgtaaaaaggggaggagaattagccaaacactgtaagcttttaagaaaaacaaagttttaaacgaaatactgctctgtccagaggctttaaaactggtgcaattacagcaaaaagggattctgtagctttaacttgtaaaccacatcttttttgcactttttttataagcaaaaacgtgccgtttaaaccactggatctatctaaatgccgatttgagttcgcgacactatgtactgcgtttttcattcttgtatttgactatttaatcctttctacttgtcgctaaatataattgttttagtcttatggcatgatgatagcatatgtgttcaggtttatagctgttgtgtttaaaaattgaaaaaagtggaaaacatctttgtacatttaagtctgtattataataagcaaaaagattgtgtgtatgtatgtttaatataacatgacaggcactaggacgtctgcctttttaaggcagttccgttaagggtttttgtttttaaacttttttttgccatccatcctgtgcaatatgccgtgtagaatatttgtcttaaaattcaaggccacaaaaacaatgtttgggggaaaaaaaagaaaaaatcatgccagctaatcatgtcaagttcactgcctgtcagattgttgatatataccttctgtaaataactttttttgagaaggaaataaaatcagctggaactgaacccta

SEQ ID NO: 297523 - DNA, 2603 bp, Homo sapiens
  misc_feature (115)..(115): n is a, c, g, or t
tgcaaagagaccaaagtggttctcagggtgggtgcacacagccccgcagtgcaccttgcacctccacaggattagggcttgccagccaccctcccccaagcaggaaaggaggagntttttttgttgttttttgagacatcccatcccccaccttcccgggccggggacccactctgcccagccggagggacgcggaggaggaagagggtagacaggggcgacctgtgattgttgttattgatgttgttgttgatggcaaaaaaaaaaaagcgacttcgagtttgctcccctttgcttgaagagaccccctcccccttccaacgagcttccggacttgtctgcacccccagcaagaaggcgagttagttttctagagacttgaaggagtctcccccttcctgcatcaccaccttggttttgttttattttgcttcttggtcaagaaaggaggggagaacccagcgcacccctccccccctttttttaaacgcgtgatgaagacagaaggctccggggtgacgaatttggccgatggcagatgttttgggggaacgccgggactgagagactccacgcaggcgaattcccgtttggggcttttttttcctccctcttttccccttgccccctctgcagccggaggaggagatgttgaggggaggaggccagccagtgtgaccggcgctaggaaatgacccgagaaccccgttggaagcgcagcagcgggagctaggggcgggggcggaggaggacacgaactggaagggggttcacggtcaaactgaaatggatttgcacgttggggagctggcggcggcggctgctgggcctccgccttcttttctacgtgaaatcagtgaggtgagacttcccagaccccggaggcgtggaggagaggagactgtttgatgtggtacaggggcagtcagtggagggcgagtggtttcggaaaaaaaaaaagaaaaaaagaaaaaaaaagaaaaaaaaaagatttttttcttctcttaatcggaatcgtgatggtgttggattatttcaatggtggggttaatatagcatgttatcctgtctatcttttaaagatttctgtataagactgttgagcagtttttaaaatagtgtaggataatataaaaagcagatagatggcgctatgtttgattcctacaacgaaattatcaccagctttttttcattcttaactctttaaaggattcaaacgcaactcaaatctgtgctggactttaaaaaaacaattcaggaccaaattttttctcagtgtgtgtgtttattccttataggtgtaaatgagaagacgtgtttttttccttcaccgatgctccatcctcgtatttctttttccttgtaaatgtaatcagatgccattttatatgtggacgtatttatactggccaaacatattttttcttttgtccctttttttctttcctttctttttacttcctttatttctttattccttccttttcctttttttctttttttttctttttttttttttttttgggtagttgttgttacccacgccattttacgtctccttcactgaagggctagagttttaacttttaattttttatatttaaatgtagacttttgacacttttaaaaaacaaaaaaagacaagagagatgaaaacgtttgattattttctcagtgtatttttgtaaaaaatatataaagggggtgttaatcggtgtaaatcgctgtttggatttcctgattttataacagggcggctggttaatatctcacacagtttaaaaaatcagcccctaatttctccatgtttacacttcaatctgcaggcttcttaaagtgacagtatcccttaacctgccaccagtgtccaccctccggcccccgtcttgtaaaaaggggaggagaattagccaaacactgtaagcttttaagaaaaacaaagttttaaacgaaatactgctctgtccagaggctttaaaactggtgcaattacagcaaaaagggattctgtagctttaacttgtaaaccacatcttttttgcactttttttataagcaaaaacgtgccgtttaaaccactggatctatctaaatgccgatttgagttcgcgacactatgtactgcgtttttcattcttgtatttgactatttaatcctttctacttgtcgctaaatataattgttttagtcttatggcatgatgatagcatatgtgttcaggtttatagctgttgtgtttaaaaattgaaaaaagtggaaaacatctttgtacatttaagtctgtattataataagcaaaaagattgtgtgtatgtatgtttaatataacatgacaggcactaggacgtctgcctttttaaggcagttccgttaagggtttttgtttttaaacttttttttgccatccatcctgtgcaatatgccgtgtagaatatttgtcttaaaattcaaggccacaaaaacaatgtttgggggaaaaaaaagaaaaaatcatgccagctaatcatgtcaagttcactgcctgtcagattgttgatatataccttctgtaaataactttttttgagaaggaaataaaatcagctggaactgaacccta

SEQ ID NO: 297524 - DNA, 673 bp, Homo sapiens
ttcaatttctacaccgacatattcatgctgtatgtgctcgccacccgctagttacatactagtcatctcagttatcagatcagttgttggagtattgcagcgcttgtgttcaagtaacctttattttatttaaaatggcaccaaagagcaagagtagcgatgctggcagttcacatatgcagagagaagccatatagtgcttcctttaagtgtagaaattgaacgttcaatttctacacctcgctaaatataattgttttagtcttatggcatgatgatagcatatgtgttcaggtttatagctgttgtgtttaaaaattgaaaaaagtggaaaacatctttgtacatttaagtctgtattataataagcaaaaagattgtgtgtatgtatgtttaatataacatgacaggcactaggacgtctgcctttttaaggcagttccgttaagggtttttgtttttaaacttttttttgccatccatcctgtgcaatatgccgtgtagaatatttgtcttaaaattcaaggccacaaaaacaatgtttgggggaaaaaaaagaaaaaatcatgccagctaatcatgtcaagttcactgcctgtcagattgttgatatataccttctgtaaataactttttttgagaaggaaataaaatcagctggaactgaacccta

SEQ ID NO: 297525 - DNA, 684 bp, Homo sapiens
ggaaattgtgttgttccggctgctttcaacgcgcgtgtgagcgtgagctttggacattgtgttttgatgtgtgtgagcgtgagttttggacgctgtgtgaagttgtgttttgatgtgtgtgagcgtgagtttggacgttgtgtgaagttgtgtcgtgtgtgtgtgtgagttttggacgtgcgaagttgtgttttgatgtgtgtgagcgtgagttttggactgtgtgcagttgtgtttgattgtgtgtgtgagttttggacgttgtgcgaagttgtgttttgatgtgtgtgagcgtgagttttggagttgtgtggagtgggggtgtgtgtgtgtgtgtgtgtgtgtgtgtgtatgtgtgtgtgtgtgtgtgcacgcgcagtgtccatcagtatcagtgcctgcctgagttaggaaaattacattcctggttctgtattgaggagaaggatgtataaagcaacatgaaacattagccctccttttattttaaagactaatgttaattgttcttaaaactggattttttttccttaaagcaatttttttcttttcgatttaatgaagtattgctagctgaagccagtttgacatagagagatgtcagattgatttgaaaggtgtgcagcctgatttaaaaccaaaccctgaacccttttaaagaacaataaaacatattttacacgc

SEQ ID NO: 297526 - DNA, 364 bp, Homo sapiens
aattgattagtagagacaaacaaaaatatttttttcagaaaacaaaaaagaaggggagcgttcaattccaaacagctgctttatttggagaaataccgacctaagatgcgattacgcttcagagataccaatgggcattgctgtgttcagtagaaggaaatgtaaacgaaggctgacttgattgtgccatttagagggaactcttggtacctggaaatgtgaatctggaatattacctgtgtcatcaaagtagtgatggattcagtactcctcaaccactctcctaatgattggaacaaaagcaaacaaaaaagaaatctctctataaaatgaataaaatgtttaagaaaagagaaagagaaaa

SEQ ID NO: 297527 - DNA, 279 bp, Homo sapiens
  misc_feature (151)..(151): n is a, c, g, or t
aaagggctccagcccagaaggttcctgcccagatagccacaggccagaaagcagcgcctgctccaaaggctcagatgggtcaaatagctcctccccatgcagctctagggtccctacgcgttcctcggagatgcgacactggcgaattacnctgtgtcatcaaagtagtgatggattcagtactcctcaaccactctcctaatgattggaacaaaagcaaacaaaaaagaaatctctctataaaatgaataaaatgtttaagaaaagagaaagagaaaa

SEQ ID NO: 297528 - DNA, 496 bp, Homo sapiens
agaaagctcatgcgttgcattggtaatatgcagttacaggtttttaaaaatcctttcactccaagacttatggatacttacatacaggtttctttctgcagggcacctgtgctggttgcacttgctttgattgaatgtggaatgaagtacgaagatgcagttcagtttataagacaaaaaagaaggggagcgttcaattccaaacagctgctttatttggagaaataccgacctaagatgcgattacgcttcagagataccaatgggcattgctgtgttcagtagaaggaaatgtaaacgaaggctgacttgattgtgccatttagagggaactcttggtacctggaaatgtgaatctggaatattacctgtgtcatcaaagtagtgatggattcagtactcctcaaccactctcctaatgattggaacaaaagcaaacaaaaaagaaatctctctataaaatgaataaaatgtttaagaaaagagaaagagaaaa

SEQ ID NO: 297529 - DNA, 3843 bp, Homo sapiens
agcggggcggggcgggagctggttccggctgcgcgcgcagcggtggtggtggcggcgcgatcggccgggctgtaaccgtcgtctgtccgggagcggctggagcggcagcggcggccgggcacggcgcgaggtgacgccacagggcagcggcggcagcggaggcagcggcggcagcaggagacgcagcggcggccgcagcagcagcagcaagacggactcgtggagacgcgccgccgccgccgccgccgggccgggccgggtgtcgcgcgccgaggctgggggggagtcgtcgccgccgccgccaccgctaccgccgccgccgccgccgccgaggtgactgaggagagaggcgcctcctcgctcccgccaccgccggacttcaatgcccagtccccagctcgccagcgtttttcgttggaatatacgttgcacatttatggcgattctgagtgtgagggcagacttctgccaggctcagcacagcattttcgctgacaagtgagcttggaggttctatgtgccataattaacattgccttgaagactcctggacaccgagactggcctcagaaatagttggctttttttttttttaattgcaagcatatttcttttaatgactccagtaaaattaagcatcaagtaaacaagtggaaagtgacctacacttttaacttgtctcactagtgcctaaatgtagtaaaggctgcttaagttttgtatgtagttggattttttggagtccgaaggtatccatctgcagaaattgaggcccaaattgaatttggattcaagtggattctaaatactttgcttatcttgaagagagaagcttcataaggaataaacaagttgaatagagaaaacactgattgataataggcattttagtggtctttttaatgttttctgctgtgaaacatttcaagatttattgatttttttttttcactttccccatcacactcacacgcacgctcacactttttatttgccataatgaaccgtccagcccctgtggagatctcctatgagaacatgcgttttctgataactcacaaccctaccaatgctactctcaacaagttcacagaggaacttaagaagtatggagtgacgactttggttcgagtttgtgatgctacatatgataaagctccagttgaaaaagaaggaatccacgttctagattggccatttgatgatggagctccaccccctaatcagatagtagatgattggttaaacctgttaaaaaccaaatttcgtgaagagccaggttgctgtgttgcagtgcattgtgttgcaggattgggaagggcacctgtgctggttgcacttgctttgattgaatgtggaatgaagtacgaagatgcagttcagtttataagacaaaaaagaaggggagcgttcaattccaaacagctgctttatttggagaaataccgacctaagatgcgattacgcttcagagataccaatgggcattgctgtgttcagtagaaggaaatgtaaacgaaggctgacttgattgtgccatttagagggaactcttggtacctggaaatgtgaatctggaatattacctgtgtcatcaaagtagtgatggattcagtactcctcaaccactctcctaatgattggaacaaaagcaaacaaaaaagaaatctctctataaaatgaataaaatgtttaagaaaagagaaagagaaaaggaattaattcagtgaaggatgattttgctcctagttttggagtttgaatttctgccaggattgaattattttgaaatctcctgtctttttaaactttttcaaaataggtctctaaggaaaaccagcagaacattagcctgtgcaaaaccatctgtttggggagcacactcttccattatgcttggcacatagatctccctgtggtgggattttttttttccctttttttgtgggggagggttggtggtatatttttcccctcttttttccttcctctcctacatctcccttttcccccgatccaagttgtagatggaatagaagcccttgttgctgtagatgtgcgtgcagtctggcagccttaagcccacctgggcacttttagataaaaaaaaaaaaaaacaaaaaacaacaccaaaaaaacagcagtgatatatatattccaggtggtttttagtctttactgatgaaagggtgttcatgttagtttcttcaaaaccctatctaatactaggcaaagtagccaagagccttttgttttgtttttattttgataaattagtggagaaatggcattttaagaggagtctcttctcaacttacctgagagtcgaattcttctcttccctaaccaatgaagctaagtggttatcccagaaacttgtcttctaaaagggaggactccaggccatcaataaagatgtccaggcagtgagcgtactttttacaccctgtagaattgtgggctgtagcgttactctgattttctgtctagtatcagagaatgctggtagcttaaaatttttattttaggacttgtactctgaattttcaggaaccgtcaaaggagcagcagcaaattcacatattttcgacttgagaaatgcttgtggtatgtgttttccaaactgccccctatatgtaaagttcagtttaaccactgattgccttgttattactaggttttttgagattaaaaaaaaaaaatccctggtttaaaaccaacaatgatgcctagtgagtatgtgtccacaggccataacagggtagaagagagacatcgtgcaacccaatgagtagtgaagggactgtgttgcttgtgaagcggtgtagtagcatttttgcagattcttggctgggtttagtgtactgatctagaaaagctgtttttctgctcctttgtggaaggcagttatgatcaggctgcatggacaaagcaggtagaggggcaccatcaggggctcttgcactattttcacctctaaatattacgtactcagtagtgccctgcttctagggctctgaatacgggcttaaagtcatcttgtcctgctggaatttgctgtgcagagccataagcctcccattttgttagcgtcagctaggccaataggaacagaccgggaccttgtctcacactgatgatacctcacatgttgaccggctatgtgaactgcctatttcctatgctggagttttgatttttaactaaacgcaaatctgtagattctctcctctcccatcccagaaaacaaaacaaaataatgcttttcgaaattgtttctaggactttaaaacataatggtatatccaaaattctttatttcagaatgcaacaatagattccattaatatagactcaagatcaaaacagcatacctgctaagctaagatagatggtgttgattccactgggttttgatcaatacaataacaaacctttttcctttgacatactctgaattttgttgtttggggggagggggtgtgtgtgtgtgtgtgtgtgtgtgtgtgtatgtgtgtgtgtgtgtgtgcacgcgcagtgtccatcagtatcagtgcctgcctgagttaggaaaattacattcctggttctgtattgaggagaaggatgtataaagcaacatgaaacattagccctccttttattttaaagactaatgttaattgttcttaaaactggattttttttccttaaagcaatttttttcttttcgatttaatgaagtattgctagctgaagccagtttgacatagagagatgtcagattgatttgaaaggtgtgcagcctgatttaaaaccaaaccctgaacccttttaaagaacaataaaacatattttacacgc

SEQ ID NO: 297530 - DNA, 3885 bp, Homo sapiens
agcggggcggggcgggagctggttccggctgcgcgcgcagcggtggtggtggcggcgcgatcggccgggctgtaaccgtcgtctgtccgggagcggctggagcggcagcggcggccgggcacggcgcgaggtgacgccacagggcagcggcggcagcggaggcagcggcggcagcaggagacgcagcggcggccgcagcagcagcagcaagacggactcgtggagacgcgccgccgccgccgccgccgggccgggccgggtgtcgcgcgccgaggctgggggggagtcgtcgccgccgccgccaccgctaccgccgccgccgccgccgccgaggtgactgaggagagaggcgcctcctcgctcccgccaccgccggacttcaatgcccagtccccagctcgccagcgtttttcgttggaatatacgttgcacatttatggcgattctgagtgtgagggcagacttctgccaggctcagcacagcattttcgctgacaagtgagcttggaggttctatgtgccataattaacattgccttgaagactcctggacaccgagactggcctcagaaatagttggctttttttttttttaattgcaagcatatttcttttaatgactccagtaaaattaagcatcaagtaaacaagtggaaagtgacctacacttttaacttgtctcactagtgcctaaatgtagtaaaggctgcttaagttttgtatgtagttggattttttggagtccgaaggtatccatctgcagaaattgaggcccaaattgaatttggattcaagtggattctaaatactttgcttatcttgaagagagaagcttcataaggaataaacaagttgaatagagaaaacactgattgataataggcattttagtggtctttttaatgttttctgctgtgaaacatttcaagatttattgatttttttttttcactttccccatcacactcacacgcacgctcacactttttatttgccataatgaaccgtccagcccctgtggagatctcctatgagaacatgcgttttctgataactcacaaccctaccaatgctactctcaacaagttcacagaggaacttaagaagtatggagtgacgactttggttcgagtttgtgatgctacatatgataaagctccagttgaaaaagaaggaatccacgttctagattggccatttgatgatggagctccaccccctaatcagatagtagatgattggttaaacctgttaaaaaccaaatttcgtgaagagccaggttgctgtgttgcagtgcattgtgttgcaggattgggaagggcacctgtgctggttgcacttgctttgattgaatgtggaatgaagtacgaagatgcagttcagtttataagacaaaaaagaaggggagcgttcaattccaaacagctgctttatttggagaaataccgacctaagatgcgattacgcttcagagataccaatgggcattgctgtgttcagtagaaggaaatgtaaacgaaggctgacttgattgtgccatttagagggaactcttggtacctggaaatgtgaatctggaatattacctgtgtcatcaaagtagtgatggattcagtactcctcaaccactctcctaatgattggaacaaaagcaaacaaaaaagaaatctctctataaaatgaataaaatgtttaagaaaagagaaagagaaaaggaattaattcagtgaaggatgattttgctcctagttttggagtttgaatttctgccaggattgaattattttgaaatctcctgtctttttaaactttttcaaaataggtctctaaggaaaaccagcagaacattagcctgtgcaaaaccatctgtttggggagcacactcttccattatgcttggcacatagatctccctgtggtgggattttttttttccctttttttgtgggggagggttggtggtatatttttcccctcttttttccttcctctcctacatctcccttttcccccgatccaagttgtagatggaatagaagcccttgttgctgtagatgtgcgtgcagtctggcagccttaagcccacctgggcacttttagataaaaaaaaaaaaaaacaaaaaacaacaccaaaaaaacagcagtgatatatatatatatatatatatatatatatatatatatatatatatatatattccaggtggtttttagtctttactgatgaaagggtgttcatgttagtttcttcaaaaccctatctaatactaggcaaagtagccaagagccttttgttttgtttttattttgataaattagtggagaaatggcattttaagaggagtctcttctcaacttacctgagagtcgaattcttctcttccctaaccaatgaagctaagtggttatcccagaaacttgtcttctaaaagggaggactccaggccatcaataaagatgtccaggcagtgagcgtactttttacaccctgtagaattgtgggctgtagcgttactctgattttctgtctagtatcagagaatgctggtagcttaaaatttttattttaggacttgtactctgaattttcaggaaccgtcaaaggagcagcagcaaattcacatattttcgacttgagaaatgcttgtggtatgtgttttccaaactgccccctatatgtaaagttcagtttaaccactgattgccttgttattactaggttttttgagattaaaaaaaaaaaatccctggtttaaaaccaacaatgatgcctagtgagtatgtgtccacaggccataacagggtagaagagagacatcgtgcaacccaatgagtagtgaagggactgtgttgcttgtgaagcggtgtagtagcatttttgcagattcttggctgggtttagtgtactgatctagaaaagctgtttttctgctcctttgtggaaggcagttatgatcaggctgcatggacaaagcaggtagaggggcaccatcaggggctcttgcactattttcacctctaaatattacgtactcagtagtgccctgcttctagggctctgaatacgggcttaaagtcatcttgtcctgctggaatttgctgtgcagagccataagcctcccattttgttagcgtcagctaggccaataggaacagaccgggaccttgtctcacactgatgatacctcacatgttgaccggctatgtgaactgcctatttcctatgctggagttttgatttttaactaaacgcaaatctgtagattctctcctctcccatcccagaaaacaaaacaaaataatgcttttcgaaattgtttctaggactttaaaacataatggtatatccaaaattctttatttcagaatgcaacaatagattccattaatatagactcaagatcaaaacagcatacctgctaagctaagatagatggtgttgattccactgggttttgatcaatacaataacaaacctttttcctttgacatactctgaattttgttgtttggggggagggggtgtgtgtgtgtgtgtgtgtgtgtgtgtgtatgtgtgtgtgtgtgtgtgcacgcgcagtgtccatcagtatcagtgcctgcctgagttaggaaaattacattcctggttctgtattgaggagaaggatgtataaagcaacatgaaacattagccctccttttattttaaagactaatgttaattgttcttaaaactggattttttttccttaaagcaatttttttcttttcgatttaatgaagtattgctagctgaagccagtttgacatagagagatgtcagattgatttgaaaggtgtgcagcctgatttaaaaccaaaccctgaacccttttaaagaacaataaaacatattttacacgc

SEQ ID NO: 297531 - DNA, 3906 bp, Homo sapiens
agcggggcggggcgggagctggttccggctgcgcgcgcagcggtggtggtggcggcgcgatcggccgggctgtaaccgtcgtctgtccgggagcggctggagcggcagcggcggccgggcacggcgcgaggtgacgccacagggcagcggcggcagcggaggcagcggcggcagcaggagacgcagcggcggccgcagcagcagcagcaagacggactcgtggagacgcgccgccgccgccgccgccgggccgggccgggtgtcgcgcgccgaggctgggggggagtcgtcgccgccgccgccaccgctaccgccgccgccgccgccgccgaggtgactgaggagagaggcgcctcctcgctcccgccaccgccggacttcaatgcccagtccccagctcgccagcgtttttcgttggaatatacgttgcacatttatggcgattctgagtgtgagggcagacttctgccaggctcagcacagcattttcgctgacaagtgagcttggaggttctatgtgccataattaacattgccttgaagactcctggacaccgagactggcctcagaaatagttggctttttttttttttaattgcaagcatatttcttttaatgactccagtaaaattaagcatcaagtaaacaagtggaaagtgacctacacttttaacttgtctcactagtgcctaaatgtagtaaaggctgcttaagttttgtatgtagttggattttttggagtccgaaggtatccatctgcagaaattgaggcccaaattgaatttggattcaagtggattctaaatactttgcttatcttgaagagagaagcttcataaggaataaacaagttgaatagagaaaacactgattgataataggcattttagtggtctttttaatgttttctgctgtgaaacatttcaagatttattgatttttttttttcactttccccatcacactcacacgcacgctcacactttttatttgccataatgaaccgtccagcccctgtggagatctcctatgagaacatgcgttttctgataactcacaaccctaccaatgctactctcaacaagttcacagaggaacttaagaagtatggagtgacgactttggttcgagtttgtgatgctacatatgataaagctccagttgaaaaagaaggaatccacgttctagattggccatttgatgatggagctccaccccctaatcagatagtagatgattggttaaacctgttaaaaaccaaatttcgtgaagagccaggttgctgtgttgcagtgcattgtgttgcaggattgggaagggcacctgtgctggttgcacttgctttgattgaatgtggaatgaagtacgaagatgcagttcagtttataagacaaaaaagaaggggagcgttcaattccaaacagctgctttatttggagaaataccgacctaagatgcgattacgcttcagagataccaatgggcattgctgtgttcagtagaaggaaatgtaaacgaaggctgacttgattgtgccatttagagggaactcttggtacctggaaatgtgaatctggaatattacctgtgtcatcaaagtagtgatggattcagtactcctcaaccactctcctaatgattggaacaaaagcaaacaaaaaagaaatctctctataaaatgaataaaatgtttaagaaaagagaaagagaaaaggaattaattcagtgaaggatgattttgctcctagttttggagtttgaatttctgccaggattgaattattttgaaatctcctgtctttttaaactttttcaaaataggtctctaaggaaaaccagcagaacattagcctgtgcaaaaccatctgtttggggagcacactcttccattatgcttggcacatagatctccctgtggtgggattttttttttccctttttttgtgggggagggttggtggtatatttttcccctcttttttccttcctctcctacatctcccttttcccccgatccaagttgtagatggaatagaagcccttgttgctgtagatgtgcgtgcagtctggcagccttaagcccacctgggcacttttagataaaaaaaaaaaaaaacaaaaaacaacaccaaaaaaacagcagtgatatatatatatatatatatatatatatatatatatatatatatatatataatatatatatatatatatattttccaggtggtttttagtctttactgatgaaagggtgttcatgttagtttcttcaaaaccctatctaatactaggcaaagtagccaagagccttttgttttgtttttattttgataaattagtggagaaatggcattttaagaggagtctcttctcaacttacctgagagtcgaattcttctcttccctaaccaatgaagctaagtggttatcccagaaacttgtcttctaaaagggaggactccaggccatcaataaagatgtccaggcagtgagcgtactttttacaccctgtagaattgtgggctgtagcgttactctgattttctgtctagtatcagagaatgctggtagcttaaaatttttattttaggacttgtactctgaattttcaggaaccgtcaaaggagcagcagcaaattcacatattttcgacttgagaaatgcttgtggtatgtgttttccaaactgccccctatatgtaaagttcagtttaaccactgattgccttgttattactaggttttttgagattaaaaaaaaaaaatccctggtttaaaaccaacaatgatgcctagtgagtatgtgtccacaggccataacagggtagaagagagacatcgtgcaacccaatgagtagtgaagggactgtgttgcttgtgaagcggtgtagtagcatttttgcagattcttggctgggtttagtgtactgatctagaaaagctgtttttctgctcctttgtggaaggcagttatgatcaggctgcatggacaaagcaggtagaggggcaccatcaggggctcttgcactattttcacctctaaatattacgtactcagtagtgccctgcttctagggctctgaatacgggcttaaagtcatcttgtcctgctggaatttgctgtgcagagccataagcctcccattttgttagcgtcagctaggccaataggaacagaccgggaccttgtctcacactgatgatacctcacatgttgaccggctatgtgaactgcctatttcctatgctggagttttgatttttaactaaacgcaaatctgtagattctctcctctcccatcccagaaaacaaaacaaaataatgcttttcgaaattgtttctaggactttaaaacataatggtatatccaaaattctttatttcagaatgcaacaatagattccattaatatagactcaagatcaaaacagcatacctgctaagctaagatagatggtgttgattccactgggttttgatcaatacaataacaaacctttttcctttgacatactctgaattttgttgtttggggggagggggtgtgtgtgtgtgtgtgtgtgtgtgtgtgtatgtgtgtgtgtgtgtgtgcacgcgcagtgtccatcagtatcagtgcctgcctgagttaggaaaattacattcctggttctgtattgaggagaaggatgtataaagcaacatgaaacattagccctccttttattttaaagactaatgttaattgttcttaaaactggattttttttccttaaagcaatttttttcttttcgatttaatgaagtattgctagctgaagccagtttgacatagagagatgtcagattgatttgaaaggtgtgcagcctgatttaaaaccaaaccctgaacccttttaaagaacaataaaacatattttacacgc

SEQ ID NO: 297532 - DNA, 3681 bp, Homo sapiens
agcggggcggggcgggagctggttccggctgcgcgcgcagcggtggtggtggcggcgcgatcggccgggctgtaaccgtcgtctgtccgggagcggctggagcggcagcggcggccgggcacggcgcgaggtgacgccgccaccgctaccgccgccgccgccgccgccgaggtgactgaggagagaggcgcctcctcgctcccgccaccgccggacttcaatgcccagtccccagctcgccagcgtttttcgttggaatatacgttgcacatttatggcgattctgagtgtgagggcagacttctgccaggctcagcacagcattttcgctgacaagtgagcttggaggttctatgtgccataattaacattgccttgaagactcctggacaccgagactggcctcagaaatagttggctttttttttttttaattgcaagcatatttcttttaatgactccagtaaaattaagcatcaagtaaacaagtggaaagtgacctacacttttaacttgtctcactagtgcctaaatgtagtaaaggctgcttaagttttgtatgtagttggattttttggagtccgaaggtatccatctgcagaaattgaggcccaaattgaatttggattcaagtggattctaaatactttgcttatcttgaagagagaagcttcataaggaataaacaagttgaatagagaaaacactgattgataataggcattttagtggtctttttaatgttttctgctgtgaaacatttcaagatttattgatttttttttttcactttccccatcacactcacacgcacgctcacactttttatttgccataatgaaccgtccagcccctgtggagatctcctatgagaacatgcgttttctgataactcacaaccctaccaatgctactctcaacaagttcacagaggaacttaagaagtatggagtgacgactttggttcgagtttgtgatgctacatatgataaagctccagttgaaaaagaaggaatccacgttctagattggccatttgatgatggagctccaccccctaatcagatagtagatgattggttaaacctgttaaaaaccaaatttcgtgaagagccaggttgctgtgttgcagtgcattgtgttgcaggattgggaagggcacctgtgctggttgcacttgctttgattgaatgtggaatgaagtacgaagatgcagttcagtttataagacaaaaaagaaggggagcgttcaattccaaacagctgctttatttggagaaataccgacctaagatgcgattacgcttcagagataccaatgggcattgctgtgttcagtagaaggaaatgtaaacgaaggctgacttgattgtgccatttagagggaactcttggtacctggaaatgtgaatctggaatattacctgtgtcatcaaagtagtgatggattcagtactcctcaaccactctcctaatgattggaacaaaagcaaacaaaaaagaaatctctctataaaatgaataaaatgtttaagaaaagagaaagagaaaaggaattaattcagtgaaggatgattttgctcctagttttggagtttgaatttctgccaggattgaattattttgaaatctcctgtctttttaaactttttcaaaataggtctctaaggaaaaccagcagaacattagcctgtgcaaaaccatctgtttggggagcacactcttccattatgcttggcacatagatctccctgtggtgggattttttttttccctttttttgtgggggagggttggtggtatatttttcccctcttttttccttcctctcctacatctcccttttcccccgatccaagttgtagatggaatagaagcccttgttgctgtagatgtgcgtgcagtctggcagccttaagcccacctgggcacttttagataaaaaaaaaaaaaaacaaaaaacaacaccaaaaaaacagcagtgatatatatattccaggtggtttttagtctttactgatgaaagggtgttcatgttagtttcttcaaaaccctatctaatactaggcaaagtagccaagagccttttgttttgtttttattttgataaattagtggagaaatggcattttaagaggagtctcttctcaacttacctgagagtcgaattcttctcttccctaaccaatgaagctaagtggttatcccagaaacttgtcttctaaaagggaggactccaggccatcaataaagatgtccaggcagtgagcgtactttttacaccctgtagaattgtgggctgtagcgttactctgattttctgtctagtatcagagaatgctggtagcttaaaatttttattttaggacttgtactctgaattttcaggaaccgtcaaaggagcagcagcaaattcacatattttcgacttgagaaatgcttgtggtatgtgttttccaaactgccccctatatgtaaagttcagtttaaccactgattgccttgttattactaggttttttgagattaaaaaaaaaaaatccctggtttaaaaccaacaatgatgcctagtgagtatgtgtccacaggccataacagggtagaagagagacatcgtgcaacccaatgagtagtgaagggactgtgttgcttgtgaagcggtgtagtagcatttttgcagattcttggctgggtttagtgtactgatctagaaaagctgtttttctgctcctttgtggaaggcagttatgatcaggctgcatggacaaagcaggtagaggggcaccatcaggggctcttgcactattttcacctctaaatattacgtactcagtagtgccctgcttctagggctctgaatacgggcttaaagtcatcttgtcctgctggaatttgctgtgcagagccataagcctcccattttgttagcgtcagctaggccaataggaacagaccgggaccttgtctcacactgatgatacctcacatgttgaccggctatgtgaactgcctatttcctatgctggagttttgatttttaactaaacgcaaatctgtagattctctcctctcccatcccagaaaacaaaacaaaataatgcttttcgaaattgtttctaggactttaaaacataatggtatatccaaaattctttatttcagaatgcaacaatagattccattaatatagactcaagatcaaaacagcatacctgctaagctaagatagatggtgttgattccactgggttttgatcaatacaataacaaacctttttcctttgacatactctgaattttgttgtttggggggagggggtgtgtgtgtgtgtgtgtgtgtgtgtgtgtatgtgtgtgtgtgtgtgtgcacgcgcagtgtccatcagtatcagtgcctgcctgagttaggaaaattacattcctggttctgtattgaggagaaggatgtataaagcaacatgaaacattagccctccttttattttaaagactaatgttaattgttcttaaaactggattttttttccttaaagcaatttttttcttttcgatttaatgaagtattgctagctgaagccagtttgacatagagagatgtcagattgatttgaaaggtgtgcagcctgatttaaaaccaaaccctgaacccttttaaagaacaataaaacatattttacacgc

SEQ ID NO: 297533 - DNA, 3885 bp, Homo sapiens
agcggggcggggcgggagctggttccggctgcgcgcgcagcggtggtggtggcggcgcgatcggccgggctgtaaccgtcgtctgtccgggagcggctggagcggcagcggcggccgggcacggcgcgaggtgacgccacagggcagcggcggcagcggaggcagcggcggcagcaggagacgcagcggcggccgcagcagcagcagcaagacggactcgtggagacgcgccgccgccgccgccgccgggccgggccgggtgtcgcgcgccgaggctgggggggagtcgtcgccgcaggagacgcagcggcggccgcagcagcagcagcaagacggaccgccgccaccgctaccgccgccgccgccgccgccgaggtgactgaggagagaggcgcctcctcgctcccgccaccgccggacttcaatgcccagtccccagctcgccagcgtttttcgttggaatatacgttgcacatttatggcgattctgagtgtgagggcagacttctgccaggctcagcacagcattttcgctgacaagtgagcttggaggttctatgtgccataattaacattgccttgaagactcctggacaccgagactggcctcagaaatagttggctttttttttttttaattgcaagcatatttcttttaatgactccagtaaaattaagcatcaagtaaacaagtggaaagtgacctacacttttaacttgtctcactagtgcctaaatgtagtaaaggctgcttaagttttgtatgtagttggattttttggagtccgaaggtatccatctgcagaaattgaggcccaaattgaatttggattcaagtggattctaaatactttgcttatcttgaagagagaagcttcataaggaataaacaagttgaatagagaaaacactgattgataataggcattttagtggtctttttaatgttttctgctgtgaaacatttcaagatttattgatttttttttttcactttccccatcacactcacacgcacgctcacactttttatttgccataatgaaccgtccagcccctgtggagatctcctatgagaacatgcgttttctgataactcacaaccctaccaatgctactctcaacaagttcacagaggaacttaagaagtatggagtgacgactttggttcgagtttgtgatgctacatatgataaagctccagttgaaaaagaaggaatccacgttctagattggccatttgatgatggagctccaccccctaatcagatagtagatgattggttaaacctgttaaaaaccaaatttcgtgaagagccaggttgctgtgttgcagtgcattgtgttgcaggattgggaagggcacctgtgctggttgcacttgctttgattgaatgtggaatgaagtacgaagatgcagttcagtttataagacaaaaaagaaggggagcgttcaattccaaacagctgctttatttggagaaataccgacctaagatgcgattacgcttcagagataccaatgggcattgctgtgttcagtagaaggaaatgtaaacgaaggctgacttgattgtgccatttagagggaactcttggtacctggaaatgtgaatctggaatattacctgtgtcatcaaagtagtgatggattcagtactcctcaaccactctcctaatgattggaacaaaagcaaacaaaaaagaaatctctctataaaatgaataaaatgtttaagaaaagagaaagagaaaaggaattaattcagtgaaggatgattttgctcctagttttggagtttgaatttctgccaggattgaattattttgaaatctcctgtctttttaaactttttcaaaataggtctctaaggaaaaccagcagaacattagcctgtgcaaaaccatctgtttggggagcacactcttccattatgcttggcacatagatctccctgtggtgggattttttttttccctttttttgtgggggagggttggtggtatatttttcccctcttttttccttcctctcctacatctcccttttcccccgatccaagttgtagatggaatagaagcccttgttgctgtagatgtgcgtgcagtctggcagccttaagcccacctgggcacttttagataaaaaaaaaaaaaaacaaaaaacaacaccaaaaaaacagcagtgatatatatattccaggtggtttttagtctttactgatgaaagggtgttcatgttagtttcttcaaaaccctatctaatactaggcaaagtagccaagagccttttgttttgtttttattttgataaattagtggagaaatggcattttaagaggagtctcttctcaacttacctgagagtcgaattcttctcttccctaaccaatgaagctaagtggttatcccagaaacttgtcttctaaaagggaggactccaggccatcaataaagatgtccaggcagtgagcgtactttttacaccctgtagaattgtgggctgtagcgttactctgattttctgtctagtatcagagaatgctggtagcttaaaatttttattttaggacttgtactctgaattttcaggaaccgtcaaaggagcagcagcaaattcacatattttcgacttgagaaatgcttgtggtatgtgttttccaaactgccccctatatgtaaagttcagtttaaccactgattgccttgttattactaggttttttgagattaaaaaaaaaaaatccctggtttaaaaccaacaatgatgcctagtgagtatgtgtccacaggccataacagggtagaagagagacatcgtgcaacccaatgagtagtgaagggactgtgttgcttgtgaagcggtgtagtagcatttttgcagattcttggctgggtttagtgtactgatctagaaaagctgtttttctgctcctttgtggaaggcagttatgatcaggctgcatggacaaagcaggtagaggggcaccatcaggggctcttgcactattttcacctctaaatattacgtactcagtagtgccctgcttctagggctctgaatacgggcttaaagtcatcttgtcctgctggaatttgctgtgcagagccataagcctcccattttgttagcgtcagctaggccaataggaacagaccgggaccttgtctcacactgatgatacctcacatgttgaccggctatgtgaactgcctatttcctatgctggagttttgatttttaactaaacgcaaatctgtagattctctcctctcccatcccagaaaacaaaacaaaataatgcttttcgaaattgtttctaggactttaaaacataatggtatatccaaaattctttatttcagaatgcaacaatagattccattaatatagactcaagatcaaaacagcatacctgctaagctaagatagatggtgttgattccactgggttttgatcaatacaataacaaacctttttcctttgacatactctgaattttgttgtttggggggagggggtgtgtgtgtgtgtgtgtgtgtgtgtgtgtatgtgtgtgtgtgtgtgtgcacgcgcagtgtccatcagtatcagtgcctgcctgagttaggaaaattacattcctggttctgtattgaggagaaggatgtataaagcaacatgaaacattagccctccttttattttaaagactaatgttaattgttcttaaaactggattttttttccttaaagcaatttttttcttttcgatttaatgaagtattgctagctgaagccagtttgacatagagagatgtcagattgatttgaaaggtgtgcagcctgatttaaaaccaaaccctgaacccttttaaagaacaataaaacatattttacacgc

SEQ ID NO: 297534 - DNA, 3617 bp, Homo sapiens
tggtcgccggagtaaggatatgtcgaccagccgtcgccacgcgtcggcgcgaggctgtggggagtcggggcgccgccaccgctaccgccgccgccgccgccgccgaggtgactgaggagagaggcgcctcctcgctcccgccaccgccggacttcaatgcccagtccccagctcgccagcgtttttcgttggaatatacgttgcacatttatggcgattctgagtgtgagggcagacttctgccaggctcagcacagcattttcgctgacaagtgagcttggaggttctatgtgccataattaacattgccttgaagactcctggacaccgagactggcctcagaaatagttggctttttttttttttaattgcaagcatatttcttttaatgactccagtaaaattaagcatcaagtaaacaagtggaaagtgacctacacttttaacttgtctcactagtgcctaaatgtagtaaaggctgcttaagttttgtatgtagttggattttttggagtccgaaggtatccatctgcagaaattgaggcccaaattgaatttggattcaagtggattctaaatactttgcttatcttgaagagagaagcttcataaggaataaacaagttgaatagagaaaacactgattgataataggcattttagtggtctttttaatgttttctgctgtgaaacatttcaagatttattgatttttttttttcactttccccatcacactcacacgcacgctcacactttttatttgccataatgaaccgtccagcccctgtggagatctcctatgagaacatgcgttttctgataactcacaaccctaccaatgctactctcaacaagttcacagaggaacttaagaagtatggagtgacgactttggttcgagtttgtgatgctacatatgataaagctccagttgaaaaagaaggaatccacgttctagattggccatttgatgatggagctccaccccctaatcagatagtagatgattggttaaacctgttaaaaaccaaatttcgtgaagagccaggttgctgtgttgcagtgcattgtgttgcaggattgggaagggcacctgtgctggttgcacttgctttgattgaatgtggaatgaagtacgaagatgcagttcagtttataagacaaaaaagaaggggagcgttcaattccaaacagctgctttatttggagaaataccgacctaagatgcgattacgcttcagagataccaatgggcattgctgtgttcagtagaaggaaatgtaaacgaaggctgacttgattgtgccatttagagggaactcttggtacctggaaatgtgaatctggaatattacctgtgtcatcaaagtagtgatggattcagtactcctcaaccactctcctaatgattggaacaaaagcaaacaaaaaagaaatctctctataaaatgaataaaatgtttaagaaaagagaaagagaaaaggaattaattcagtgaaggatgattttgctcctagttttggagtttgaatttctgccaggattgaattattttgaaatctcctgtctttttaaactttttcaaaataggtctctaaggaaaaccagcagaacattagcctgtgcaaaaccatctgtttggggagcacactcttccattatgcttggcacatagatctccctgtggtgggattttttttttccctttttttgtgggggagggttggtggtatatttttcccctcttttttccttcctctcctacatctcccttttcccccgatccaagttgtagatggaatagaagcccttgttgctgtagatgtgcgtgcagtctggcagccttaagcccacctgggcacttttagataaaaaaaaaaaaaaacaaaaaacaacaccaaaaaaacagcagtgatatatatattccaggtggtttttagtctttactgatgaaagggtgttcatgttagtttcttcaaaaccctatctaatactaggcaaagtagccaagagccttttgttttgtttttattttgataaattagtggagaaatggcattttaagaggagtctcttctcaacttacctgagagtcgaattcttctcttccctaaccaatgaagctaagtggttatcccagaaacttgtcttctaaaagggaggactccaggccatcaataaagatgtccaggcagtgagcgtactttttacaccctgtagaattgtgggctgtagcgttactctgattttctgtctagtatcagagaatgctggtagcttaaaatttttattttaggacttgtactctgaattttcaggaaccgtcaaaggagcagcagcaaattcacatattttcgacttgagaaatgcttgtggtatgtgttttccaaactgccccctatatgtaaagttcagtttaaccactgattgccttgttattactaggttttttgagattaaaaaaaaaaaatccctggtttaaaaccaacaatgatgcctagtgagtatgtgtccacaggccataacagggtagaagagagacatcgtgcaacccaatgagtagtgaagggactgtgttgcttgtgaagcggtgtagtagcatttttgcagattcttggctgggtttagtgtactgatctagaaaagctgtttttctgctcctttgtggaaggcagttatgatcaggctgcatggacaaagcaggtagaggggcaccatcaggggctcttgcactattttcacctctaaatattacgtactcagtagtgccctgcttctagggctctgaatacgggcttaaagtcatcttgtcctgctggaatttgctgtgcagagccataagcctcccattttgttagcgtcagctaggccaataggaacagaccgggaccttgtctcacactgatgatacctcacatgttgaccggctatgtgaactgcctatttcctatgctggagttttgatttttaactaaacgcaaatctgtagattctctcctctcccatcccagaaaacaaaacaaaataatgcttttcgaaattgtttctaggactttaaaacataatggtatatccaaaattctttatttcagaatgcaacaatagattccattaatatagactcaagatcaaaacagcatacctgctaagctaagatagatggtgttgattccactgggttttgatcaatacaataacaaacctttttcctttgacatactctgaattttgttgtttggggggagggggtgtgtgtgtgtgtgtgtgtgtgtgtgtgtatgtgtgtgtgtgtgtgtgcacgcgcagtgtccatcagtatcagtgcctgcctgagttaggaaaattacattcctggttctgtattgaggagaaggatgtataaagcaacatgaaacattagccctccttttattttaaagactaatgttaattgttcttaaaactggattttttttccttaaagcaatttttttcttttcgatttaatgaagtattgctagctgaagccagtttgacatagagagatgtcagattgatttgaaaggtgtgcagcctgatttaaaaccaaaccctgaacccttttaaagaacaataaaacatattttacacgc

SEQ ID NO: 297535 - DNA, 3710 bp, Homo sapiens
agcggggcggggcgggagctggttccggctgcgcgcgcagcggtggtggtggcggcgcgatcggccgggctgtaaccgtcgtctgtccgggagcggctggagcggcagcggcggccgggcacggcgcgaggtgacgccacagggcagcggcggcagcggaggccgccgccaccgctaccgccgccgccgccgccgccgaggtgactgaggagagaggcgcctcctcgctcccgccaccgccggacttcaatgcccagtccccagctcgccagcgtttttcgttggaatatacgttgcacatttatggcgattctgagtgtgagggcagacttctgccaggctcagcacagcattttcgctgacaagtgagcttggaggttctatgtgccataattaacattgccttgaagactcctggacaccgagactggcctcagaaatagttggctttttttttttttaattgcaagcatatttcttttaatgactccagtaaaattaagcatcaagtaaacaagtggaaagtgacctacacttttaacttgtctcactagtgcctaaatgtagtaaaggctgcttaagttttgtatgtagttggattttttggagtccgaaggtatccatctgcagaaattgaggcccaaattgaatttggattcaagtggattctaaatactttgcttatcttgaagagagaagcttcataaggaataaacaagttgaatagagaaaacactgattgataataggcattttagtggtctttttaatgttttctgctgtgaaacatttcaagatttattgatttttttttttcactttccccatcacactcacacgcacgctcacactttttatttgccataatgaaccgtccagcccctgtggagatctcctatgagaacatgcgttttctgataactcacaaccctaccaatgctactctcaacaagttcacagaggaacttaagaagtatggagtgacgactttggttcgagtttgtgatgctacatatgataaagctccagttgaaaaagaaggaatccacgttctagattggccatttgatgatggagctccaccccctaatcagatagtagatgattggttaaacctgttaaaaaccaaatttcgtgaagagccaggttgctgtgttgcagtgcattgtgttgcaggattgggaagggcacctgtgctggttgcacttgctttgattgaatgtggaatgaagtacgaagatgcagttcagtttataagacaaaaaagaaggggagcgttcaattccaaacagctgctttatttggagaaataccgacctaagatgcgattacgcttcagagataccaatgggcattgctgtgttcagtagaaggaaatgtaaacgaaggctgacttgattgtgccatttagagggaactcttggtacctggaaatgtgaatctggaatattacctgtgtcatcaaagtagtgatggattcagtactcctcaaccactctcctaatgattggaacaaaagcaaacaaaaaagaaatctctctataaaatgaataaaatgtttaagaaaagagaaagagaaaaggaattaattcagtgaaggatgattttgctcctagttttggagtttgaatttctgccaggattgaattattttgaaatctcctgtctttttaaactttttcaaaataggtctctaaggaaaaccagcagaacattagcctgtgcaaaaccatctgtttggggagcacactcttccattatgcttggcacatagatctccctgtggtgggattttttttttccctttttttgtgggggagggttggtggtatatttttcccctcttttttccttcctctcctacatctcccttttcccccgatccaagttgtagatggaatagaagcccttgttgctgtagatgtgcgtgcagtctggcagccttaagcccacctgggcacttttagataaaaaaaaaaaaaaacaaaaaacaacaccaaaaaaacagcagtgatatatatattccaggtggtttttagtctttactgatgaaagggtgttcatgttagtttcttcaaaaccctatctaatactaggcaaagtagccaagagccttttgttttgtttttattttgataaattagtggagaaatggcattttaagaggagtctcttctcaacttacctgagagtcgaattcttctcttccctaaccaatgaagctaagtggttatcccagaaacttgtcttctaaaagggaggactccaggccatcaataaagatgtccaggcagtgagcgtactttttacaccctgtagaattgtgggctgtagcgttactctgattttctgtctagtatcagagaatgctggtagcttaaaatttttattttaggacttgtactctgaattttcaggaaccgtcaaaggagcagcagcaaattcacatattttcgacttgagaaatgcttgtggtatgtgttttccaaactgccccctatatgtaaagttcagtttaaccactgattgccttgttattactaggttttttgagattaaaaaaaaaaaatccctggtttaaaaccaacaatgatgcctagtgagtatgtgtccacaggccataacagggtagaagagagacatcgtgcaacccaatgagtagtgaagggactgtgttgcttgtgaagcggtgtagtagcatttttgcagattcttggctgggtttagtgtactgatctagaaaagctgtttttctgctcctttgtggaaggcagttatgatcaggctgcatggacaaagcaggtagaggggcaccatcaggggctcttgcactattttcacctctaaatattacgtactcagtagtgccctgcttctagggctctgaatacgggcttaaagtcatcttgtcctgctggaatttgctgtgcagagccataagcctcccattttgttagcgtcagctaggccaataggaacagaccgggaccttgtctcacactgatgatacctcacatgttgaccggctatgtgaactgcctatttcctatgctggagttttgatttttaactaaacgcaaatctgtagattctctcctctcccatcccagaaaacaaaacaaaataatgcttttcgaaattgtttctaggactttaaaacataatggtatatccaaaattctttatttcagaatgcaacaatagattccattaatatagactcaagatcaaaacagcatacctgctaagctaagatagatggtgttgattccactgggttttgatcaatacaataacaaacctttttcctttgacatactctgaattttgttgtttggggggagggggtgtgtgtgtgtgtgtgtgtgtgtgtgtgtatgtgtgtgtgtgtgtgtgcacgcgcagtgtccatcagtatcagtgcctgcctgagttaggaaaattacattcctggttctgtattgaggagaaggatgtataaagcaacatgaaacattagccctccttttattttaaagactaatgttaattgttcttaaaactggattttttttccttaaagcaatttttttcttttcgatttaatgaagtattgctagctgaagccagtttgacatagagagatgtcagattgatttgaaaggtgtgcagcctgatttaaaaccaaaccctgaacccttttaaagaacaataaaacatattttacacgc

SEQ ID NO: 297536 - DNA, 3808 bp, Homo sapiens
agcggggcggggcgggagctggttccggctgcgcgcgcagcggtggtggtggcggcgcgatcggccgggctgtaaccgtcgtctgtccgggagcggctggagcggcagcggcggccgggcacggcgcgaggtgacgccacagggcagcggcggcagcggaggcagcggcggcagcaggagacgcagcggcggccgcagcagcagcagcaagacggactcgtggagacgcgccgccgccgccgccgccgggccgggccgggtgtcgcgcgccgaggctgggggggagtcgtcgccgcaggtgactgaggagagaggcgcctcctcgctcccgccaccgccggacttcaatgcccagtccccagctcgccagcgtttttcgttggaatatacgttgcacatttatggcgattctgagtgtgagggcagacttctgccaggctcagcacagcattttcgctgacaagtgagcttggaggttctatgtgccataattaacattgccttgaagactcctggacaccgagactggcctcagaaatagttggctttttttttttttaattgcaagcatatttcttttaatgactccagtaaaattaagcatcaagtaaacaagtggaaagtgacctacacttttaacttgtctcactagtgcctaaatgtagtaaaggctgcttaagttttgtatgtagttggattttttggagtccgaaggtatccatctgcagaaattgaggcccaaattgaatttggattcaagtggattctaaatactttgcttatcttgaagagagaagcttcataaggaataaacaagttgaatagagaaaacactgattgataataggcattttagtggtctttttaatgttttctgctgtgaaacatttcaagatttattgatttttttttttcactttccccatcacactcacacgcacgctcacactttttatttgccataatgaaccgtccagcccctgtggagatctcctatgagaacatgcgttttctgataactcacaaccctaccaatgctactctcaacaagttcacagaggaacttaagaagtatggagtgacgactttggttcgagtttgtgatgctacatatgataaagctccagttgaaaaagaaggaatccacgttctagattggccatttgatgatggagctccaccccctaatcagatagtagatgattggttaaacctgttaaaaaccaaatttcgtgaagagccaggttgctgtgttgcagtgcattgtgttgcaggattgggaagggcacctgtgctggttgcacttgctttgattgaatgtggaatgaagtacgaagatgcagttcagtttataagacaaaaaagaaggggagcgttcaattccaaacagctgctttatttggagaaataccgacctaagatgcgattacgcttcagagataccaatgggcattgctgtgttcagtagaaggaaatgtaaacgaaggctgacttgattgtgccatttagagggaactcttggtacctggaaatgtgaatctggaatattacctgtgtcatcaaagtagtgatggattcagtactcctcaaccactctcctaatgattggaacaaaagcaaacaaaaaagaaatctctctataaaatgaataaaatgtttaagaaaagagaaagagaaaaggaattaattcagtgaaggatgattttgctcctagttttggagtttgaatttctgccaggattgaattattttgaaatctcctgtctttttaaactttttcaaaataggtctctaaggaaaaccagcagaacattagcctgtgcaaaaccatctgtttggggagcacactcttccattatgcttggcacatagatctccctgtggtgggattttttttttccctttttttgtgggggagggttggtggtatatttttcccctcttttttccttcctctcctacatctcccttttcccccgatccaagttgtagatggaatagaagcccttgttgctgtagatgtgcgtgcagtctggcagccttaagcccacctgggcacttttagataaaaaaaaaaaaaaacaaaaaacaacaccaaaaaaacagcagtgatatatatattccaggtggtttttagtctttactgatgaaagggtgttcatgttagtttcttcaaaaccctatctaatactaggcaaagtagccaagagccttttgttttgtttttattttgataaattagtggagaaatggcattttaagaggagtctcttctcaacttacctgagagtcgaattcttctcttccctaaccaatgaagctaagtggttatcccagaaacttgtcttctaaaagggaggactccaggccatcaataaagatgtccaggcagtgagcgtactttttacaccctgtagaattgtgggctgtagcgttactctgattttctgtctagtatcagagaatgctggtagcttaaaatttttattttaggacttgtactctgaattttcaggaaccgtcaaaggagcagcagcaaattcacatattttcgacttgagaaatgcttgtggtatgtgttttccaaactgccccctatatgtaaagttcagtttaaccactgattgccttgttattactaggttttttgagattaaaaaaaaaaaatccctggtttaaaaccaacaatgatgcctagtgagtatgtgtccacaggccataacagggtagaagagagacatcgtgcaacccaatgagtagtgaagggactgtgttgcttgtgaagcggtgtagtagcatttttgcagattcttggctgggtttagtgtactgatctagaaaagctgtttttctgctcctttgtggaaggcagttatgatcaggctgcatggacaaagcaggtagaggggcaccatcaggggctcttgcactattttcacctctaaatattacgtactcagtagtgccctgcttctagggctctgaatacgggcttaaagtcatcttgtcctgctggaatttgctgtgcagagccataagcctcccattttgttagcgtcagctaggccaataggaacagaccgggaccttgtctcacactgatgatacctcacatgttgaccggctatgtgaactgcctatttcctatgctggagttttgatttttaactaaacgcaaatctgtagattctctcctctcccatcccagaaaacaaaacaaaataatgcttttcgaaattgtttctaggactttaaaacataatggtatatccaaaattctttatttcagaatgcaacaatagattccattaatatagactcaagatcaaaacagcatacctgctaagctaagatagatggtgttgattccactgggttttgatcaatacaataacaaacctttttcctttgacatactctgaattttgttgtttggggggagggggtgtgtgtgtgtgtgtgtgtgtgtgtgtgtatgtgtgtgtgtgtgtgtgcacgcgcagtgtccatcagtatcagtgcctgcctgagttaggaaaattacattcctggttctgtattgaggagaaggatgtataaagcaacatgaaacattagccctccttttattttaaagactaatgttaattgttcttaaaactggattttttttccttaaagcaatttttttcttttcgatttaatgaagtattgctagctgaagccagtttgacatagagagatgtcagattgatttgaaaggtgtgcagcctgatttaaaaccaaaccctgaacccttttaaagaacaataaaacatattttacacgc

SEQ ID NO: 297537 - DNA, 3628 bp, Homo sapiens
agcggggcggggcgggagctggttccggctgcgcgcgcagcggtggtggtggcggcgcgatcggccgggctgtaaccgtcgtctgtccgggagcggctggagcggcagcggcggccgggcacggcgcgaggtgagcgcctcctcgctcccgccaccgccggacttcaatgcccagtccccagctcgccagcgtttttcgttggaatatacgttgcacatttatggcgattctgagtgtgagggcagacttctgccaggctcagcacagcattttcgctgacaagtgagcttggaggttctatgtgccataattaacattgccttgaagactcctggacaccgagactggcctcagaaatagttggctttttttttttttaattgcaagcatatttcttttaatgactccagtaaaattaagcatcaagtaaacaagtggaaagtgacctacacttttaacttgtctcactagtgcctaaatgtagtaaaggctgcttaagttttgtatgtagttggattttttggagtccgaaggtatccatctgcagaaattgaggcccaaattgaatttggattcaagtggattctaaatactttgcttatcttgaagagagaagcttcataaggaataaacaagttgaatagagaaaacactgattgataataggcattttagtggtctttttaatgttttctgctgtgaaacatttcaagatttattgatttttttttttcactttccccatcacactcacacgcacgctcacactttttatttgccataatgaaccgtccagcccctgtggagatctcctatgagaacatgcgttttctgataactcacaaccctaccaatgctactctcaacaagttcacagaggaacttaagaagtatggagtgacgactttggttcgagtttgtgatgctacatatgataaagctccagttgaaaaagaaggaatccacgttctagattggccatttgatgatggagctccaccccctaatcagatagtagatgattggttaaacctgttaaaaaccaaatttcgtgaagagccaggttgctgtgttgcagtgcattgtgttgcaggattgggaagggcacctgtgctggttgcacttgctttgattgaatgtggaatgaagtacgaagatgcagttcagtttataagacaaaaaagaaggggagcgttcaattccaaacagctgctttatttggagaaataccgacctaagatgcgattacgcttcagagataccaatgggcattgctgtgttcagtagaaggaaatgtaaacgaaggctgacttgattgtgccatttagagggaactcttggtacctggaaatgtgaatctggaatattacctgtgtcatcaaagtagtgatggattcagtactcctcaaccactctcctaatgattggaacaaaagcaaacaaaaaagaaatctctctataaaatgaataaaatgtttaagaaaagagaaagagaaaaggaattaattcagtgaaggatgattttgctcctagttttggagtttgaatttctgccaggattgaattattttgaaatctcctgtctttttaaactttttcaaaataggtctctaaggaaaaccagcagaacattagcctgtgcaaaaccatctgtttggggagcacactcttccattatgcttggcacatagatctccctgtggtgggattttttttttccctttttttgtgggggagggttggtggtatatttttcccctcttttttccttcctctcctacatctcccttttcccccgatccaagttgtagatggaatagaagcccttgttgctgtagatgtgcgtgcagtctggcagccttaagcccacctgggcacttttagataaaaaaaaaaaaaaacaaaaaacaacaccaaaaaaacagcagtgatatatatattccaggtggtttttagtctttactgatgaaagggtgttcatgttagtttcttcaaaaccctatctaatactaggcaaagtagccaagagccttttgttttgtttttattttgataaattagtggagaaatggcattttaagaggagtctcttctcaacttacctgagagtcgaattcttctcttccctaaccaatgaagctaagtggttatcccagaaacttgtcttctaaaagggaggactccaggccatcaataaagatgtccaggcagtgagcgtactttttacaccctgtagaattgtgggctgtagcgttactctgattttctgtctagtatcagagaatgctggtagcttaaaatttttattttaggacttgtactctgaattttcaggaaccgtcaaaggagcagcagcaaattcacatattttcgacttgagaaatgcttgtggtatgtgttttccaaactgccccctatatgtaaagttcagtttaaccactgattgccttgttattactaggttttttgagattaaaaaaaaaaaatccctggtttaaaaccaacaatgatgcctagtgagtatgtgtccacaggccataacagggtagaagagagacatcgtgcaacccaatgagtagtgaagggactgtgttgcttgtgaagcggtgtagtagcatttttgcagattcttggctgggtttagtgtactgatctagaaaagctgtttttctgctcctttgtggaaggcagttatgatcaggctgcatggacaaagcaggtagaggggcaccatcaggggctcttgcactattttcacctctaaatattacgtactcagtagtgccctgcttctagggctctgaatacgggcttaaagtcatcttgtcctgctggaatttgctgtgcagagccataagcctcccattttgttagcgtcagctaggccaataggaacagaccgggaccttgtctcacactgatgatacctcacatgttgaccggctatgtgaactgcctatttcctatgctggagttttgatttttaactaaacgcaaatctgtagattctctcctctcccatcccagaaaacaaaacaaaataatgcttttcgaaattgtttctaggactttaaaacataatggtatatccaaaattctttatttcagaatgcaacaatagattccattaatatagactcaagatcaaaacagcatacctgctaagctaagatagatggtgttgattccactgggttttgatcaatacaataacaaacctttttcctttgacatactctgaattttgttgtttggggggagggggtgtgtgtgtgtgtgtgtgtgtgtgtgtgtatgtgtgtgtgtgtgtgtgcacgcgcagtgtccatcagtatcagtgcctgcctgagttaggaaaattacattcctggttctgtattgaggagaaggatgtataaagcaacatgaaacattagccctccttttattttaaagactaatgttaattgttcttaaaactggattttttttccttaaagcaatttttttcttttcgatttaatgaagtattgctagctgaagccagtttgacatagagagatgtcagattgatttgaaaggtgtgcagcctgatttaaaaccaaaccctgaacccttttaaagaacaataaaacatattttacacgc

SEQ ID NO: 297538 - DNA, 4053 bp, Homo sapiens
agcggggcggggcgggagctggttccggctgcgcgcgcagcggtggtggtggcggcgcgatcggccgggctgtaaccgtcgtctgtccgggagcggctggagcggcagcggcggccgggcacggcgcgaggtgacgccacagggcagcggcggcagcggaggcagcggcggcagcaggagacgcagcggcggccgcagcagcagcagcaagacggactcgtggagacgcgccgccgccgccgccgccgggccgggccgggtgtcgcgcgccgaggctgggggggagtcgtcgccgccgccgccaccgctaccgccgccgccgccgccgccgaggtgactgaggagagaggcgcctcctcgctcccgccaccgccggacttcaatgcccagtccccagctcgccagcgagcttgatcctggatagtgtttgtatgatgtgcacacgtctctgcaaatgcttgtttgaagattggctgtgctgcattttggtataattgggaggtgacatattgtcccttatctcagtaaacatttggaggaagaggacgagaaagattgaattttgcattctttaattgggaagaaaaggaaggtgaatccatgttgagctgagctagtttttcgttggaatatacgttgcacatttatggcgattctgagtgtgagggcagacttctgccaggctcagcacagcattttcgctgacaagtgagcttggaggttctatgtgccataattaacattgccttgaagactcctggacaccgagactggcctcagaaatagttggctttttttttttttaattgcaagcatatttcttttaatgactccagtaaaattaagcatcaagtaaacaagtggaaagtgacctacacttttaacttgtctcactagtgcctaaatgtagtaaaggctgcttaagttttgtatgtagttggattttttggagtccgaaggtatccatctgcagaaattgaggcccaaattgaatttggattcaagtggattctaaatactttgcttatcttgaagagagaagcttcataaggaataaacaagttgaatagagaaaacactgattgataataggcattttagtggtctttttaatgttttctgctgtgaaacatttcaagatttattgatttttttttttcactttccccatcacactcacacgcacgctcacactttttatttgccataatgaaccgtccagcccctgtggagatctcctatgagaacatgcgttttctgataactcacaaccctaccaatgctactctcaacaagttcacagaggaacttaagaagtatggagtgacgactttggttcgagtttgtgatgctacatatgataaagctccagttgaaaaagaaggaatccacgttctagattggccatttgatgatggagctccaccccctaatcagatagtagatgattggttaaacctgttaaaaaccaaatttcgtgaagagccaggttgctgtgttgcagtgcattgtgttgcaggattgggaagggcacctgtgctggttgcacttgctttgattgaatgtggaatgaagtacgaagatgcagttcagtttataagacaaaaaagaaggggagcgttcaattccaaacagctgctttatttggagaaataccgacctaagatgcgattacgcttcagagataccaatgggcattgctgtgttcagtagaaggaaatgtaaacgaaggctgacttgattgtgccatttagagggaactcttggtacctggaaatgtgaatctggaatattacctgtgtcatcaaagtagtgatggattcagtactcctcaaccactctcctaatgattggaacaaaagcaaacaaaaaagaaatctctctataaaatgaataaaatgtttaagaaaagagaaagagaaaaggaattaattcagtgaaggatgattttgctcctagttttggagtttgaatttctgccaggattgaattattttgaaatctcctgtctttttaaactttttcaaaataggtctctaaggaaaaccagcagaacattagcctgtgcaaaaccatctgtttggggagcacactcttccattatgcttggcacatagatctccctgtggtgggattttttttttccctttttttgtgggggagggttggtggtatatttttcccctcttttttccttcctctcctacatctcccttttcccccgatccaagttgtagatggaatagaagcccttgttgctgtagatgtgcgtgcagtctggcagccttaagcccacctgggcacttttagataaaaaaaaaaaaaaacaaaaaacaacaccaaaaaaacagcagtgatatatatattccaggtggtttttagtctttactgatgaaagggtgttcatgttagtttcttcaaaaccctatctaatactaggcaaagtagccaagagccttttgttttgtttttattttgataaattagtggagaaatggcattttaagaggagtctcttctcaacttacctgagagtcgaattcttctcttccctaaccaatgaagctaagtggttatcccagaaacttgtcttctaaaagggaggactccaggccatcaataaagatgtccaggcagtgagcgtactttttacaccctgtagaattgtgggctgtagcgttactctgattttctgtctagtatcagagaatgctggtagcttaaaatttttattttaggacttgtactctgaattttcaggaaccgtcaaaggagcagcagcaaattcacatattttcgacttgagaaatgcttgtggtatgtgttttccaaactgccccctatatgtaaagttcagtttaaccactgattgccttgttattactaggttttttgagattaaaaaaaaaaaatccctggtttaaaaccaacaatgatgcctagtgagtatgtgtccacaggccataacagggtagaagagagacatcgtgcaacccaatgagtagtgaagggactgtgttgcttgtgaagcggtgtagtagcatttttgcagattcttggctgggtttagtgtactgatctagaaaagctgtttttctgctcctttgtggaaggcagttatgatcaggctgcatggacaaagcaggtagaggggcaccatcaggggctcttgcactattttcacctctaaatattacgtactcagtagtgccctgcttctagggctctgaatacgggcttaaagtcatcttgtcctgctggaatttgctgtgcagagccataagcctcccattttgttagcgtcagctaggccaataggaacagaccgggaccttgtctcacactgatgatacctcacatgttgaccggctatgtgaactgcctatttcctatgctggagttttgatttttaactaaacgcaaatctgtagattctctcctctcccatcccagaaaacaaaacaaaataatgcttttcgaaattgtttctaggactttaaaacataatggtatatccaaaattctttatttcagaatgcaacaatagattccattaatatagactcaagatcaaaacagcatacctgctaagctaagatagatggtgttgattccactgggttttgatcaatacaataacaaacctttttcctttgacatactctgaattttgttgtttggggggagggggtgtgtgtgtgtgtgtgtgtgtgtgtgtgtatgtgtgtgtgtgtgtgtgcacgcgcagtgtccatcagtatcagtgcctgcctgagttaggaaaattacattcctggttctgtattgaggagaaggatgtataaagcaacatgaaacattagccctccttttattttaaagactaatgttaattgttcttaaaactggattttttttccttaaagcaatttttttcttttcgatttaatgaagtattgctagctgaagccagtttgacatagagagatgtcagattgatttgaaaggtgtgcagcctgatttaaaaccaaaccctgaacccttttaaagaacaataaaacatattttacacgc

SEQ ID NO: 297539 - DNA, 3790 bp, Homo sapiens
agcggggcggggcgggagctggttccggctgcgcgcgcagcggtggtggtggcggcgcgatcggccgggctgtaaccgtcgtctgtccgggagcggctggagcggcagcggcggccgggcacggcgcgaggtgacgccacagggcagcggcggcagcggaggcagcggcggcagcaggagacgcagcggcggccgcagcagcagcagcaagacggactcgtggagacgcgccgccgccgccgccgccgggccgggccgggtgtcgcgcgccgaggctgggggggagtcgtcgccgccgccgccaccgctaccgccgccgccgccgccgccgaggtgactgaggagagaggcgcctcctcgctcccgccaccgccggacttcaatgcccagtccccagctcgccagcgtttttcgttggaatatacgttgcacatttatggcgattctgagtgtgagggcagacttctgccaggctcagcacagcattttcgctgacaagtgagcttggaggttctatgtgccataattaacattgccttgaagactcctggacaccgagactggcctcagaaatagttggctttttttttttttaattgcaagcatatttcttttaatgactccagtaaaattaagcatcaagtaaacaagtggaaagtgacctacacttttaacttgtctcactagtgcctaaatgtagtaaaggctgcttaagttttgtatgtagttggattttttggagtccgaaggtatccatctgcagaaattgaggcccaaattgaatttggattcaagtggattctaaatactttgcttatcttgaagagagaagcttcataaggaataaacaagttgaatagagaaaacactgattgataataggcattttagtggtctttttaatgttttctgctgtgaaacatttcaagatttattgatttttttttttcactttccccatcacactcacacgcacgctcacactttttatttgccataatgaaccgtccagcccctgtggagatctcctatgagaacatgcgttttctgataactcacaaccctaccaatgctactctcaacaagttcacagaggaacttaagaagtatggagtgacgactttggttcgagtttgtgatgctacatatgataaagctccagttgaaaaagaaggaatccacgttctagattggccatttgatgatggagctccaccccctaatcagatagtagatgattggttaaacctgttaaaaaccaaatttcgtgaagagccaggttgctgtgttgcagtgcattgtgttgcaggattgggaagggcacctgtgctggttgcacttgctttgattgaatgtggaatgaagtacgaagatgcagttcagtttataagacaaaaaagaaggggagcgttcaattccaaacagctgctttatttggagaaataccgacctaagatgcgattacgcttcagagataccaatgggcattgctgtgttcagtagaaggaaatgtaaacgaaggctgacttgattgtgccatttagagggaactcttggtacctggaaatgtgaatctggaatattacctgtgtcatcaaagtagtgatggattcagtactcctcaaccactctcctaatgattggaacaaaagcaaacaaaaaagaaatctctctataaaatgaataaaatgtttaagaaaagagaaagagaaaaggaattaattcagtgaaggatgattttgctcctagttttggagtttgaatttctgccaggattgaattattttgaaatctcctgtctttttaaactttttcaaaataggtctctaaggaaaaccagcagaacattagcctgtgcaaaaccatctgtttggggagcacactcttccattatgcttggcacatagatctccctgtggtgggattttttttttccctttttttgtgggggagggttggtggtatatttttcccctcttttttccttcctctcctacatctcccttttcccccgatccaagttgtagatggaatagaagcccttgttgctgtagatgtgcgtgcagtctggcagccttaagcccacctgggcacttttagataaaaaaaaaaaaaaacaaaaaacaacaccaaaaaaacagcagtgatatatatattccaggtggtttttagtctttactgatgaaagggtgttcatgttagtttcttcaaaaccctatctaatactaggcaaagtagccaagagccttttgttttgtttttattttgataaattagtggagaaatggcattttaagaggagtctcttctcaacttacctgagagtcgaattcttctcttccctaaccaatgaagctaagtggttatcccagaaacttgtctttttttacaccctgtagaattgtgggctgtagcgttactctgattttctgtctagtatcagagaatgctggtagcttaaaatttttattttaggacttgtactctgaattttcaggaaccgtcaaaggagcagcagcaaattcacatattttcgacttgagaaatgcttgtggtatgtgttttccaaactgccccctatatgtaaagttcagtttaaccactgattgccttgttattactaggttttttgagattaaaaaaaaaaaatccctggtttaaaaccaacaatgatgcctagtgagtatgtgtccacaggccataacagggtagaagagagacatcgtgcaacccaatgagtagtgaagggactgtgttgcttgtgaagcggtgtagtagcatttttgcagattcttggctgggtttagtgtactgatctagaaaagctgtttttctgctcctttgtggaaggcagttatgatcaggctgcatggacaaagcaggtagaggggcaccatcaggggctcttgcactattttcacctctaaatattacgtactcagtagtgccctgcttctagggctctgaatacgggcttaaagtcatcttgtcctgctggaatttgctgtgcagagccataagcctcccattttgttagcgtcagctaggccaataggaacagaccgggaccttgtctcacactgatgatacctcacatgttgaccggctatgtgaactgcctatttcctatgctggagttttgatttttaactaaacgcaaatctgtagattctctcctctcccatcccagaaaacaaaacaaaataatgcttttcgaaattgtttctaggactttaaaacataatggtatatccaaaattctttatttcagaatgcaacaatagattccattaatatagactcaagatcaaaacagcatacctgctaagctaagatagatggtgttgattccactgggttttgatcaatacaataacaaacctttttcctttgacatactctgaattttgttgtttggggggagggggtgtgtgtgtgtgtgtgtgtgtgtgtgtgtatgtgtgtgtgtgtgtgtgcacgcgcagtgtccatcagtatcagtgcctgcctgagttaggaaaattacattcctggttctgtattgaggagaaggatgtataaagcaacatgaaacattagccctccttttattttaaagactaatgttaattgttcttaaaactggattttttttccttaaagcaatttttttcttttcgatttaatgaagtattgctagctgaagccagtttgacatagagagatgtcagattgatttgaaaggtgtgcagcctgatttaaaaccaaaccctgaacccttttaaagaacaataaaacatattttacacgc

SEQ ID NO: 297540 - DNA, 4020 bp, Homo sapiens
agcggggcggggcgggagctggttccggctgcgcgcgcagcggtggtggtggcggcgcgatcggccgggctgtaaccgtcgtctgtccgggagcggctggagcggcagcggcggccgggcacggcgcgaggtgacgccacagggcagcggcggcagcggaggcagcggcggcagcaggagacgcagcggcggccgcagcagcagcagcaagacggactcgtggagacgcgccgccgccgccgccgccgggccgggccgggtgtcgcgcgccgaggctgggggggagtcgtcgccgccgccgccaccgctaccgccgccgccgccgccgccgaggtgactgaggagagaggcgcctcctcgctcccgccaccgccggacttcaatgcccagtccccagctcgccagcgtttttcgttggaatatacgttgcacatttatggcgattctgagtgtgagggcagacttctgccaggctcagcacagcattttcgctgacaagtgagcttggaggttctatgtgccataattaacattgccttgaagactcctggacaccgagactggcctcagaaatagttggctttttttttttttaattgcaagcatatttcttttaatgactccagtaaaattaagcatcaagtaaacaagtggaaagtgacctacacttttaacttgtctcactagtgcctaaatgtagtaaaggctgcttaagttttgtatgtagttggattttttggagtccgaaggtatccatctgcagaaattgaggcccaaattgaatttggattcaagtggattctaaatactttgcttatcttgaagagagaagcttcataaggaataaacaagttgaatagagaaaacactgattgataataggcattttagtggtctttttaatgttttctgctgtgaaacatttcaagatttattgatttttttttttcactttccccatcacactcacacgcacgctcacactttttatttgccataatgaaccgtccagcccctgtggagatctcctatgagaacatgcgttttctgataactcacaaccctaccaatgctactctcaacaagttcacagaggaacttaagaagtatggagtgacgactttggttcgagtttgtgatgctacatatgataaagctccagttgaaaaagaaggaatccacgttctagattggccatttgatgatggagctccaccccctaatcagatagtagatgattggttaaacctgttaaaaaccaaatttcgtgaagagccaggttgctgtgttgcagtgcattgtgttgcaggattgggaagggcacctgtgctggttgcacttgctttgattgaatgtggaatgaagtacgaagatgcagttcagtttataagacaaaaaagaaggggagcgttcaattccaaacagctgctttatttggagaaataccgacctaagatgcgattacgcttcagagataccaatgggcattgctgtgttcagtagaaggaaatgtaaacgaaggctgacttgattgtgccatttagagggaactcttggtacctggaaatgtgaatctggaatattacctgtgtcatcaaagtagtgatggattcagtactcctcaaccactctcctaatgattggaacaaaagcaaacaaaaaagaaatctctctataaaatgaataaaatgtttaagaaaagagaaagagaaaaggaattaattcagtgaaggatgattttgctcctagttttggagtttgaatttctgccaggattgaattattttgaaatctcctgtctttttaaactttttcaaaataggtctctaaggaaaaccagcagaacattagcctgtgcaaaaccatctgtttggggagcacactcttccattatgcttggcacatagatctccctgtggtgggattttttttttccctttttttgtgggggagggttggtggtatatttttcccctcttttttccttcctctcctacatctcccttttcccccgatccaagttgtagatggaatagaagcccttgttgctgtagatgtgcgtgcagtctggcagccttaagcccacctgggcacttttagataaaaaaaaaaaaaaacaaaaaacaacaccaaaaaaacagcagtgatatatatattccaggtggtttttagtctttactgatgaaagggtgttcatgttagtttcttcaaaaccctatctaatactaggcaaagtagccaagagccttttgttttgtttttattttgataaattagtggagaaatggcattttaagaggagtctcttctcaacttacctgagagtcgaattcttctcttccctaaccaatgaagctaagtggttatcccagaaacttgtcttctaaaagggaggactccaggccatcaataaagatgtccaggcagtgagcgtactttttacaccctgtagaattgtgggctgtagcgttactctgattttctgtctagtatcagagaatgctggtagcttaaaatttttattttaggacttgtactctgaattttcaggaaccgtcaaaggagcagcagcaaattcacatattttcgacttgagaaatgcttgtggtatgtgttttccaaactgccccctatatgtaaagttcagtttaaccactgattgccttgttattactaggttttttgagattaaaaaaaaaaaatccctggtttaaaaccaacaatgatgcctagtgagtatgtgtccacaggccataacagggtagaagagagacatcgtgcaacccaatgagtagtgaagggactgtgttgcttgtgaagcggtgtagtagcatttttgcagattcttggctgggtttagtgtactgatctagaaaagctgtttttctgctcctttgtggaaggcagttatgatcaggctgcatggacaaagcaggtagaggggcaccatcaggggctcttgcactattttcacctctaaatattacgtactcagtagtgccctgcttctagggctctgaatacgggcttaaagtcatcttgtcctgctggaatttgctgtgcagagccataagcctcccattttgttagcgtcagctaggccaataggaacagaccgggaccttgtctcacactgatgatacctcacatgttgaccggctatgtgaactgcctatttcctatgctggagttttgatttttaactaaacgcaaatctgtagattctctcctctcccatcccagaaaacaaaacaaaataatgcttttcgaaattgtttctaggactttaaaacataatggtatatccaaaattctttatttcagaatgcaacaatagattccattaatatagactcaagatcaaaacagcatacctgctaagctaagatagatggtgttgattccactgggttttgatcaatacaataacaaacctttttcctttgacatactctgaattttgttgtttggggggagggggtgtgtgtgtgtgtgtgtgtgtgtgtgtgtatgtgtgtgtgtgtgtgtgcacgcgcagtgtccatcagtatcagtgcctgcctgagttaggaaaattacattcctggttctgtattgaggagaaggatgtataaagcaacatgaaacattagccctccttttattttaaagactaatgttaattgttcttaaaactggattttttttccttaaagcaatttttttcttttcgatttaatgaagtattgctcagcagccctgagccatcgagatattgtccaagttgtcataagcatctattgatgttcgccgagcctgattatcttcttctgtaataaaaagattgttccatgattcattcacagatttgttgttatggttctgaactgaacgccaatacggtttcacccgtggtagctgtttaaccttgctgaaataattgactgcacgagtgctgactccaccgtggagacagcaccatcagccaatcacttaaccacagaggcttgaattctaagtagaacagtattgctgagcgct

SEQ ID NO: 297541 - DNA, 3788 bp, Homo sapiens
agcggggcggggcgggagctggttccggctgcgcgcgcagcggtggtggtggcggcgcgatcggccgggctgtaaccgtcgtctgtccgggagcggctggagcggcagcggcggccgggcacggcgcgaggtgacgccacagggcagcggcggcagcggaggcagcggcggcagcaggagacgcagcggcggccgcagcagcagcagcaagacggactcgtggagacgcgccgccgccgccgccgccgggccgggccgggtgtcgcgcgccgaggctgggggggagtcgtcgccgccgccgccaccgctaccgccgccgccgccgccgccgaggtgactgaggagagaggcgcctcctcgctcccgccaccgccggacttcaatgcccagtccccagctcgccagcgtttttcgttggaatatacgttgcacatttatggcgattctgagtgtgagggcagacttctgccaggctcagcacagcattttcgctgacaagtgagcttggaggttctatgtgccataattaacattgccttgaagactcctggacaccgagactggcctcagaaatagttggctttttttttttttaattgcaagcatatttcttttaatgactccagtaaaattaagcatcaagtaaacaagtggaaagtgacctacacttttaacttgtctcactagtgcctaaatgtagtaaaggctgcttaagttttgtatgtagttggattttttggagtccgaaggtatccatctgcagaaattgaggcccaaattgaatttggattcaagtggattctaaatactttgcttatcttgaagagagaagcttcataaggaataaacaagttgaatagagaaaacactgattgataataggcattttagtggtctttttaatgttttctgctgtgaaacatttcaagatttattgatttttttttttcactttccccatcacactcacacgcacgctcacactttttatttgccataatgaaccgtccagcccctgtggagatctcctatgagaacatgcgttttctgataactcacaaccctaccaatgctactctcaacaagttcacagaggaacttaagaagtatggagtgacgactttggttcgagtttgtgatgctacatatgataaagctccagttgaaaaagaaggaatccacgttctagattggccatttgatgatggagctccaccccctaatcagatagtagatgattggttaaacctgttaaaaaccaaatttcgtgaagagccaggttgctgtgttgcagtgcattgtgttgcaggattgggaagggcacctgtgctggttgcacttgctttgattgaatgtggaatgaagtacgaagatgcagttcagtttataagacaaaaaagaaggggagcgttcaattccaaacagctgctttatttggagaaataccgacctaagatgcgattacgcttcagagataccaatgggcattgctgtgttcagtagaaggaaatgtaaacgaaggctgacttgattgtgccatttagagggaactcttggtacctggaaatgtgaatctggaatattacctgtgtcatcaaagtagtgatggattcagtactcctcaaccactctcctaatgattggaacaaaagcaaacaaaaaagaaatctctctataaaatgaataaaatgtttaagaaaagagaaagagaaaaggaattaattcagtgaaggatgattttgctcctagttttggagtttgaatttctgccaggattgaattattttgaaatctcctgtctttttaaactttttcaaaataggtctctaaggaaaaccagcagaacattagcctgtgcaaaaccatctgtttggggagcacactcttccattatgcttggcacatagatctccctgtggtgggattttttttttccctttttttgtgggggagggttggtggtatatttttcccctcttttttccttcctctcctacatctcccttttcccccgatccaagttgtagatggaatagaagcccttgttgctgtagatgtgcgtgcagtctggcagccttaagcccacctgggcacttttagataaaaaaaaaaaaaaacaaaaaacaacaccaaaaaaacagcagtgatatatatattccaggtggtttttagtctttactgatgaaagggtgttcatgttagtttcttcaaaaccctatctaatactaggcaaagtagccaagagccttttgttttgtttttattttgataaattagtggagaaatggcattttaagaggagtctcttctcaacttacctgagagtcgaattcttctcttccctaaccaatgaagctaagtggttatcccagaaacttgtcttctaaaagggaggactccaggccatcaataaagatgtccaggcagtgagcgtactttttacaccctgtagaattgtgggctgtagcgttactctgattttctgtctagtatcagagaatgctggtagcttaaaatttttattttaggacttgtactctgaattttcaggaaccgtcaaaggagcagcagcaaattcacatattttcgacttgagaaatgcttgtggtatgtgttttccaaactgccccctatatgtaaagttcagtttaaccactgattgccttgttattactaggttttttgagattaaaaaaaaaaaatccctggtttaaaaccaacaatgatgcctagtgagtatgtgtccacaggccataacagggtagaagagagacatcgtgcaacccaatgagtagtgaagggactgtgttgcttgtgaagcggtgtagtagcatttttgcagattcttggctgggtttagtgtactgatctagaaaagaggtagaggggcaccatcaggggctcttgcactattttcacctctaaatattacgtactcagtagtgccctgcttctagggctctgaatacgggcttaaagtcatcttgtcctgctggaatttgctgtgcagagccataagcctcccattttgttagcgtcagctaggccaataggaacagaccgggaccttgtctcacactgatgatacctcacatgttgaccggctatgtgaactgcctatttcctatgctggagttttgatttttaactaaacgcaaatctgtagattctctcctctcccatcccagaaaacaaaacaaaataatgcttttcgaaattgtttctaggactttaaaacataatggtatatccaaaattctttatttcagaatgcaacaatagattccattaatatagactcaagatcaaaacagcatacctgctaagctaagatagatggtgttgattccactgggttttgatcaatacaataacaaacctttttcctttgacatactctgaattttgttgtttggggggagggggtgtgtgtgtgtgtgtgtgtgtgtgtgtgtatgtgtgtgtgtgtgtgtgcacgcgcagtgtccatcagtatcagtgcctgcctgagttaggaaaattacattcctggttctgtattgaggagaaggatgtataaagcaacatgaaacattagccctccttttattttaaagactaatgttaattgttcttaaaactggattttttttccttaaagcaatttttttcttttcgatttaatgaagtattgctagctgaagccagtttgacatagagagatgtcagattgatttgaaaggtgtgcagcctgatttaaaaccaaaccctgaacccttttaaagaacaataaaacatattttacacgc

SEQ ID NO: 297542 - DNA, 3804 bp, Homo sapiens
agcggggcggggcgggagctggttccggctgcgcgcgcagcggtggtggtggcggcgcgatcggccgggctgtaaccgtcgtctgtccgggagcggctggagcggcagcggcggccgggcacggcgcgaggtgacgccacagggcagcggcggcagcggaggcagcggcggcagcaggagacgcagcggcggccgcagcagcagcagcaagacggactcgtggagacgcgccgccgccgccgccgccgggccgggccgggtgtcgcgcgccgaggctgggggggagtcgtcgccgccgccgccaccgctaccgccgccgccgccgccgccgaggtgactgaggagagaggcgcctcctcgctcccgccaccgccggacttcaatgcccagtccccagctcgccagcgtttttcgttggaatatacgttgcacatttatggcgattctgagtgtgagggcagacttctgccaggctcagcacagcattttcgctgacaagtgagcttggaggttctatgtgccataattaacattgccttgaagactcctggacaccgagactggcctcagaaatagttggctttttttttttttaattgcaagcatatttcttttaatgactccagtaaaattaagcatcaagtaaacaagtggaaagtgacctacacttttaacttgtctcactagtgcctaaatgtagtaaaggctgcttaagttttgtatgtagttggattttttggagtccgaaggtatccatctgcagaaattgaggcccaaattgaatttggattcaagtggattctaaatactttgcttatcttgaagagagaagcttcataaggaataaacaagttgaatagagaaaacactgattgataataggcattttagtggtctttttaatgttttctgctgtgaaacatttcaagatttattgatttttttttttcactttccccatcacactcacacgcacgctcacactttttatttgccataatgaaccgtccagcccctgtggagatctcctatgagaacatgcgttttctgataactcacaaccctaccaatgctactctcaacaagttcacagaggaacttaagaagtatggagtgacgactttggttcgagtttgtgatgctacatatgataaagctccagttgaaaaagaaggaatccacgttctagattggccatttgatgatggagctccaccccctaatcagatagtagatgattggttaaacctgttaaaaaccaaatttcgtgaagagccaggttgctgtgttgcagtgcattgtgttgcaggattgggaagggcacctgtgctggttgcacttgctttgattgaatgtggaatgaagtacgaagatgcagttcagtttataagacaaaaaagaaggggagcgttcaattccaaacagctgctttatttggagaaataccgacctaagatgcgattacgcttcagagataccaatgggcattgctgtgttcagtagaaggaaatgtaaacgaaggctgacttgattgtgccatttagagggaactcttggtacctggaaatgtgaatctggaatattacctgtgtcatcaaagtagtgatggattcagtactcctcaaccactctcctaatgattggaacaaaagcaaacaaaaaagaaatctctctataaaatgaataaaatgtttaagaaaagagaaagagaaaaggaattaattcagtgaaggatgattttgctcctagttttggagtttgaatttctgccaggattgaattattttgaaatctcctgtctttttaaactttttcaaaataggtctctaaggaaaaccagcagaacattagcctgtgcaaaaccatctgtttggggagcacactcttccattatgcttggcacatagatctccctgtggtgggattttttttttccctttttttgtgggggagggttggtggtatatttttcccctcttttttccttcctctcctacatctcccttttcccccgatccaagttgtagatggaatagaagcccttgttgctgtagatgtgcgtgcagtctggcagccttaagcccacctgggcacttttagataaaaaaaaaaaaaaacaaaaaacaacaccaaaaaaacagcagtgatatatatattccaggtggtttttagtctttactgatgaaagggtgttcatgttagtttcttcaaaaccctatctaatactaggcaaagtagccaagagccttttgttttgtttttattttgataaattagtggagaaatggcattttaagaggagtctcttctcaacttacctgagagtcgaattcttctcttccctaaccaatgaagctaagtggttatcccagaaacttgtcttctaaaagggaggactccaggccatcaataaagatgtccaggcagtgagcgtactttttacaccctgtagaattgtgggctgtagcgttactctgattttctgtctagtatcagagaatgctggtagcttaaaatttttattttaggacttgtactctgaattttcaggaaccgtcaaaggagcagcagcaaattcacatattttcgacttgagaaatgcttgtggtatgtgttttccaaactgccccctatatgtaaagttcagtttaaccactgattgccttgttattactaggttttttgagattaaaaaaaaaaaatccctggtttaaaaccaacaatgatgcctagtgagtatgtgtccacaggccataacagggtagaagagagacatcgtgcaacccaatgagtagtgaagggactgtgttgcttgtgaagcggtgtagtagcatttttgcagattcttggctgggtttagtgtactgatctagaaaagctgtttttctgctcctttgtggaaggcagttatgatcaggctgcatggacaaagcaggtagaggggcaccatcaggggctcttgcactattttcaccttctgaatacgggcttaaagtcatcttgtcctgctggaatttgctgtgcagagccataagcctcccattttgttagcgtcagctaggccaataggaacagaccgggaccttgtctcacactgatgatacctcacatgttgaccggctatgtgaactgcctatttcctatgctggagttttgatttttaactaaacgcaaatctgtagattctctcctctcccatcccagaaaacaaaacaaaataatgcttttcgaaattgtttctaggactttaaaacataatggtatatccaaaattctttatttcagaatgcaacaatagattccattaatatagactcaagatcaaaacagcatacctgctaagctaagatagatggtgttgattccactgggttttgatcaatacaataacaaacctttttcctttgacatactctgaattttgttgtttggggggagggggtgtgtgtgtgtgtgtgtgtgtgtgtgtgtatgtgtgtgtgtgtgtgtgcacgcgcagtgtccatcagtatcagtgcctgcctgagttaggaaaattacattcctggttctgtattgaggagaaggatgtataaagcaacatgaaacattagccctccttttattttaaagactaatgttaattgttcttaaaactggattttttttccttaaagcaatttttttcttttcgatttaatgaagtattgctagctgaagccagtttgacatagagagatgtcagattgatttgaaaggtgtgcagcctgatttaaaaccaaaccctgaacccttttaaagaacaataaaacatattttacacgc

SEQ ID NO: 297543 - DNA, 3768 bp, Homo sapiens
agcggggcggggcgggagctggttccggctgcgcgcgcagcggtggtggtggcggcgcgatcggccgggctgtaaccgtcgtctgtccgggagcggctggagcggcagcggcggccgggcacggcgcgaggtgacgccacagggcagcggcggcagcggaggcagcggcggcagcaggagacgcagcggcggccgcagcagcagcagcaagacggactcgtggagacgcgccgccgccgccgccgccgggccgggccgggtgtcgcgcgccgaggctgggggggagtcgtcgccgccgccgccaccgctaccgccgccgccgccgccgccgaggtgactgaggagagaggcgcctcctcgctcccgccaccgccggacttcaatgcccagtccccagctcgccagcgtttttcgttggaatatacgttgcacatttatggcgattctgagtgtgagggcagacttctgccaggctcagcacagcattttcgctgacaagtgagcttggaggttctatgtgccataattaacattgccttgaagactcctggacaccgagactggcctcagaaatagttggctttttttttttttaattgcaagcatatttcttttaatgactccagtaaaattaagcatcaagtaaacaagtggaaagtgacctacacttttaacttgtctcactagtgcctaaatgtagtaaaggctgcttaagttttgtatgtagttggattttttggagtccgaaggtatccatctgcagaaattgaggcccaaattgaatttggattcaagtggattctaaatactttgcttatcttgaagagagaagcttcataaggaataaacaagttgaatagagaaaacactgattgataataggcattttagtggtctttttaatgttttctgctgtgaaacatttcaagatttattgatttttttttttcactttccccatcacactcacacgcacgctcacactttttatttgccataatgaaccgtccagcccctgtggagatctcctatgagaacatgcgttttctgataactcacaaccctaccaatgctactctcaacaagttcacagaggaacttaagaagtatggagtgacgactttggttcgagtttgtgatgctacatatgataaagctccagttgaaaaagaaggaatccacgttctagattggccatttgatgatggagctccaccccctaatcagatagtagatgattggttaaacctgttaaaaaccaaatttcgtgaagagccaggttgctgtgttgcagtgcattgtgttgcaggattgggaagaaaaagaaggggagcgttcaattccaaacagctgctttatttggagaaataccgacctaagatgcgattacgcttcagagataccaatgggcattgctgtgttcagtagaaggaaatgtaaacgaaggctgacttgattgtgccatttagagggaactcttggtacctggaaatgtgaatctggaatattacctgtgtcatcaaagtagtgatggattcagtactcctcaaccactctcctaatgattggaacaaaagcaaacaaaaaagaaatctctctataaaatgaataaaatgtttaagaaaagagaaagagaaaaggaattaattcagtgaaggatgattttgctcctagttttggagtttgaatttctgccaggattgaattattttgaaatctcctgtctttttaaactttttcaaaataggtctctaaggaaaaccagcagaacattagcctgtgcaaaaccatctgtttggggagcacactcttccattatgcttggcacatagatctccctgtggtgggattttttttttccctttttttgtgggggagggttggtggtatatttttcccctcttttttccttcctctcctacatctcccttttcccccgatccaagttgtagatggaatagaagcccttgttgctgtagatgtgcgtgcagtctggcagccttaagcccacctgggcacttttagataaaaaaaaaaaaaaacaaaaaacaacaccaaaaaaacagcagtgatatatatattccaggtggtttttagtctttactgatgaaagggtgttcatgttagtttcttcaaaaccctatctaatactaggcaaagtagccaagagccttttgttttgtttttattttgataaattagtggagaaatggcattttaagaggagtctcttctcaacttacctgagagtcgaattcttctcttccctaaccaatgaagctaagtggttatcccagaaacttgtcttctaaaagggaggactccaggccatcaataaagatgtccaggcagtgagcgtactttttacaccctgtagaattgtgggctgtagcgttactctgattttctgtctagtatcagagaatgctggtagcttaaaatttttattttaggacttgtactctgaattttcaggaaccgtcaaaggagcagcagcaaattcacatattttcgacttgagaaatgcttgtggtatgtgttttccaaactgccccctatatgtaaagttcagtttaaccactgattgccttgttattactaggttttttgagattaaaaaaaaaaaatccctggtttaaaaccaacaatgatgcctagtgagtatgtgtccacaggccataacagggtagaagagagacatcgtgcaacccaatgagtagtgaagggactgtgttgcttgtgaagcggtgtagtagcatttttgcagattcttggctgggtttagtgtactgatctagaaaagctgtttttctgctcctttgtggaaggcagttatgatcaggctgcatggacaaagcaggtagaggggcaccatcaggggctcttgcactattttcacctctaaatattacgtactcagtagtgccctgcttctagggctctgaatacgggcttaaagtcatcttgtcctgctggaatttgctgtgcagagccataagcctcccattttgttagcgtcagctaggccaataggaacagaccgggaccttgtctcacactgatgatacctcacatgttgaccggctatgtgaactgcctatttcctatgctggagttttgatttttaactaaacgcaaatctgtagattctctcctctcccatcccagaaaacaaaacaaaataatgcttttcgaaattgtttctaggactttaaaacataatggtatatccaaaattctttatttcagaatgcaacaatagattccattaatatagactcaagatcaaaacagcatacctgctaagctaagatagatggtgttgattccactgggttttgatcaatacaataacaaacctttttcctttgacatactctgaattttgttgtttggggggagggggtgtgtgtgtgtgtgtgtgtgtgtgtgtgtatgtgtgtgtgtgtgtgtgcacgcgcagtgtccatcagtatcagtgcctgcctgagttaggaaaattacattcctggttctgtattgaggagaaggatgtataaagcaacatgaaacattagccctccttttattttaaagactaatgttaattgttcttaaaactggattttttttccttaaagcaatttttttcttttcgatttaatgaagtattgctagctgaagccagtttgacatagagagatgtcagattgatttgaaaggtgtgcagcctgatttaaaaccaaaccctgaacccttttaaagaacaataaaacatattttacacgc

SEQ ID NO: 297544 - DNA, 3750 bp, Homo sapiens
agcggggcggggcgggagctggttccggctgcgcgcgcagcggtggtggtggcggcgcgatcggccgggctgtaaccgtcgtctgtccgggagcggctggagcggcagcggcggccgggcacggcgcgaggtgacgccacagggcagcggcggcagcggaggcagcggcggcagcaggagacgcagcggcggccgcagcagcagcagcaagacggactcgtggagacgcgccgccgccgccgccgccgggccgggccgggtgtcgcgcgccgaggctgggggggagtcgtcgccgccgccgccaccgctaccgccgccgccgccgccgccgaggtgactgaggagagaggcgcctcctcgctcccgccaccgccggacttcaatgcccagtccccagctcgccagcgtttttcgttggaatatacgttgcacatttatggcgattctgagtgtgagggcagacttctgccaggctcagcacagcattttcgctgacaagtgagcttggaggttctatgtgccataattaacattgccttgaagactcctggacaccgagactggcctcagaaatagttggctttttttttttttaattgcaagcatatttcttttaatgactccagtaaaattaagcatcaagtaaacaagtggaaagtgacctacacttttaacttgtctcactagtgcctaaatgtagtaaaggctgcttaagttttgtatgtagttggattttttggagtccgaaggtatccatctgcagaaattgaggcccaaattgaatttggattcaagtggattctaaatactttgcttatcttgaagagagaagcttcataaggaataaacaagttgaatagagaaaacactgattgataataggcattttagtggtctttttaatgttttctgctgtgaaacatttcaagatttattgatttttttttttcactttccccatcacactcacacgcacgctcacactttttatttgccataatgaaccgtccagcccctgtggagatctcctatgagaacatgcgttttctgataactcacaaccctaccaatgctactctcaacaagttcacagaggattggccatttgatgatggagctccaccccctaatcagatagtagatgattggttaaacctgttaaaaaccaaatttcgtgaagagccaggttgctgtgttgcagtgcattgtgttgcaggattgggaagggcacctgtgctggttgcacttgctttgattgaatgtggaatgaagtacgaagatgcagttcagtttataagacaaaaaagaaggggagcgttcaattccaaacagctgctttatttggagaaataccgacctaagatgcgattacgcttcagagataccaatgggcattgctgtgttcagtagaaggaaatgtaaacgaaggctgacttgattgtgccatttagagggaactcttggtacctggaaatgtgaatctggaatattacctgtgtcatcaaagtagtgatggattcagtactcctcaaccactctcctaatgattggaacaaaagcaaacaaaaaagaaatctctctataaaatgaataaaatgtttaagaaaagagaaagagaaaaggaattaattcagtgaaggatgattttgctcctagttttggagtttgaatttctgccaggattgaattattttgaaatctcctgtctttttaaactttttcaaaataggtctctaaggaaaaccagcagaacattagcctgtgcaaaaccatctgtttggggagcacactcttccattatgcttggcacatagatctccctgtggtgggattttttttttccctttttttgtgggggagggttggtggtatatttttcccctcttttttccttcctctcctacatctcccttttcccccgatccaagttgtagatggaatagaagcccttgttgctgtagatgtgcgtgcagtctggcagccttaagcccacctgggcacttttagataaaaaaaaaaaaaaacaaaaaacaacaccaaaaaaacagcagtgatatatatattccaggtggtttttagtctttactgatgaaagggtgttcatgttagtttcttcaaaaccctatctaatactaggcaaagtagccaagagccttttgttttgtttttattttgataaattagtggagaaatggcattttaagaggagtctcttctcaacttacctgagagtcgaattcttctcttccctaaccaatgaagctaagtggttatcccagaaacttgtcttctaaaagggaggactccaggccatcaataaagatgtccaggcagtgagcgtactttttacaccctgtagaattgtgggctgtagcgttactctgattttctgtctagtatcagagaatgctggtagcttaaaatttttattttaggacttgtactctgaattttcaggaaccgtcaaaggagcagcagcaaattcacatattttcgacttgagaaatgcttgtggtatgtgttttccaaactgccccctatatgtaaagttcagtttaaccactgattgccttgttattactaggttttttgagattaaaaaaaaaaaatccctggtttaaaaccaacaatgatgcctagtgagtatgtgtccacaggccataacagggtagaagagagacatcgtgcaacccaatgagtagtgaagggactgtgttgcttgtgaagcggtgtagtagcatttttgcagattcttggctgggtttagtgtactgatctagaaaagctgtttttctgctcctttgtggaaggcagttatgatcaggctgcatggacaaagcaggtagaggggcaccatcaggggctcttgcactattttcacctctaaatattacgtactcagtagtgccctgcttctagggctctgaatacgggcttaaagtcatcttgtcctgctggaatttgctgtgcagagccataagcctcccattttgttagcgtcagctaggccaataggaacagaccgggaccttgtctcacactgatgatacctcacatgttgaccggctatgtgaactgcctatttcctatgctggagttttgatttttaactaaacgcaaatctgtagattctctcctctcccatcccagaaaacaaaacaaaataatgcttttcgaaattgtttctaggactttaaaacataatggtatatccaaaattctttatttcagaatgcaacaatagattccattaatatagactcaagatcaaaacagcatacctgctaagctaagatagatggtgttgattccactgggttttgatcaatacaataacaaacctttttcctttgacatactctgaattttgttgtttggggggagggggtgtgtgtgtgtgtgtgtgtgtgtgtgtgtatgtgtgtgtgtgtgtgtgcacgcgcagtgtccatcagtatcagtgcctgcctgagttaggaaaattacattcctggttctgtattgaggagaaggatgtataaagcaacatgaaacattagccctccttttattttaaagactaatgttaattgttcttaaaactggattttttttccttaaagcaatttttttcttttcgatttaatgaagtattgctagctgaagccagtttgacatagagagatgtcagattgatttgaaaggtgtgcagcctgatttaaaaccaaaccctgaacccttttaaagaacaataaaacatattttacacgc

SEQ ID NO: 297545 - DNA, 3459 bp, Homo sapiens
agcggggcggggcgggagctggttccggctgcgcgcgcagcggtggtggtggcggcgcgatcggccgggctgtaaccgtcgtctgtccgggagcggctggagcggcagcggcggccgggcacggcgcgaggtgacgccacagggcagcggcggcagcggaggcagcggcggcagcaggagacgcagcggcggccgcagcagcagcagcaagacggactcgtggagacgcgccgccgccgccgccgccgggccgggccgggtgtcgcgcgccgaggctgggggggagtcgtcgccgccgccgccaccgctaccgccgccgccgccgccgccgaggtgactgaggagagaggcgcctcctcgctcccgccaccgccggacttcaatgcccagtccccagctcgccagcgtttttcgttggaatatacgttgcacatttatggcgattctgagtgtgagggcagacttctgccaggctcagcacagcattttcgctgacaagtgagcttggaggttctatgtgccataattaacattgccttgaagactcctggacaccgagactggcctcagaaatagttggctttttttttttttaattgcaagcatatttcttttaatgactccagtaaaattaagcatcaagtaaacaagtggaaagtgacctacacttttaacttgtctcactagtgcctaaatgtagtaaaggctgcttaagttttgtatgtagttggattttttggagtccgaaggtatccatctgcagaaattgaggcccaaattgaatttggattcaagtggattctaaatactttgcttatcttgaagagagaagcttcataaggaataaacaagttgaatagagaaaacactgattgataataggcattttagtggtctttttaatgttttctgctgtgaaacatttcaagatttattgatttttttttttcactttccccatcacactcacacgcacgctcacactttttatttgccataatgaaccgtccagcccctgtggagatctcctatgagaacatgcgttttctgataactcacaaccctaccaatgctactctcaacaagttcacagaggaacttaagaagtatggagtgacgactttggttcgagtttgtgatgctacatatgataaagctccagttgaaaaagaaggaatccacgttctagattggccatttgatgatggagctccaccccctaatcagatagtagatgattggttaaacctgttaaaaaccaaatttcgtgaagagccaggttgctgtgttgcagtgcattgtgttgcaggattgggaagggcacctgtgctggttgcacttgctttgattgaatgtggaatgaagtacgaagatgcagttcagtttataagacaaaaaagaaggggagcgttcaattccaaacagctgctttatttggagaaataccgacctaagatgcgattacgcttcagagataccaatgggcattgctgtgttcagtagaaggaaatgtaaacgaaggctgacttgattgtgccatttagagggaactcttggtacctggaaatgtgaatctggaatattacctgtgtcatcaaagtagtgatggattcagtactcctcaaccactctcctaatgattggaacaaaagcaaacaaaaaagaaatctctctataaaatgaataaaatgtttaagaaaagagaaagagaaaaggaattaattcagtgaaggatgattttgctcctagttttggagtttgaatttctgccaggattgaattattttgaaatctcctgtctttttaaactttttcaaaataggtctctaaggaaaaccagcagaacattagcctgtgcaaaaccatctgtttggggagcacactcttccattatgcttggcacatagatctccctgtggtgggattttttttttccctttttttgtgggggagggttggtggtatatttttcccctcttttttccttcctctcctacatctcccttttcccccgatccaagttgtagatggaatagaagcccttgttgctgtagatgtgcgtgcagtctggcagccttaagcccacctgggcacttttagataaaaaaaaaaaaaaacaaaaaacaacaccaaaaaaacagcagtgatatatatattccaggtggtttttagtctttactgatgaaagggtgttcatgttagtttcttcaaaaccctatctaatactaggcaaagtagccaagagccttttgttttgtttttattttgataaattagtggagaaatggcattttaagaggagtctcttctcaacttacctgagagtcgaattcttctcttccctaaccaatgaagctaagtggttatcccagaaacttgtcttctaaaagggaggactccaggccatcaataaagatgtccaggcagtgagcgtactttttacaccctgtagaattgtgggctgtagcgttactctgattttctgtctagtatcagagaatgctggtagcttaaaatttttattttaggacttgtactctgaattttcaggaaccgtcaaaggagcagcagcaaattcacatattttcgacttgagaaatgcttgtggtatgtgttttccaaactgccccctatatgtaaagttcagtttaaccactgattgccttgttattactaggttttttgagattaaaaaaaaaaaatccctggtttaaaaccaacaatgatgcctagtgagtatgtgtccacaggccataacagggtagaagagagacatcgtgcaacccaatgagtagtgaagggactgtgttgcttgtgaagcggtgtagtagcatttttgcagattcttggctgggtttagtgtactgatctagaaaagctgtttttctgctcctttgtggaaggcagttatgatcaggctgcatggacaaagcaggtagaggggcaccatcaggggctcttgcactattttcacctctaaatattacgtactcagtagtgccctgcttctagggctctgaatacgggcttaaagtcatcttgtcctgctggaatttgctgtgcagagccataagcctcccattttgttagcgtcagctaggccaataggaacagaccgggaccttgtctcacactgatgatacctcacatgttgaccggctatgtgaactgcctatttcctatgctggagttttgatttttaactaaacgcaaatctgtagattctctcctctcccatcccagaaaacaaaacaaaataatgcttttcgaaattgtttctaggactcagatacatccttgaatatgcattagtgttcattacagaaaactacaatcgatgttcacataaataaagtcaagatccaaacagaataccagttggagatgaagagtagatgggagtgattacattgaggtacagatcgaaaaccctcactaaccttatgaccacacacatca

SEQ ID NO: 297546 - DNA, 3575 bp, Homo sapiens
agcggggcggggcgggagctggttccggctgcgcgcgcagcggtggtggtggcggcgcgatcggccgggctgtaaccgtcgtctgtccgggagcggctggagcggcagcggcggccgggcacggcgcgaggtgacgccacagggcagcggcggcagcggaggcagcggcggcagcaggagacgcagcggcggccgcagcagcagcagcaagacggactcgtggagacgcgccgccgccgccgccgccgggccgggccgggtgtcgcgcgccgaggctgggggggagtcgtcgccgccgccgccaccgctaccgccgccgccgccgccgccgaggtgactgaggagagaggcgcctcctcgctcccgccaccgccggacttcaatgcccagtccccagctcgccagcgtttttcgttggaatatacgttgcacatttatggcgattctgagtgtgagggcagacttctgccaggctcagcacagcattttcgctgacaagtgagcttggaggttctatgtgccataattaacattgccttgaagactcctggacaccgagactggcctcagaaatagttggctttttttttttttaattgcaagcatatttcttttaatgactccagtaaaattaagcatcaagtaaacaagtggaaagtgacctacacttttaacttgtctcactagtgcctaaatgtagtaaaggctgcttaagttttgtatgtagttggattttttggagtccgaaggtatccatctgcagaaattgaggcccaaattgaatttggattcaagtggattctaaatactttgcttatcttgaagagagaagcttcataaggaataaacaagttgaatagagaaaacactgattgataataggcattttagtggtctttttaatgttttctgctgtgaaacatttcaagatttattgatttttttttttcactttccccatcacactcacacgcacgctcacactttttatttgccataatgaacctaatcagatagtagatgattggttaaacctgttaaaaaccaaatttcgtgaagagccaggttgctgtgttgcagtgcattgtgttgcaggattgggaagggcacctgtgctggttgcacttgctttgattgaatgtggaatgaagtacgaagatgcagttcagtttataagacaacctaagatgcgattacgcttcagagataccaatgggcattgctgtgttcagtagaaggaaatgtaaacgaaggctgacttgattgtgccatttagagggaactcttggtacctggaaatgtgaatctggaatattacctgtgtcatcaaagtagtgatggattcagtactcctcaaccactctcctaatgattggaacaaaagcaaacaaaaaagaaatctctctataaaatgaataaaatgtttaagaaaagagaaagagaaaaggaattaattcagtgaaggatgattttgctcctagttttggagtttgaatttctgccaggattgaattattttgaaatctcctgtctttttaaactttttcaaaataggtctctaaggaaaaccagcagaacattagcctgtgcaaaaccatctgtttggggagcacactcttccattatgcttggcacatagatctccctgtggtgggattttttttttccctttttttgtgggggagggttggtggtatatttttcccctcttttttccttcctctcctacatctcccttttcccccgatccaagttgtagatggaatagaagcccttgttgctgtagatgtgcgtgcagtctggcagccttaagcccacctgggcacttttagataaaaaaaaaaaaaaacaaaaaacaacaccaaaaaaacagcagtgatatatatattccaggtggtttttagtctttactgatgaaagggtgttcatgttagtttcttcaaaaccctatctaatactaggcaaagtagccaagagccttttgttttgtttttattttgataaattagtggagaaatggcattttaagaggagtctcttctcaacttacctgagagtcgaattcttctcttccctaaccaatgaagctaagtggttatcccagaaacttgtcttctaaaagggaggactccaggccatcaataaagatgtccaggcagtgagcgtactttttacaccctgtagaattgtgggctgtagcgttactctgattttctgtctagtatcagagaatgctggtagcttaaaatttttattttaggacttgtactctgaattttcaggaaccgtcaaaggagcagcagcaaattcacatattttcgacttgagaaatgcttgtggtatgtgttttccaaactgccccctatatgtaaagttcagtttaaccactgattgccttgttattactaggttttttgagattaaaaaaaaaaaatccctggtttaaaaccaacaatgatgcctagtgagtatgtgtccacaggccataacagggtagaagagagacatcgtgcaacccaatgagtagtgaagggactgtgttgcttgtgaagcggtgtagtagcatttttgcagattcttggctgggtttagtgtactgatctagaaaagctgtttttctgctcctttgtggaaggcagttatgatcaggctgcatggacaaagcaggtagaggggcaccatcaggggctcttgcactattttcacctctaaatattacgtactcagtagtgccctgcttctagggctctgaatacgggcttaaagtcatcttgtcctgctggaatttgctgtgcagagccataagcctcccattttgttagcgtcagctaggccaataggaacagaccgggaccttgtctcacactgatgatacctcacatgttgaccggctatgtgaactgcctatttcctatgctggagttttgatttttaactaaacgcaaatctgtagattctctcctctcccatcccagaaaacaaaacaaaataatgcttttcgaaattgtttctaggactttaaaacataatggtatatccaaaattctttatttcagaatgcaacaatagattccattaatatagactcaagatcaaaacagcatacctgctaagctaagatagatggtgttgattccactgggttttgatcaatacaataacaaacctttttcctttgacatactctgaattttgttgtttggggggagggggtgtgtgtgtgtgtgtgtgtgtgtgtgtgtatgtgtgtgtgtgtgtgtgcacgcgcagtgtccatcagtatcagtgcctgcctgagttaggaaaattacattcctggttctgtattgaggagaaggatgtataaagcaacatgaaacattagccctccttttattttaaagactaatgttaattgttcttaaaactggattttttttccttaaagcaatttttttcttttcgatttaatgaagtattgctagctgaagccagtttgacatagagagatgtcagattgatttgaaaggtgtgcagcctgatttaaaaccaaaccctgaacccttttaaagaacaataaaacatattttacacgc

SEQ ID NO: 297547 - DNA, 3044 bp, Homo sapiens
agcggggcggggcgggagctggttccggctgcgcgcgcagcggtggtggtggcggcgcgatcggccgggctgtaaccgtcgtctgtccgggagcggctggagcggcagcggcggccgggcacggcgcgaggtgacgccacagggcagcggcggcagcggaggcagcggcggcagcaggagacgcagcggcggccgcagcagcagcagcaagacggactcgtggagacgcgccgccgccgccgccgccgggccgggccgggtgtcgcgcgccgaggctgggggggagtcgtcgccgccgccgccaccgctaccgccgccgccgccgccgccgaggtgactgaggagagaggcgcctcctcgctcccgccaccgccggacttcaatgcccagtccccagctcgccagcgtttttcgttggaatatacgttgcacatttatggcgattctgagtgtgagggcagacttctgccaggctcagcacagcattttcgctgacaagtgagcttggaggttctatgtgccataattaacattgccttgaagactcctggacaccgagactggcctcagaaatagttggctttttttttttttaattgcaagcatatttcttttaatgactccagtaaaattaagcatcaagtaaacaagtggaaagtgacctacacttttaacttgtctcactagtgcctaaatgtagtaaaggctgcttaagttttgtatgtagttggattttttggagtccgaaggtatccatctgcagaaattgaggcccaaattgaatttggattcaagtggattctaaatactttgcttatcttgaagagagaagcttcataaggaataaacaagttgaatagagaaaacactgattgataataggcattttagtggtctttttaatgttttctgctgtgaaacatttcaagatttattgatttttttttttcactttccccatcacactcacacgcacgctcacactttttatttgccataatgaaccgtccagcccctgtggagatctcctatgagaacatgcgttttctgataactcacaaccctaccaatgctactctcaacaagttcacagaggaacttaagaagtatggagtgacgactttggttcgagtttgtgatgctacatatgataaagctccagttgaaaaagaaggaatccacgttctagattggccatttgatgatggagctccaccccctaatcagatagtagatgattggttaaacctgttaaaaaccaaatttcgtgaagagccaggttgctgtgttgcagtgcattgtgttgcaggattgggaagggcacctgtgctggttgcacttgctttgattgaatgtggaatgaagtacgaagatgcagttcagtttataagacaaaaaagaaggggagcgttcaattccaaacagctgctttatttggagaaataccgacctaagatgcgattacgcttcagagataccaatgggcattgctgtgttcagtagaaggaaatgtaaacgaaggctgacttgattgtgccatttagagggaactcttggtacctggaaatgtgaatctggaatattacctgtgtcatcaaagtagtgatggattcagtactcctcaaccactctcctaatgattggaacaaaagcaaacaaaaaagaaatctctctataaaatgaataaaatgtttaagaaaagagaaagagaaaaggaattaattcagtgaaggatgattttgctcctagttttggagtttgaatttctgccaggattgaattattttgaaatctcctgtctttttaaactttttcaaaataggtctctaaggaaaaccagcagaacattagcctgtgcaaaaccatctgtttggggagcacactcttccattatgcttggcacatagatctccctgtggtgggattttttttttccctttttttgtgggggagggttggtggtatatttttcccctcttttttccttcctctcctacatctcccttttcccccgatccaagttgtagatggaatagaagcccttgttgctgtagatgtgcgtgcagtctggcagccttaagcccacctgggcacttttagataaaaaaaaaaaaaaacaaaaaacaacaccaaaaaaacagcagtgatatatatattccaggtggtttttagtctttactgatgaaagggtgttcatgttagtttcttcaaaaccctatctaatactaggcaaagtagccaagagccttttgttttgtttttattttgataaattagtggagaaatggcattttaagaggagtctcttctcaacttacctgagagtcgaattcttctcttccctaaccaatgaagctaagtggttatcccagaaacttgtcttctaaaagggaggactccaggccatcaataaagatgtccaggcagtgagcgtactttttacaccctgtagaattgtgggctgtagcgttactctgattttctgtctagtatcagagaatgctggtagcttaaaatttttattttaggacttgtactctgaattttcaggaaccgtcaaaggagcagcagcaaattcacatattttcgacttgagaaatgcttgtggtatgtgttttccaaactgccccctatatgtaaagttcagtttaaccactgattgccttgttattactaggttttttgagattaaaaaaaaaaaatccctggtttaaaaccaacaatgatgcctagtgagtatgtgtccacaggccataacagggtagaagagagacatcgtgcaacccaatgagtagtgaagggactgtgttgcttgtgaagcggtgtagtagcatttttgcagattcttggctgggtttagtgtactgatctagaaaagctgtttttctgctcctttgtggaaggcagttatgatcaggctgcatggacaaagcatgaaaacctctccgaaaagccttgaactgtttttctgctgatttattgagaatgtagtcagaataaagatgacagttccttcctgttttcatttgtaattggaatttata

SEQ ID NO: 297548 - DNA, 2519 bp, Homo sapiens
gagatcggtgcagcatctgccggtattatagatcggcgtacgaaaatacatgttccatatttataacagaaaaaagaaggggagcgttcaattccaaacagctgctttatttggagaaataccgacctaagatgcgattacgcttcagagataccaatgggcattgctgtgttcagtagaaggaaatgtaaacgaaggctgacttgattgtgccatttagagggaactcttggtacctggaaatgtgaatctggaatattacctgtgtcatcaaagtagtgatggattcagtactcctcaaccactctcctaatgattggaacaaaagcaaacaaaaaagaaatctctctataaaatgaataaaatgtttaagaaaagagaaagagaaaaggaattaattcagtgaaggatgattttgctcctagttttggagtttgaatttctgccaggattgaattattttgaaatctcctgtctttttaaactttttcaaaataggtctctaaggaaaaccagcagaacattagcctgtgcaaaaccatctgtttggggagcacactcttccattatgcttggcacatagatctccctgtggtgggattttttttttccctttttttgtgggggagggttggtggtatatttttcccctcttttttccttcctctcctacatctcccttttcccccgatccaagttgtagatggaatagaagcccttgttgctgtagatgtgcgtgcagtctggcagccttaagcccacctgggcacttttagataaaaaaaaaaaaaaacaaaaaacaacaccaaaaaaacagcagtgatatatatattccaggtggtttttagtctttactgatgaaagggtgttcatgttagtttcttcaaaaccctatctaatactaggcaaagtagccaagagccttttgttttgtttttattttgataaattagtggagaaatggcattttaagaggagtctcttctcaacttacctgagagtcgaattcttctcttccctaaccaatgaagctaagtggttatcccagaaacttgtcttctaaaagggaggactccaggccatcaataaagatgtccaggcagtgagcgtactttttacaccctgtagaattgtgggctgtagcgttactctgattttctgtctagtatcagagaatgctggtagcttaaaatttttattttaggacttgtactctgaattttcaggaaccgtcaaaggagcagcagcaaattcacatattttcgacttgagaaatgcttgtggtatgtgttttccaaactgccccctatatgtaaagttcagtttaaccactgattgccttgttattactaggttttttgagattaaaaaaaaaaaatccctggtttaaaaccaacaatgatgcctagtgagtatgtgtccacaggccataacagggtagaagagagacatcgtgcaacccaatgagtagtgaagggactgtgttgcttgtgaagcggtgtagtagcatttttgcagattcttggctgggtttagtgtactgatctagaaaagctgtttttctgctcctttgtggaaggcagttatgatcaggctgcatggacaaagcaggtagaggggcaccatcaggggctcttgcactattttcacctctaaatattacgtactcagtagtgccctgcttctagggctctgaatacgggcttaaagtcatcttgtcctgctggaatttgctgtgcagagccataagcctcccattttgttagcgtcagctaggccaataggaacagaccgggaccttgtctcacactgatgatacctcacatgttgaccggctatgtgaactgcctatttcctatgctggagttttgatttttaactaaacgcaaatctgtagattctctcctctcccatcccagaaaacaaaacaaaataatgcttttcgaaattgtttctaggactttaaaacataatggtatatccaaaattctttatttcagaatgcaacaatagattccattaatatagactcaagatcaaaacagcatacctgctaagctaagatagatggtgttgattccactgggttttgatcaatacaataacaaacctttttcctttgacatactctgaattttgttgtttggggggagggggtgtgtgtgtgtgtgtgtgtgtgtgtgtgtatgtgtgtgtgtgtgtgtgcacgcgcagtgtccatcagtatcagtgcctgcctgagttaggaaaattacattcctggttctgtattgaggagaaggatgtataaagcaacatgaaacattagccctccttttattttaaagactaatgttaattgttcttaaaactggattttttttccttaaagcaatttttttcttttcgatttaatgaagtattgctagctgaagccagtttgacatagagagatgtcagattgatttgaaaggtgtgcagcctgatttaaaaccaaaccctgaacccttttaaagaacaataaaacatattttacacgc

SEQ ID NO: 297549 - DNA, 2693 bp, Homo sapiens
aaacctgtgactaatcatatctcctcctaccccccatttccaaggacatttgttactcagatacttgttatactaatacttgaacttgtaccttatggtatttgctatcttttaactagtcatgatattcttatactttagttacacttttggaatttgatacaatgttcagtggggtgtgtgggtgtatgtatgagggaaacagttctcaaaagaatgtcagaaaaaccatttttataaaattaaaaagaaggggagcgttcaattccaaacagctgctttatttggagaaataccgacctaagatgcgattacgcttcagagataccaatgggcattgctgtgttcagtagaaggaaatgtaaacgaaggctgacttgattgtgccatttagagggaactcttggtacctggaaatgtgaatctggaatattacctgtgtcatcaaagtagtgatggattcagtactcctcaaccactctcctaatgattggaacaaaagcaaacaaaaaagaaatctctctataaaatgaataaaatgtttaagaaaagagaaagagaaaaggaattaattcagtgaaggatgattttgctcctagttttggagtttgaatttctgccaggattgaattattttgaaatctcctgtctttttaaactttttcaaaataggtctctaaggaaaaccagcagaacattagcctgtgcaaaaccatctgtttggggagcacactcttccattatgcttggcacatagatctccctgtggtgggattttttttttccctttttttgtgggggagggttggtggtatatttttcccctcttttttccttcctctcctacatctcccttttcccccgatccaagttgtagatggaatagaagcccttgttgctgtagatgtgcgtgcagtctggcagccttaagcccacctgggcacttttagataaaaaaaaaaaaaaacaaaaaacaacaccaaaaaaacagcagtgatatatatattccaggtggtttttagtctttactgatgaaagggtgttcatgttagtttcttcaaaaccctatctaatactaggcaaagtagccaagagccttttgttttgtttttattttgataaattagtggagaaatggcattttaagaggagtctcttctcaacttacctgagagtcgaattcttctcttccctaaccaatgaagctaagtggttatcccagaaacttgtcttctaaaagggaggactccaggccatcaataaagatgtccaggcagtgagcgtactttttacaccctgtagaattgtgggctgtagcgttactctgattttctgtctagtatcagagaatgctggtagcttaaaatttttattttaggacttgtactctgaattttcaggaaccgtcaaaggagcagcagcaaattcacatattttcgacttgagaaatgcttgtggtatgtgttttccaaactgccccctatatgtaaagttcagtttaaccactgattgccttgttattactaggttttttgagattaaaaaaaaaaaatccctggtttaaaaccaacaatgatgcctagtgagtatgtgtccacaggccataacagggtagaagagagacatcgtgcaacccaatgagtagtgaagggactgtgttgcttgtgaagcggtgtagtagcatttttgcagattcttggctgggtttagtgtactgatctagaaaagctgtttttctgctcctttgtggaaggcagttatgatcaggctgcatggacaaagcaggtagaggggcaccatcaggggctcttgcactattttcacctctaaatattacgtactcagtagtgccctgcttctagggctctgaatacgggcttaaagtcatcttgtcctgctggaatttgctgtgcagagccataagcctcccattttgttagcgtcagctaggccaataggaacagaccgggaccttgtctcacactgatgatacctcacatgttgaccggctatgtgaactgcctatttcctatgctggagttttgatttttaactaaacgcaaatctgtagattctctcctctcccatcccagaaaacaaaacaaaataatgcttttcgaaattgtttctaggactttaaaacataatggtatatccaaaattctttatttcagaatgcaacaatagattccattaatatagactcaagatcaaaacagcatacctgctaagctaagatagatggtgttgattccactgggttttgatcaatacaataacaaacctttttcctttgacatactctgaattttgttgtttggggggagggggtgtgtgtgtgtgtgtgtgtgtgtgtgtgtatgtgtgtgtgtgtgtgtgcacgcgcagtgtccatcagtatcagtgcctgcctgagttaggaaaattacattcctggttctgtattgaggagaaggatgtataaagcaacatgaaacattagccctccttttattttaaagactaatgttaattgttcttaaaactggattttttttccttaaagcaatttttttcttttcgatttaatgaagtattgctagctgaagccagtttgacatagagagatgtcagattgatttgaaaggtgtgcagcctgatttaaaaccaaaccctgaacccttttaaagaacaataaaacatattttacacgc

SEQ ID NO: 297550 - DNA, 2408 bp, Homo sapiens
  misc_feature (151)..(151): n is a, c, g, or t
aaagggctccagcccagaaggttcctgcccagatagccacaggccagaaagcagcgcctgctccaaaggctcagatgggtcaaatagctcctccccatgcagctctagggtccctacgcgttcctcggagatgcgacactggcgaattacnctgtgtcatcaaagtagtgatggattcagtactcctcaaccactctcctaatgattggaacaaaagcaaacaaaaaagaaatctctctataaaatgaataaaatgtttaagaaaagagaaagagaaaaggaattaattcagtgaaggatgattttgctcctagttttggagtttgaatttctgccaggattgaattattttgaaatctcctgtctttttaaactttttcaaaataggtctctaaggaaaaccagcagaacattagcctgtgcaaaaccatctgtttggggagcacactcttccattatgcttggcacatagatctccctgtggtgggattttttttttccctttttttgtgggggagggttggtggtatatttttcccctcttttttccttcctctcctacatctcccttttcccccgatccaagttgtagatggaatagaagcccttgttgctgtagatgtgcgtgcagtctggcagccttaagcccacctgggcacttttagataaaaaaaaaaaaaaacaaaaaacaacaccaaaaaaacagcagtgatatatatattccaggtggtttttagtctttactgatgaaagggtgttcatgttagtttcttcaaaaccctatctaatactaggcaaagtagccaagagccttttgttttgtttttattttgataaattagtggagaaatggcattttaagaggagtctcttctcaacttacctgagagtcgaattcttctcttccctaaccaatgaagctaagtggttatcccagaaacttgtcttctaaaagggaggactccaggccatcaataaagatgtccaggcagtgagcgtactttttacaccctgtagaattgtgggctgtagcgttactctgattttctgtctagtatcagagaatgctggtagcttaaaatttttattttaggacttgtactctgaattttcaggaaccgtcaaaggagcagcagcaaattcacatattttcgacttgagaaatgcttgtggtatgtgttttccaaactgccccctatatgtaaagttcagtttaaccactgattgccttgttattactaggttttttgagattaaaaaaaaaaaatccctggtttaaaaccaacaatgatgcctagtgagtatgtgtccacaggccataacagggtagaagagagacatcgtgcaacccaatgagtagtgaagggactgtgttgcttgtgaagcggtgtagtagcatttttgcagattcttggctgggtttagtgtactgatctagaaaagctgtttttctgctcctttgtggaaggcagttatgatcaggctgcatggacaaagcaggtagaggggcaccatcaggggctcttgcactattttcacctctaaatattacgtactcagtagtgccctgcttctagggctctgaatacgggcttaaagtcatcttgtcctgctggaatttgctgtgcagagccataagcctcccattttgttagcgtcagctaggccaataggaacagaccgggaccttgtctcacactgatgatacctcacatgttgaccggctatgtgaactgcctatttcctatgctggagttttgatttttaactaaacgcaaatctgtagattctctcctctcccatcccagaaaacaaaacaaaataatgcttttcgaaattgtttctaggactttaaaacataatggtatatccaaaattctttatttcagaatgcaacaatagattccattaatatagactcaagatcaaaacagcatacctgctaagctaagatagatggtgttgattccactgggttttgatcaatacaataacaaacctttttcctttgacatactctgaattttgttgtttggggggagggggtgtgtgtgtgtgtgtgtgtgtgtgtgtgtatgtgtgtgtgtgtgtgtgcacgcgcagtgtccatcagtatcagtgcctgcctgagttaggaaaattacattcctggttctgtattgaggagaaggatgtataaagcaacatgaaacattagccctccttttattttaaagactaatgttaattgttcttaaaactggattttttttccttaaagcaatttttttcttttcgatttaatgaagtattgctagctgaagccagtttgacatagagagatgtcagattgatttgaaaggtgtgcagcctgatttaaaaccaaaccctgaacccttttaaagaacaataaaacatattttacacgc

SEQ ID NO: 297551 - DNA, 2251 bp, Homo sapiens
  misc_feature (11)..(11): n is a, c, g, or t
  misc_feature (23)..(23): n is a, c, g, or t
ctcgtgcaatntcggcagcaagntactcctcaaccactctcctaatgattggaacaaaagcaaacaaaaaagaaatctctctataaaatgaataaaatgtttaagaaaagagaaagagaaaaggaattaattcagtgaaggatgattttgctcctagttttggagtttgaatttctgccaggattgaattattttgaaatctcctgtctttttaaactttttcaaaataggtctctaaggaaaaccagcagaacattagcctgtgcaaaaccatctgtttggggagcacactcttccattatgcttggcacatagatctccctgtggtgggattttttttttccctttttttgtgggggagggttggtggtatatttttcccctcttttttccttcctctcctacatctcccttttcccccgatccaagttgtagatggaatagaagcccttgttgctgtagatgtgcgtgcagtctggcagccttaagcccacctgggcacttttagataaaaaaaaaaaaaaacaaaaaacaacaccaaaaaaacagcagtgatatatatattccaggtggtttttagtctttactgatgaaagggtgttcatgttagtttcttcaaaaccctatctaatactaggcaaagtagccaagagccttttgttttgtttttattttgataaattagtggagaaatggcattttaagaggagtctcttctcaacttacctgagagtcgaattcttctcttccctaaccaatgaagctaagtggttatcccagaaacttgtcttctaaaagggaggactccaggccatcaataaagatgtccaggcagtgagcgtactttttacaccctgtagaattgtgggctgtagcgttactctgattttctgtctagtatcagagaatgctggtagcttaaaatttttattttaggacttgtactctgaattttcaggaaccgtcaaaggagcagcagcaaattcacatattttcgacttgagaaatgcttgtggtatgtgttttccaaactgccccctatatgtaaagttcagtttaaccactgattgccttgttattactaggttttttgagattaaaaaaaaaaaatccctggtttaaaaccaacaatgatgcctagtgagtatgtgtccacaggccataacagggtagaagagagacatcgtgcaacccaatgagtagtgaagggactgtgttgcttgtgaagcggtgtagtagcatttttgcagattcttggctgggtttagtgtactgatctagaaaagctgtttttctgctcctttgtggaaggcagttatgatcaggctgcatggacaaagcaggtagaggggcaccatcaggggctcttgcactattttcacctctaaatattacgtactcagtagtgccctgcttctagggctctgaatacgggcttaaagtcatcttgtcctgctggaatttgctgtgcagagccataagcctcccattttgttagcgtcagctaggccaataggaacagaccgggaccttgtctcacactgatgatacctcacatgttgaccggctatgtgaactgcctatttcctatgctggagttttgatttttaactaaacgcaaatctgtagattctctcctctcccatcccagaaaacaaaacaaaataatgcttttcgaaattgtttctaggactttaaaacataatggtatatccaaaattctttatttcagaatgcaacaatagattccattaatatagactcaagatcaaaacagcatacctgctaagctaagatagatggtgttgattccactgggttttgatcaatacaataacaaacctttttcctttgacatactctgaattttgttgtttggggggagggggtgtgtgtgtgtgtgtgtgtgtgtgtgtgtatgtgtgtgtgtgtgtgtgcacgcgcagtgtccatcagtatcagtgcctgcctgagttaggaaaattacattcctggttctgtattgaggagaaggatgtataaagcaacatgaaacattagccctccttttattttaaagactaatgttaattgttcttaaaactggattttttttccttaaagcaatttttttcttttcgatttaatgaagtattgctagctgaagccagtttgacatagagagatgtcagattgatttgaaaggtgtgcagcctgatttaaaaccaaaccctgaacccttttaaagaacaataaaacatattttacacgc

SEQ ID NO: 297552 - DNA, 1714 bp, Homo sapiens
agcggggcggggcgggagctggttccggctgcgcgcgcagcggtggtggtggcggcgcgatcggccgggctgtaaccgtcgtctgtccgggagcggctggagcggcagcggcggccgggcacggcgcgaggtgacgccacagggcagcggcggcagcggaggcagcggcggcagcaggagacgcagcggcggccgcagcagcagcagcaagacggactcgtggagacgcgccgccgccgccgccgccgggccgggccgggtgtcgcgcgccgaggctgggggggagtcgtcgccgccgccgccaccgctaccgccgccgccgccgccgccgaggtgactgaggagagaggcgcctcctcgctcccgccaccgccggacttcaatgcccagtccccagctcgccagcgtttttcgttggaatatacgttgcacatttatggcgattctgagtgtgagggcagacttctgccaggctcagcacagcattttcgctgacaagtgagcttggaggttctatgtgccataattaacattgccttgaagactcctggacaccgagactggcctcagaaatagttggctttttttttttttaattgcaagcatatttcttttaatgactccagtaaaattaagcatcaagtaaacaagtggaaagtgacctacacttttaacttgtctcactagtgcctaaatgtagtaaaggctgcttaagttttgtatgtagttggattttttggagtccgaaggtatccatctgcagaaattgaggcccaaattgaatttggattcaagtggattctaaatactttgcttatcttgaagagagaagcttcataaggaataaacaagttgaatagagaaaacactgattgataataggcattttagtggtctttttaatgttttctgctgtgaaacatttcaagatttattgatttttttttttcactttccccatcacactcacacgcacgctcacactttttatttgccataatgaaccgtccagcccctgtggagatctcctatgagaacatgcgttttctgataactcacaaccctaccaatgctactctcaacaagttcacagaggaacttaagaagtatggagtgacgactttggttcgagtttgtgatgctacatatgataaagctccagttgaaaaagaaggaatccacgttctagattggccatttgatgatggagctccaccccctaatcagatagtagatgattggttaaacctgttaaaaaccaaatttcgtgaagagccaggttgctgtgttgcagtgcattgtgttgcaggattgggaagggcacctgtgctggttgcacttgctttgattgaatgtggaatgaagtacgaagatgcagttcagtttataagacaaaaaagaaggggagcgttcaattccaaacagctgctttatttggagaaataccgacctaagatgcgattacgcttcagagataccaatgggcattgctgtgttcagtagaaggaaatgtaaacgaaggctgacttgattgtgccatttagagggaactcttggtacctggaaatgtgaatctggaatattacctgtgtcatcaaagtagtgatggattcagtactcctcaaccactctcctaatgattggaacaaaagcaaacaaaaaagaaatctctctataaaatgaataaaatgtttaagaaaagagaaagagaaaa

SEQ ID NO: 297553 - DNA, 2284 bp, Homo sapiens
  misc_feature (2246)..(2246): n is a, c, g, or t
  misc_feature (2260)..(2260): n is a, c, g, or t
agcggggcggggcgggagctggttccggctgcgcgcgcagcggtggtggtggcggcgcgatcggccgggctgtaaccgtcgtctgtccgggagcggctggagcggcagcggcggccgggcacggcgcgaggtgacgccacagggcagcggcggcagcggaggcagcggcggcagcaggagacgcagcggcggccgcagcagcagcagcaagacggactcgtggagacgcgccgccgccgccgccgccgggccgggccgggtgtcgcgcgccgaggctgggggggagtcgtcgccgccgccgccaccgctaccgccgccgccgccgccgccgaggtgactgaggagagaggcgcctcctcgctcccgccaccgccggacttcaatgcccagtccccagctcgccagcgtttttcgttggaatatacgttgcacatttatggcgattctgagtgtgagggcagacttctgccaggctcagcacagcattttcgctgacaagtgagcttggaggttctatgtgccataattaacattgccttgaagactcctggacaccgagactggcctcagaaatagttggctttttttttttttaattgcaagcatatttcttttaatgactccagtaaaattaagcatcaagtaaacaagtggaaagtgacctacacttttaacttgtctcactagtgcctaaatgtagtaaaggctgcttaagttttgtatgtagttggattttttggagtccgaaggtatccatctgcagaaattgaggcccaaattgaatttggattcaagtggattctaaatactttgcttatcttgaagagagaagcttcataaggaataaacaagttgaatagagaaaacactgattgataataggcattttagtggtctttttaatgttttctgctgtgaaacatttcaagatttattgatttttttttttcactttccccatcacactcacacgcacgctcacactttttatttgccataatgaaccgtccagcccctgtggagatctcctatgagaacatgcgttttctgataactcacaaccctaccaatgctactctcaacaagttcacagaggaacttaagaagtatggagtgacgactttggttcgagtttgtgatgctacatatgataaagctccagttgaaaaagaaggaatccacgttctagattggccatttgatgatggagctccaccccctaatcagatagtagatgattggttaaacctgttaaaaaccaaatttcgtgaagagccaggttgctgtgttgcagtgcattgtgttgcaggattgggaagggcacctgtgctggttgcacttgctttgattgaatgtggaatgaagtacgaagatgcagttcagtttataagacaaaaaagaaggggagcgttcaattccaaacagctgctttatttggagaaataccgacctaagatgcgattacgcttcagagataccaatgggcattgctgtgttcagtagaaggaaatgtaaacgaaggctgacttgattgtgccatttagagggaactcttggtacctggaaatgtgaatctggaatattacctgtgtcatcaaagtagtgatggattcagtactcctcaaccactctcctaatgattggaacaaaagcaaacaaaaaagaaatctctctataaaatgaataaaatgtttaagaaaagagaaagagaaaaggaattaattcagtgaaggatgattttgctcctagttttggagtttgaatttctgccaggattgaattattttgaaatctcctgtctttttaaactttttcaaaataggtctctaaggaaaaccagcagaacattagcctgtgcaaaaccatctgtttggggagcacactcttccattatgcttggcacatagatctccctgtggtgggattttttttttccctttttttgtgggggagggttggtgcgtcaacatatctttcccctacttcctacttgtctccctccttttccctcccccccttctatcgtctacccctcgttttgcgtctcctatcctcctcccgtcccgcttgaggttttaattatatatgacttcccttccctctcaccacaatattttttactttcacgtgggtcccacagactccggcacccgctccccacacaacccacaaacccgccgaagcgacaacaacctagctgcgggctcgcgacacccgccccacccccaccctcctactttcccccngcctcacatttccnacattattatgatctctattttca

SEQ ID NO: 297554 - DNA, 2062 bp, Homo sapiens
agcggggcggggcgggagctggttccggctgcgcgcgcagcggtggtggtggcggcgcgatcggccgggctgtaaccgtcgtctgtccgggagcggctggagcggcagcggcggccgggcacggcgcgaggtgacgccacagggcagcggcggcagcggaggcagcggcggcagcaggagacgcagcggcggccgcagcagcagcagcaagacggactcgtggagacgcgccgccgccgccgccgccgggccgggccgggtgtcgcgcgccgaggctgggggggagtcgtcgccgccgccgccaccgctaccgccgccgccgccgccgccgaggtgactgaggagagaggcgcctcctcgctcccgccaccgccggacttcaatgcccagtccccagctcgccagcgtttttcgttggaatatacgttgcacatttatggcgattctgagtgtgagggcagacttctgccaggctcagcacagcattttcgctgacaagtgagcttggaggttctatgtgccataattaacattgccttgaagactcctggacaccgagactggcctcagaaatagttggctttttttttttttaattgcaagcatatttcttttaatgactccagtaaaattaagcatcaagtaaacaagtggaaagtgacctacacttttaacttgtctcactagtgcctaaatgtagtaaaggctgcttaagttttgtatgtagttggattttttggagtccgaaggtatccatctgcagaaattgaggcccaaattgaatttggattcaagtggattctaaatactttgcttatcttgaagagagaagcttcataaggaataaacaagttgaatagagaaaacactgattgataataggcattttagtggtctttttaatgttttctgctgtgaaacatttcaagatttattgatttttttttttcactttccccatcacactcacacgcacgctcacactttttatttgccataatgaaccgtccagcccctgtggagatctcctatgagaacatgcgttttctgataactcacaaccctaccaatgctactctcaacaagttcacagaggaacttaagaagtatggagtgacgactttggttcgagtttgtgatgctacatatgataaagctccagttgaaaaagaaggaatccacgttctagattggccatttgatgatggagctccaccccctaatcagatagtagatgattggttaaacctgttaaaaaccaaatttcgtgaagagccaggttgctgtgttgcagtgcattgtgttgcaggattgggaagggcacctgtgctggttgcacttgctttgattgaatgtggaatgaagtacgaagatgcagttcagtttataagacaaaaaagaaggggagcgttcaattccaaacagctgctttatttggagaaataccgacctaagatgcgattacgcttcagagataccaatgggcattgctgtgttcagtagaaggaaatgtaaacgaaggctgacttgattgtgccatttagagggaactcttggtacctggaaatgtgaatctggaatattacctgtgtcatcaaagtagtgatggattcagtactcctcaaccactctcctaatgattggaacaaaagcaaacaaaaaagaaatctctctataaaatgaataaaatgtttaagaaaagagaaagagaaaaggaattaattcagtgaaggatgattttgctcctagttttggagtttgaatttctgccaggattgaattattttgaaatctcctgtctttttaaactttttcaaaataggtctctaaggaaaaccagcagaacattagcctgtgcaaaaccatctgtttggggagcacactcttccattatgcttggcacatagatctccctgtggtgggattttttttttccctttttttgtgggggagggttggtgattatttgcatcctaagaacttctctacttacaaagtactgaccggcctcatcagaaccccatagccctatttccctatagtggagtgcctattaagatcc

SEQ ID NO: 297555 - DNA, 1369 bp, Homo sapiens
aacgttagtcatagtcgaacgcctggtgcatcggcacaggacattttattttaggacttgtactctgaattttcaggaaccgtcaaaggagcagcagcaaattcacatattttcgacttgagaaatgcttgtggtatgtgttttccaaactgccccctatatgtaaagttcagtttaaccactgattgccttgttattactaggttttttgagattaaaaaaaaaaaatccctggtttaaaaccaacaatgatgcctagtgagtatgtgtccacaggccataacagggtagaagagagacatcgtgcaacccaatgagtagtgaagggactgtgttgcttgtgaagcggtgtagtagcatttttgcagattcttggctgggtttagtgtactgatctagaaaagctgtttttctgctcctttgtggaaggcagttatgatcaggctgcatggacaaagcaggtagaggggcaccatcaggggctcttgcactattttcacctctaaatattacgtactcagtagtgccctgcttctagggctctgaatacgggcttaaagtcatcttgtcctgctggaatttgctgtgcagagccataagcctcccattttgttagcgtcagctaggccaataggaacagaccgggaccttgtctcacactgatgatacctcacatgttgaccggctatgtgaactgcctatttcctatgctggagttttgatttttaactaaacgcaaatctgtagattctctcctctcccatcccagaaaacaaaacaaaataatgcttttcgaaattgtttctaggactttaaaacataatggtatatccaaaattctttatttcagaatgcaacaatagattccattaatatagactcaagatcaaaacagcatacctgctaagctaagatagatggtgttgattccactgggttttgatcaatacaataacaaacctttttcctttgacatactctgaattttgttgtttggggggagggggtgtgtgtgtgtgtgtgtgtgtgtgtgtgtatgtgtgtgtgtgtgtgtgcacgcgcagtgtccatcagtatcagtgcctgcctgagttaggaaaattacattcctggttctgtattgaggagaaggatgtataaagcaacatgaaacattagccctccttttattttaaagactaatgttaattgttcttaaaactggattttttttccttaaagcaatttttttcttttcgatttaatgaagtattgctagctgaagccagtttgacatagagagatgtcagattgatttgaaaggtgtgcagcctgatttaaaaccaaaccctgaacccttttaaagaacaataaaacatattttacacgc

SEQ ID NO: 297556 - DNA, 2184 bp, Homo sapiens
agcggggcggggcgggagctggttccggctgcgcgcgcagcggtggtggtggcggcgcgatcggccgggctgtaaccgtcgtctgtccgggagcggctggagcggcagcggcggccgggcacggcgcgaggtgacgccacagggcagcggcggcagcggaggcagcggcggcagcaggagacgcagcggcggccgcagcagcagcagcaagacggactcgtggagacgcgccgccgccgccgccgccgggccgggccgggtgtcgcgcgccgaggctgggggggagtcgtcgccgccgccgccaccgctaccgccgccgccgccgccgccgaggtgactgaggagagaggcgcctcctcgctcccgccaccgccggacttcaatgcccagtccccagctcgccagcgtttttcgttggaatatacgttgcacatttatggcgattctgagtgtgagggcagacttctgccaggctcagcacagcattttcgctgacaagtgagcttggaggttctatgtgccataattaacattgccttgaagactcctggacaccgagactggcctcagaaatagttggctttttttttttttaattgcaagcatatttcttttaatgactccagtaaaattaagcatcaagtaaacaagtggaaagtgacctacacttttaacttgtctcactagtgcctaaatgtagtaaaggctgcttaagttttgtatgtagttggattttttggagtccgaaggtatccatctgcagaaattgaggcccaaattgaatttggattcaagtggattctaaatactttgcttatcttgaagagagaagcttcataaggaataaacaagttgaatagagaaaacactgattgataataggcattttagtggtctttttaatgttttctgctgtgaaacatttcaagatttattgatttttttttttcactttccccatcacactcacacgcacgctcacactttttatttgccataatgaaccgtccagcccctgtggagatctcctatgagaacatgcgttttctgataactcacaaccctaccaatgctactctcaacaagttcacagaggaacttaagaagtatggagtgacgactttggttcgagtttgtgatgctacatatgataaagctccagttgaaaaagaaggaatccacgttctagattggccatttgatgatggagctccaccccctaatcagatagtagatgattggttaaacctgttaaaaaccaaatttcgtgaagagccaggttgctgtgttgcagtgcattgtgttgcaggattgggaagggcacctgtgctggttgcacttgctttgattgaatgtggaatgaagtacgaagatgcagttcagtttataagacaaaaaagaaggggagcgttcaattccaaacagctgctttatttggagaaataccgacctaagatgcgattacgcttcagagataccaatgggcattgctgtgttcagtagaaggaaatgtaaacgaaggctgacttgattgtgccatttagagggaactcttggtacctggaaatgtgaatctggaatattacctgtgtcatcaaagtagtgatggattcagtactcctcaaccactctcctaatgattggaacaaaagcaaacaaaaaagaaatctctctataaaatgaataaaatgtttaagaaaagagaaagagaaaaaaaaaaaaaaaaaaaaaaaaaaaaaaaaaaaaaaaaaaaaaaaaaaaataaaaaaaaaaaaaaaagaaaaaaaaaaaaaaaacaagaaaaaagagaggggcgggcgggcgagtaatataatatctccaggcgggagggaagcaatagtacgcaccgacgacgaatgtattagagaagaagaggccccaaccagtgaggggggctaactatatataaagaaaagagcgaagggcgaggtagtattaaataaaaccaactgctgagagagggaaaagaagcatatgagagtagtatgtgttaggaagagacacaaactatgttggggaagaggaaaaaggaaggggacaaatactcagcaaagataaatagacgctgaggaacataaaacaacgagtatgttaatgttaaacgacgagatattatagtgggatagaagatatagctcgggaagataataaaaataattaggg

SEQ ID NO: 297557 - DNA, 952 bp, Homo sapiens
tctagaggatccctggagatcatgagtgttatagagagcaagaggtagaggggcaccatcaggggctcttgcactattttcacctctaaatattacgtactcagtagtgccctgcttctagggctctgaatacgggcttaaagtcatcttgtcctgctggaatttgctgtgcagagccataagcctcccattttgttagcgtcagctaggccaataggaacagaccgggaccttgtctcacactgatgatacctcacatgttgaccggctatgtgaactgcctatttcctatgctggagttttgatttttaactaaacgcaaatctgtagattctctcctctcccatcccagaaaacaaaacaaaataatgcttttcgaaattgtttctaggactttaaaacataatggtatatccaaaattctttatttcagaatgcaacaatagattccattaatatagactcaagatcaaaacagcatacctgctaagctaagatagatggtgttgattccactgggttttgatcaatacaataacaaacctttttcctttgacatactctgaattttgttgtttggggggagggggtgtgtgtgtgtgtgtgtgtgtgtgtgtgtatgtgtgtgtgtgtgtgtgcacgcgcagtgtccatcagtatcagtgcctgcctgagttaggaaaattacattcctggttctgtattgaggagaaggatgtataaagcaacatgaaacattagccctccttttattttaaagactaatgttaattgttcttaaaactggattttttttccttaaagcaatttttttcttttcgatttaatgaagtattgctagctgaagccagtttgacatagagagatgtcagattgatttgaaaggtgtgcagcctgatttaaaaccaaaccctgaacccttttaaagaacaataaaacatattttacacgc

SEQ ID NO: 297558 - DNA, 1353 bp, Homo sapiens
gctcgaatgcgaggaatcgctgccatgtaatcccagctctcaggcatattaagaggtggaaaaatacttggagcctgtgagttcgaaactggcctgtatatgttagggagagccgttctctagatagacggttgataatacataggttttatgagattaaacattttgggaatcccgtggtctacaaaacaactttgtatgccctagttggagtttgtgtccacacgcccataagtagggtagcaaaggtagacacatcgtgcacccccaagagagtcgtgaacgggactgtgtggctgggtgaaccccggagtaaaaaaacatggggggggataactgggctgttttgaaacagtaccggaatagagagaacagcgggacaactgggcctttgtgcaaaggcgagtccatagatcaggctgattgaaaaagccgcacggggtaggtagaggggcaccatcaggggctcttgcactattttcacctctaaatattacgtactcagtagtgccctgcttctagggctctgaatacgggcttaaagtcatcttgtcctgctggaatttgctgtgcagagccataagcctcccattttgttagcgtcagctaggccaataggaacagaccgggaccttgtctcacactgatgatacctcacatgttgaccggctatgtgaactgcctatttcctatgctggagttttgatttttaactaaacgcaaatctgtagattctctcctctcccatcccagaaaacaaaacaaaataatgcttttcgaaattgtttctaggactttaaaacataatggtatatccaaaattctttatttcagaatgcaacaatagattccattaatatagactcaagatcaaaacagcatacctgctaagctaagatagatggtgttgattccactgggttttgatcaatacaataacaaacctttttcctttgacatactctgaattttgttgtttggggggagggggtgtgtgtgtgtgtgtgtgtgtgtgtgtgtatgtgtgtgtgtgtgtgtgcacgcgcagtgtccatcagtatcagtgcctgcctgagttaggaaaattacattcctggttctgtattgaggagaaggatgtataaagcaacatgaaacattagccctccttttattttaaagactaatgttaattgttcttaaaactggattttttttccttaaagcaatttttttcttttcgatttaatgaagtattgctagctgaagccagtttgacatagagagatgtcagattgatttgaaaggtgtgcagcctgatttaaaaccaaaccctgaacccttttaaagaacaataaaacatattttacacgc

SEQ ID NO: 297559 - DNA, 987 bp, Homo sapiens
aatgcttgtggtatgtgttttccaaactgcccctctacctgctttgtccatgcagcctgatcataactgccttccacaggtagaggggcaccatcaggggctcttgcactattttcacctctaaatattacgtactcagtagtgccctgcttctagggctctgaatacgggcttaaagtcatcttgtcctgctggaatttgctgtgcagagccataagcctcccattttgttagcgtcagctaggccaataggaacagaccgggaccttgtctcacactgatgatacctcacatgttgaccggctatgtgaactgcctatttcctatgctggagttttgatttttaactaaacgcaaatctgtagattctctcctctcccatcccagaaaacaaaacaaaataatgcttttcgaaattgtttctaggactttaaaacataatggtatatccaaaattctttatttcagaatgcaacaatagattccattaatatagactcaagatcaaaacagcatacctgctaagctaagatagatggtgttgattccactgggttttgatcaatacaataacaaacctttttcctttgacatactctgaattttgttgtttggggggagggggtgtgtgtgtgtgtgtgtgtgtgtgtgtgtatgtgtgtgtgtgtgtgtgcacgcgcagtgtccatcagtatcagtgcctgcctgagttaggaaaattacattcctggttctgtattgaggagaaggatgtataaagcaacatgaaacattagccctccttttattttaaagactaatgttaattgttcttaaaactggattttttttccttaaagcaatttttttcttttcgatttaatgaagtattgctagctgaagccagtttgacatagagagatgtcagattgatttgaaaggtgtgcagcctgatttaaaaccaaaccctgaacccttttaaagaacaataaaacatattttacacgc

SEQ ID NO: 297560 - DNA, 1679 bp, Homo sapiens
agcggggcggggcgggagctggttccggctgcgcgcgcagcggtggtggtggcggcgcgatcggccgggctgtaaccgtcgtctgtccgggagcggctggagcggcagcggcggccgggcacggcgcgaggtgacgccacagggcagcggcggcagcggaggcagcggcggcagcaggagacgcagcggcggccgcagcagcagcagcaagacggactcgtggagacgcgccgccgccgccgccgccgggccgggccgggtgtcgcgcgccgaggctgggggggagtcgtcgccgccgccgccaccgctaccgccgccgccgccgccgccgaggtgactgaggagagaggcgcctcctcgctcccgccaccgccggacttcaatgcccagtccccagctcgccagcgtttttcgttggaatatacgttgcacatttatggcgattctgagtgtgagggcagacttctgccaggctcagcacagcattttcgctgacaagtgagcttggaggttctatgtgccataattaacattgccttgaagactcctggacaccgagactggcctcagaaatagttggctttttttttttttaattgcaagcatatttcttttaatgactccagtaaaattaagcatcaagtaaacaagtggaaagtgacctacacttttaacttgtctcactagtgcctaaatgtagtaaaggctgcttaagttttgtatgtagttggattttttggagtccgaaggtatccatctgcagaaattgaggcccaaattgaatttggattcaagtggattctaaatactttgcttatcttgaagagagaagcttcataaggaataaacaagttgaatagagaaaacactgattgataataggcattttagtggtctttttaatgttttctgctgtgaaacatttcaagatttattgatttttttttttcactttccccatcacactcacacgcacgctcacactttttatttgccataatgaaccgtccagcccctgtggagatctcctatgagaacatgcgttttctgataactcacaaccctaccaatgctactctcaacaagttcacagaggaacttaagaagtatggagtgacgactttggttcgagtttgtgatgctacatatgataaagctccagttgaaaaagaaggaatccacgttctagattggccatttgatgatggagctccaccccctaatcagatagtagatgattggttaaacctgttaaaaaccaaatttcgtgaagagccaggttgctgtgttgcagtgcattgtgttgcaggattgggaagggcacctgtgctggttgcacttgctttgattgaatgtgtgtgtgtgcacgcgcagtgtccatcagtatcagtgcctgcctgagttaggaaaattacattcctggttctgtattgaggagaaggatgtataaagcaacatgaaacattagccctccttttattttaaagactaatgttaattgttcttaaaactggattttttttccttaaagcaatttttttcttttcgatttaatgaagtattgctagctgaagccagtttgacatagagagatgtcagattgatttgaaaggtgtgcagcctgatttaaaaccaaaccctgaacccttttaaagaacaataaaacatattttacacgc

SEQ ID NO: 297561 - DNA, 2044 bp, Homo sapiens
agcggggcggggcgggagctggttccggctgcgcgcgcagcggtggtggtggcggcgcgatcggccgggctgtaaccgtcgtctgtccgggagcggctggagcggcagcggcggccgggcacggcgcgaggtgacgccacagggcagcggcggcagcggaggcagcggcggcagcaggagacgcagcggcggccgcagcagcagcagcaagacggactcgtggagacgcgccgccgccgccgccgccgggccgggccgggtgtcgcgcgccgaggctgggggggagtcgtcgccgccgccgccaccgctaccgccgccgccgccgccgccgaggtgactgaggagagaggcgcctcctcgctcccgccaccgccggacttcaatgcccagtccccagctcgccagcgtttttcgttggaatatacgttgcacatttatggcgattctgagtgtgagggcagacttctgccaggctcagcacagcattttcgctgacaagtgagcttggaggttctatgtgccataattaacattgccttgaagactcctggacaccgagactggcctcagaaatagttggctttttttttttttaattgcaagcatatttcttttaatgactccagtaaaattaagcatcaagtaaacaagtggaaagtgacctacacttttaacttgtctcactagtgcctaaatgtagtaaaggctgcttaagttttgtatgtagttggattttttggagtccgaaggtatccatctgcagaaattgaggcccaaattgaatttggattcaagtggattctaaatactttgcttatcttgaagagagaagcttcataaggaataaacaagttgaatagagaaaacactgattgataataggcattttagtggtctttttaatgttttctgctgtgaaacatttcaagatttattgatttttttttttcactttccccatcacactcacacgcacgctcacactttttatttgccataatgaaccgtccagcccctgtggagatctcctatgagaacatgcgttttctgataactcacaaccctaccaatgctactctcaacaagttcacagaggaacttaagaagtatggagtgacgactttggttcgagtttgtgatgctacatatgataaagctccagttgaaaaagaaggaatccacgttctagattggccatttgatgatggagctccaccccctaatcagatagtagatgattggttaaacctgttaaaaaccaaatttcgtgaagagccaggttgctgtgttgcagtgcattgtgttgcaggattgggaagggcacctgtgctggttgcacttgctttgattgaatgtggaatgaagtacgaagatgcagttcagtttataagacaaggacacaaaaagaaaggggagcgtttaaatttccaaaaaggtgggttaatttgggagaaattatcggagcttataaatggaattagctttagaagattaccaatgggcgattggcgtgggttccacgtaaaaggaatggttgtaccgagagggtggacgcttggaagttggtgcccacttttgaagggggaactctctggggtaccctgggaaaattggtgaattctggggaatatttacctggtgtgcatctaaaggtagtggagggggttccggggactccctcaaacaactcctctcttatatggagtgggggaccacaaagccgaaaaccaaaaaagaaaatctctctattataatcggtggcttacctggtgttaagaaaaacgagacgagagcagaagggggttttatttcaggggaaagggaggagtttgcggcctaagtgttgggaggtttggaggttttctgcgccggagttgggagttattttttgagaatcttcccgggctctttttaaacttttttccaaaataagggtctctaaaggaaaaacccagcgagaaacattagccctgtgggagaaaccatctggtgtgggggagcacaccttcttcccatttatgccttggggacataagatctcccg

SEQ ID NO: 297562 - DNA, 1639 bp, Homo sapiens
agcggggcggggcgggagctggttccggctgcgcgcgcagcggtggtggtggcggcgcgatcggccgggctgtaaccgtcgtctgtccgggagcggctggagcggcagcggcggccgggcacggcgcgaggtgacgccacagggcagcggcggcagcggaggcagcggcggcagcaggagacgcagcggcggccgcagcagcagcagcaagacggactcgtggagacgcgccgccgccgccgccgccgggccgggccgggtgtcgcgcgccgaggctgggggggagtcgtcgccgccgccgccaccgctaccgccgccgccgccgccgccgaggtgactgaggagagaggcgcctcctcgctcccgccaccgccggacttcaatgcccagtccccagctcgccagcgtttttcgttggaatatacgttgcacatttatggcgattctgagtgtgagggcagacttctgccaggctcagcacagcattttcgctgacaagtgagcttggaggttctatgtgccataattaacattgccttgaagactcctggacaccgagactggcctcagaaatagttggctttttttttttttaattgcaagcatatttcttttaatgactccagtaaaattaagcatcaagtaaacaagtggaaagtgacctacacttttaacttgtctcactagtgcctaaatgtagtaaaggctgcttaagttttgtatgtagttggattttttggagtccgaaggtatccatctgcagaaattgaggcccaaattgaatttggattcaagtggattctaaatactttgcttatcttgaagagagaagcttcataaggaataaacaagttgaatagagaaaacactgattgataataggcattttagtggtctttttaatgttttctgctgtgaaacatttcaagatttattgatttttttttttcactttccccatcacactcacacgcacgctcacactttttatttgccataatgaaccgtccagcccctgtggagatctcctatgagaacatgcgttttctgataactcacaaccctaccaatgctactctcaacaagttcacagaggaacttaagaagtatggagtgacgactttggttcgagtttgtgatgctacatatgataaagctccagttgaaaaagaaggaatccacgttctagattggccatttgatgatggagctccaccccctaatcagatagtagatgattggttaaacctgttaaaaaccaaatttcgtgaagagccaggttgctgtgttgcagtgcattgtgttgcaggattgggaagaaaaagaaggggagcgttcaattccaaacagctgctttatttggagaaataccgacctaagatgcgattacgcttcagagataccaatgggcattgctgtgttcagtagaaggaaatgtaaacgaaggctgacttgattgtgccatttagagggaactcttggtacctggaaatgtgaatctggaatattacctgtgtcatcaaagtagtgatggattcagtactcctcaaccactctcctaatgattggaacaaaagcaaacaaaaaagaaatctctctataaaatgaataaaatgtttaagaaaagagaaagagaaaa

SEQ ID NO: 297563 - DNA, 1490 bp, Homo sapiens
agcggggcggggcgggagctggttccggctgcgcgcgcagcggtggtggtggcggcgcgatcggccgggctgtaaccgtcgtctgtccgggagcggctggagcggcagcggcggccgggcacggcgcgaggtgacgccacagggcagcggcggcagcggaggcagcggcggcagcaggagacgcagcggcggccgcagcagcagcagcaagacggactcgtggagacgcgccgccgccgccgccgccgggccgggccgggtgtcgcgcgccgaggctgggggggagtcgtcgccgccgccgccaccgctaccgccgccgccgccgccgccgaggtgactgaggagagaggcgcctcctcgctcccgccaccgccggacttcaatgcccagtccccagctcgccagcgtttttcgttggaatatacgttgcacatttatggcgattctgagtgtgagggcagacttctgccaggctcagcacagcattttcgctgacaagtgagcttggaggttctatgtgccataattaacattgccttgaagactcctggacaccgagactggcctcagaaatagttggctttttttttttttaattgcaagcatatttcttttaatgactccagtaaaattaagcatcaagtaaacaagtggaaagtgacctacacttttaacttgtctcactagtgcctaaatgtagtaaaggctgcttaagttttgtatgtagttggattttttggagtccgaaggtatccatctgcagaaattgaggcccaaattgaatttggattcaagtggattctaaatactttgcttatcttgaagagagaagcttcataaggaataaacaagttgaatagagaaaacactgattgataataggcattttagtggtctttttaatgttttctgctgtgaaacatttcaagatttattgatttttttttttcactttccccatcacactcacacgcacgctcacactttttatttgccataatgaaccgtccagcccctgtggagatctcctatgagaacatgcgttttctgataactcacaaccctaccaatgctactctcaacaagttcacagagggtaagattgtggcatggtctactttttggattgatttctaggtaaaatcccattaaaaaattctcttagcacaaagccatttattctgtatttggagtcatcctgccaatcctggtttgaattgggttgggttagttacagcagattttttcaagaacattttgtgaaatttggggactgtagagatatctagtactgttttctctgtgttctttctacatttattgacaggtttttttggtcaaacattcagtaatgataattaacatttattgaccacgatatgcacttagcattataacaaacaatgttacacattatgcaacgagcagtgtttgtgcttaaggtcacaaatacaaaaaccctatgaggtgtagctaccattatttccctc

SEQ ID NO: 297564 - DNA, 173 bp, Homo sapiens
tgttactattcagtgagggaaggaattgattagtattaatttcctcctgtgctacaggtgctttttatattcatttaattctcacaactacaagaaaggtggtatcttcatttgcatccatttagcttattttgaatcacttctatttgccaggcactagggatacagcgatg

SEQ ID NO: 297565 - DNA, 327 bp, Homo sapiens
ccgacctcaggtgatctgcctgcctcagcctcccaaagtgctaggattacaggcatcagccaccacacccggctcgagtctctgatttttaaaactcttcataatacccctttatccaattcttcatagatggtaataacgtataattggtgacatttcacatcgctttgggcttataaagaatgtattttgacttcaggcatttgtgtttactgtgccatcagcctctagttcattttacttattcttttcttctccaggtttttcgttggaatatacgttgcacatttatggcgattctgagtgtgagggcagacttctgccagg

SEQ ID NO: 297566 - DNA, 164 bp, Homo sapiens
atgtgggaaactttaagagggtccagttgtacttcaacaaaatatcacaggtaacactgggagattctgaggcagaaacgaaagcaacatcttttcccactggtaacattctgaaaaacacccgagaaagagaagtcccccaaagcacagcaatacggccccgc

SEQ ID NO: 297567 - DNA, 1536 bp, Homo sapiens
gcgcggaagtggcggcggcgcgcctggcctggcctggctgaggggaggcggcgggcgggcgcgatggcggaggccgggccacaggcgccgccgcccccgggcactccaagccggcacgaaaagagcctgggactgctcaccaccaagttcgtgtcccttctgcaggaggccaaggacggcgtgcttgacctcaagctggcagctgacaccctagctgtacgccagaagcggcggatttacgacattaccaatgttttggaaggtatcgggctaatcgagaaaaagtccaagaacagcatccagtggaagggtgtggggcctggctgcaatacccgggagattgctgacaaactgattgagctcaaggcagagatcgaggagctgcagcagcgggagcaagaactagaccagcacaaggtgtgggtgcagcagagcatccggaacgtcacagaggacgtgcagaacagctgtttggcctacgtcactcatgaggacatctgcagatgctttgctggagataccctcttggccatccgggccccatcaggcaccagcctggaggtgcccatcccagagggtctcaatgggcagaagaagtaccagattcacctgaagagtgtgagtggtcccattgaggttctgctggtgaacaaggaggcatggagctcaccccctgtggctgtgcctgtgccaccacctgaagatttgctccagagcccatctgctgtttctacacctccacctctgcccaagcctgccctagcccagtcccaggaagcctcacgtccaaatagtcctcagctcactcccactgctgtccctggcagtgcagaagtccagggaatggctggcccagcagctgagatcacagtgagtggcggccctgggactgatagcaaggacagtggtgagctcagttcactcccactgggcccaacaacactggacacccggccactgcagtcttctgccctgctggacagcagcagcagcagcagcagcagcagcagcagcagcagcaacagtaacagcagcagttcgtccggacccaacccttctacctcctttgagcccatcaaggcagaccccacaggtgttttggaactccccaaagagctgtcagaaatctttgatcccacacgagagtgcatgagctcggagctgctggaggagttgatgtcctcagaagtgtttgcccctctgcttcgtctttctccacccccgggagaccacgattatatctacaacctggacgagagtgaaggtgtctgtgacctctttgatgtgcctgttctcaacctctgactgacagggacatgccctgtgtggctgggacccagactgtctgacctgggggttgcctggggacctctcccacccgacccctacagagcttgagagccacagacgcctggcttctccggcctcccctcaccgcacagttctggccacagctcccgctcctgtgctggcacttctgtgctcgcacttctgtgctccgcagagggtttctgcgccttcgccagcccaggtcgg

SEQ ID NO: 297568 - DNA, 1193 bp, Homo sapiens
gcgcggaagtggcggcggcgcgcctggcctggcctggctgaggggaggcggcgggcgggcgcgatggcggaggccgggccacaggcgccgccgcccccgggcactccaagccggcacgaaaagagcctgggactgctcaccaccaagttcgtgtcccttctgcaggaggccaaggacggcgtgcttgacctcaagctggcagctgacaccctagctgtacgccagaagcggcggatttacgacattaccaatgttttggaaggtatcgggctaatcgagaaaaagtccaagaacagcatccagtggaagggtgtggggcctggctgcaatacccgggagattgctgacaaactgattgagctcaaggcagagatcgaggagctgcagcagcgggagcaagaactagaccagcacaaggtgtgggtgcagcagagcatccggaacgtcacagaggacgtgcagaacagctgtttggcctacgtcactcatgaggacatctgcagatgctttgctggagataccctcttggccatccgggccccatcaggcaccagcctggaggtgcccatcccagagggtctcaatgggcagaagaagtaccagattcacctgaagagtgtgagtggtcccattgaggttctgctggtgaacaaggaggcatggagctcaccccctgtggctgtgcctgtgccaccacctgaagatttgctccagagcccatctgctgtttctacacctccacctctgcccaagcctgccctagcccagtcccaggaagcctcacgtccaaatagtcctcagctcactcccactgctgtccctggcagtgcagaagtccagggaatggctggcccagcagctgagatcacagtgagtggcggccctgggactgatagcaaggacagtggtgagctcagttcactcccactgggcccaacaacactggacacccggccactgcagtcttctgccctgctggatgctgctaaagttccagcaaaaaagatcaccgccgcgagtaaaaaggctccagcccagaaggttcctgcccagaaagccacaggccagaaagcagcgcctgctccaaaagctcagaagggtcaaaaagctccagcccagaaagcacctgctccaaaggcatctggcaagaaagcataagtggcaatcataaaaagtaataaaggttctttttg

SEQ ID NO: 297569 - DNA, 2100 bp, Homo sapiens
gcgcggaagtggcggcggcgcgcctggcctggcctggctgaggggaggcggcgggcgggcgcgatggcggaggccgggccacaggcgccgccgcccccgggcactccaagccggcacgaaaagagcctgggactgctcaccaccaagttcgtgtcccttctgcaggaggccaaggacggcgtgcttgacctcaagctggcagctgacaccctagctgtacgccagaagcggcggatttacgacattaccaatgttttggaaggtatcgggctaatcgagaaaaagtccaagaacagcatccagtggaagggtgtggggcctggctgcaatacccgggagattgctgacaaactgattgagctcaaggcagagatcgaggagctgcagcagcgggagcaagaactagaccagcacaaggtgtgggtgcagcagagcatccggaacgtcacagaggacgtgcagaacagctgtttggcctacgtcactcatgaggacatctgcagatgctttgctggagataccctcttggccatccgggccccatcaggcaccagcctggaggtgcccatcccagagggtctcaatgggcagaagaagtaccagattcacctgaagagtgtgagtggtcccattgaggttctgctggtgaacaaggaggcatggagctcaccccctgtggctgtgcctgtgccaccacctgaagatttgctccagagcccatctgctgtttctacacctccacctctgcccaagcctgccctagcccagtcccaggaagcctcacgtccaaatagtcctcagctcactcccactgctgtccctggcagtgcagaagtccagggaatggctggcccagcagctgagatcacagtgagtggcggccctgggactgatagcaaggacagtggtgagctcagttcactcccactgggcccaacaacactggacacccggccactgcagtcttctgccctgctggacagcagcagcagcagcagcagcagcagcagcagcagcagcaacagtaacagcagcagttcgtccggacccaacccttctacctcctttgagcccatcaaggcagaccccacaggtgttttggaactccccaaagagctgtcagaaatctttgatcccacacgagagtgcatgagctcggagctgctggaggagttgatgtcctcagaagtgtttgcccctctgcttcgtctttctccacccccgggagaccacgattatatctacaacctggacgagagtgaaggtgtctgtgacctctttgatgtgcctgttctcaacctctgactgacagggacatgccctgtgtggctgggacccagactgtctgacctgggggttgcctggggacctctcccacccgacccctacagagcttgagagccacagacgcctggcttctccggcctcccctcaccgcacagttctggccacagctcccgctcctgtgctggcacttctgtgctcgcagagcaggggaacaggactcagcccccatcaccgtggagccaaagtgtttgcttctccctttctgcggccttcgccagcccaggctcggctgccacccagtggcacagaaccgaggagctgccattaccccccatagggggcagtgtcttgttcctgccagcctcagtgtcttgcttctgccagctccttcccctaggagggaagggtggggtggaactgggcacatgccagcaccacttctagcttccttcgctatcccccaccccctgaccctccagctcctcctggccctctcacgtgcccacttctgctgggcctttagccctagaacctgcaggtggtgggggcggctaccaagaaggaacagaggtctctggggaggagtctgggtggtccagccctgatgattggccccacctcctgctgccccataaccctctcttcatttcggctttttcatttaccctcatttagagccatttgcagagatttagaaagatttacagtaacgaatggattcctatataaagattatttttatactttttgcagcaaaaggaaattgtaatatttgtacagtgttcaagtgaataaaaaccatgcctaaggcta

SEQ ID NO: 297570 - DNA, 2462 bp, Homo sapiens
  misc_feature (2106)..(2106): n is a, c, g, or t
  misc_feature (2109)..(2109): n is a, c, g, or t
gcgcggaagtggcggcggcgcgcctggcctggcctggctgaggggaggcggcgggcgggcgcgatggcggaggccgggccacaggcgccgccgcccccgggcactccaagccggcacgaaaagagcctgggactgctcaccaccaagttcgtgtcccttctgcaggaggccaaggacggcgtgcttgacctcaagctggcagctgacaccctagctgtacgccagaagcggcggatttacgacattaccaatgttttggaaggtatcgggctaatcgagaaaaagtccaagaacagcatccagtggaagggtgtggggcctggctgcaatacccgggagattgctgacaaactgattgagctcaaggcagagatcgaggagctgcagcagcgggagcaagaactagaccagcacaaggtgtgggtgcagcagagcatccggaacgtcacagaggacgtgcagaacagctgtttggcctacgtcactcatgaggacatctgcagatgctttgctggagataccctcttggccatccgggccccatcaggcaccagcctggaggtgcccatcccagagggtctcaatgggcagaagaagtaccagattcacctgaagagtgtgagtggtcccattgaggttctgctggtgaacaaggaggcatggagctcaccccctgtggctgtgcctgtgccaccacctgaagatttgctccagagcccatctgctgtttctacacctccacctctgcccaagcctgccctagcccagtcccaggaagcctcacgtccaaatagtcctcagctcactcccactgctgtccctggcagtgcagaagtccagggaatggctggcccagcagctgagatcacagtgagtggcggccctgggactgatagcaaggacagtggtgagctcagttcactcccactgggcccaacaacactggacacccggccactgcagtcttctgccctgctggacagcagcagcagcagcagcagcagcagcagcagcagcagcaacagtaacagcagcagttcgtccggacccaacccttctacctcctttgagcccatcaaggcagaccccacaggtgttttggaactccccaaagagctgtcagaaatctttgatcccacacgagagtgcatgagctcggagctgctggaggagttgatgtcctcagaagtgtttgcccctctgcttcgtctttctccacccccgggagaccacgattatatctacaacctggacgagagtgaaggtgtctgtgacctctttgatgtgcctgttctcaacctctgactgacagggacatgccctgtgtggctgggacccagactgtctgacctgggggttgcctggggacctctcccacccgacccctacagagcttgagagccacagacgcctggcttctccggcctcccctcaccgcacagttctggccacagctcccgctcctgtgctggcacttctgtgctcgcagagcaggggaacaggactcagcccccatcaccgtggagccaaagtgtttgcttctccctttctgcggccttcgccagcccaggctcggctgccacccagtggcacagaaccgaggagctgccattaccccccatagggggcagtgtcttgttcctgccagcctcagtgtcttgcttctgccagctccttcccctaggagggaagggtggggtggaactgggcacatgccagcaccacttctagcttccttcgctatcccccaccccctgaccctccagctcctcctggccctctcacgtgcccacttctgctgggcctttagccctagaacctgcaggtggtgggggcggctaccaagaaggaacagaggtctctggggaggagtctgggtggtccagccctgatgattggccccacctcctgctgccccataaccctctcttcatttcggctttttcatttaccctcatttagagccatttgcagagatttagaaagatttacagtaacgaatggattcctatataaagattatttttatactttttgcagcaaaaggaaattgtaatatttgtacagtgttcaagtgaataaaaaccatgcctaaggctaaaaaanaanaaaaaaaaaaaaaaaaaaaaaaaaaaaaaaaaaaaaaaaaaaaaaaaaaaaaaaaaaaaaaaaaaaaaaaaaaaaaaaaaaaaaaaaaaaataataaaaaaaaaatttccaataatgagacataatatcgattgattaaccgttagagttcaaagttcaaaaccgctttaaccctgaaataacccaatttaacttgacatgggacacatatcagctaaattgaccttctttaaaaattaacaaactttgaaaaaaccgcgctttttaccattttcccaacttgaatgaaaatctcaaaattgaaagccttattaatctgtaaaaattctcgaaaaattggaatttaaataaga

SEQ ID NO: 297571 - DNA, 2149 bp, Homo sapiens
  misc_feature (76)..(76): n is a, c, g, or t
tcaaagacgaaagcaacaacgacccaccgcacacacacaacaacaaagagaaccaaaaggggcaggtacgaggccnggtgttctggctgaggggaggcggcgggcgggcgcgatggcggaggccgggccacaggcgccgccgcccccgggcactccaagccggcacgaaaagagcctgggactgctcaccaccaagttcgtgtcccttctgcaggaggccaaggacggcgtgcttgacctcaagctggcagctgacaccctagctgtacgccagaagcggcggatttacgacattaccaatgttttggaaggtatcgggctaatcgagaaaaagtccaagaacagcatccagtggaagggtgtggggcctggctgcaatacccgggagattgctgacaaactgattgagctcaaggcagagatcgaggagctgcagcagcgggagcaagaactagaccagcacaaggtgtgggtgcagcagagcatccggaacgtcacagaggacgtgcagaacagctgtttggcctacgtcactcatgaggacatctgcagatgctttgctggagataccctcttggccatccgggccccatcaggcaccagcctggaggtgcccatcccagagggtctcaatgggcagaagaagtaccagattcacctgaagagtgtgagtggtcccattgaggttctgctggtgaacaaggaggcatggagctcaccccctgtggctgtgcctgtgccaccacctgaagatttgctccagagcccatctgctgtttctacacctccacctctgcccaagcctgccctagcccagtcccaggaagcctcacgtccaaatagtcctcagctcactcccactgctgtccctggcagtgcagaagtccagggaatggctggcccagcagctgagatcacagtgagtggcggccctgggactgatagcaaggacagtggtgagctcagttcactcccactgggcccaacaacactggacacccggccactgcagtcttctgccctgctggacagcagcagcagcagcagcagcagcagcagcagcagcagcaacagtaacagcagcagttcgtccggacccaacccttctacctcctttgagcccatcaaggcagaccccacaggtgttttggaactccccaaagagctgtcagaaatctttgatcccacacgagagtgcatgagctcggagctgctggaggagttgatgtcctcagaagtgtttgcccctctgcttcgtctttctccacccccgggagaccacgattatatctacaacctggacgagagtgaaggtgtctgtgacctctttgatgtgcctgttctcaacctctgactgacagggacatgccctgtgtggctgggacccagactgtctgacctgggggttgcctggggacctctcccacccgacccctacagagcttgagagccacagacgcctggcttctccggcctcccctcaccgcacagttctggccacagctcccgctcctgtgctggcacttctgtgctcgcagagcaggggaacaggactcagcccccatcaccgtggagccaaagtgtttgcttctccctttctgcggccttcgccagcccaggctcggctgccacccagtggcacagaaccgaggagctgccattaccccccatagggggcagtgtcttgttcctgccagcctcagtgtcttgcttctgccagctccttcccctaggagggaagggtggggtggaactgggcacatgccagcaccacttctagcttccttcgctatcccccaccccctgaccctccagctcctcctggccctctcacgtgcccacttctgctgggcctttagccctagaacctgcaggtggtgggggcggctaccaagaaggaacagaggtctctggggaggagtctgggtggtccagccctgatgattggccccacctcctgctgccccataaccctctcttcatttcggctttttcatttaccctcatttagagccatttgcagagatttagaaagatttacagtaacgaatggattcctatataaagattatttttatactttttgcagcaaaaggaaattgtaatatttgtacagtgttcaagtgaataaaaaccatgcctaaggcta

SEQ ID NO: 297572 - DNA, 2122 bp, Homo sapiens
gcgcggaagtggcggcggcgcgcctggcctggcctggctgaggggaggcggcgggcgggcgcgatggcggaggccgggccacaggcgccgccgcccccgggcactccaagccggcacgaaaagagcctgggactgctcaccaccaagttcgtgtcccttctgcaggaggccaaggacggcgtgcttgacctcaagctggcagctgacaccctagctgtacgccagaagcggcggatttacgacattaccaatgttttggaaggtatcgggctaatcgagaaaaagtccaagaacagcatccagtggaagggtgtggggcctggctgcaatacccgggagattgctgacaaactgattgagctcaaggcagagatcgaggagctgcagcagcgggagcaagaactagaccagcacaaggtgtgggtgcagcagagcatccggaacgtcacagaggacgtgcagaacagctgtttggcctacgtcactcatgaggacatctgcagatgctttgctggagataccctcttggccatccgggccccatcaggcaccagcctggaggtgcccatcccagagggtctcaatgggcagaagaagtaccagattcacctgaagagtgtgagtggtcccattgaggttctgctggtgaacaaggaggcatggagctcaccccctgtggctgtgcctgtgccaccacctgaagatttgctccagagcccatctgctgtttctacacctccacctctgcccaagcctgccctagcccagtcccaggaagcctcacgtccaaatagtcctcagctcactcccactgctgtccctggcagtgcagaagtccagggaatggctggcccagcagctgagatcacagtgagtggcggccctgggactgatagcaaggacagtggtgagctcagttcactcccactgggcccaacaacactggacacccggccactgcagtcttctgccctgctggacagcagccagcagcagcagcagcagcagcagcagcagcagcagcagcagcagcagcagcagcaacagtaacagcagcagttcgtccggacccaacccttctacctcctttgagcccatcaaggcagaccccacaggtgttttggaactccccaaagagctgtcagaaatctttgatcccacacgagagtgcatgagctcggagctgctggaggagttgatgtcctcagaagtgtttgcccctctgcttcgtctttctccacccccgggagaccacgattatatctacaacctggacgagagtgaaggtgtctgtgacctctttgatgtgcctgttctcaacctctgactgacagggacatgccctgtgtggctgggacccagactgtctgacctgggggttgcctggggacctctcccacccgacccctacagagcttgagagccacagacgcctggcttctccggcctcccctcaccgcacagttctggccacagctcccgctcctgtgctggcacttctgtgctcgcagagcaggggaacaggactcagcccccatcaccgtggagccaaagtgtttgcttctccctttctgcggccttcgccagcccaggctcggctgccacccagtggcacagaaccgaggagctgccattaccccccatagggggcagtgtcttgttcctgccagcctcagtgtcttgcttctgccagctccttcccctaggagggaagggtggggtggaactgggcacatgccagcaccacttctagcttccttcgctatcccccaccccctgaccctccagctcctcctggccctctcacgtgcccacttctgctgggcctttagccctagaacctgcaggtggtgggggcggctaccaagaaggaacagaggtctctggggaggagtctgggtggtccagccctgatgattggccccacctcctgctgccccataaccctctcttcatttcggctttttcatttaccctcatttagagccatttgcagagatttagaaagatttacagtaacgaatggattcctatataaagattatttttatactttttgcagcaaaaggaaattgtaatatttgtacagtgttcaagtgaataaaaaccatgcctaaggcta

SEQ ID NO: 297573 - DNA, 2287 bp, Homo sapiens
  misc_feature (76)..(76): n is a, c, g, or t
tcaaagacgaaagcaacaacgacccaccgcacacacacaacaacaaagagaaccaaaaggggcaggtacgaggccnggtgttctggctgaggggaggcggcgggcgggcgcgatggcggaggccgggccacaggcgccgccgcccccgggcactccaagccggcacgaaaagagcctgggactgctcaccaccaagttcgtgtcccttctgcaggaggccaaggacggcgtgcttgacctcaagctggcagctgacaccctagctgtacgccagaagcggcggatttacgacattaccaatgttttggaaggtatcgggctaatcgagaaaaagtccaagaacagcatccagtggaagtgagtgggcatagtgggagggtagtagagtctcccacccagaagtgtcgggcgtggggtggagggtgccgaagaaggcaggggccatgggacccagagttctcagcagtccctctcagccccactccctgggctcaggggtgtggggcctggctgcaatacccgggagattgctgacaaactgattgagctcaaggcagagatcgaggagctgcagcagcgggagcaagaactagaccagcacaaggtgtgggtgcagcagagcatccggaacgtcacagaggacgtgcagaacagctgtttggcctacgtcactcatgaggacatctgcagatgctttgctggagataccctcttggccatccgggccccatcaggcaccagcctggaggtgcccatcccagagggtctcaatgggcagaagaagtaccagattcacctgaagagtgtgagtggtcccattgaggttctgctggtgaacaaggaggcatggagctcaccccctgtggctgtgcctgtgccaccacctgaagatttgctccagagcccatctgctgtttctacacctccacctctgcccaagcctgccctagcccagtcccaggaagcctcacgtccaaatagtcctcagctcactcccactgctgtccctggcagtgcagaagtccagggaatggctggcccagcagctgagatcacagtgagtggcggccctgggactgatagcaaggacagtggtgagctcagttcactcccactgggcccaacaacactggacacccggccactgcagtcttctgccctgctggacagcagcagcagcagcagcagcagcagcagcagcagcagcaacagtaacagcagcagttcgtccggacccaacccttctacctcctttgagcccatcaaggcagaccccacaggtgttttggaactccccaaagagctgtcagaaatctttgatcccacacgagagtgcatgagctcggagctgctggaggagttgatgtcctcagaagtgtttgcccctctgcttcgtctttctccacccccgggagaccacgattatatctacaacctggacgagagtgaaggtgtctgtgacctctttgatgtgcctgttctcaacctctgactgacagggacatgccctgtgtggctgggacccagactgtctgacctgggggttgcctggggacctctcccacccgacccctacagagcttgagagccacagacgcctggcttctccggcctcccctcaccgcacagttctggccacagctcccgctcctgtgctggcacttctgtgctcgcagagcaggggaacaggactcagcccccatcaccgtggagccaaagtgtttgcttctccctttctgcggccttcgccagcccaggctcggctgccacccagtggcacagaaccgaggagctgccattaccccccatagggggcagtgtcttgttcctgccagcctcagtgtcttgcttctgccagctccttcccctaggagggaagggtggggtggaactgggcacatgccagcaccacttctagcttccttcgctatcccccaccccctgaccctccagctcctcctggccctctcacgtgcccacttctgctgggcctttagccctagaacctgcaggtggtgggggcggctaccaagaaggaacagaggtctctggggaggagtctgggtggtccagccctgatgattggccccacctcctgctgccccataaccctctcttcatttcggctttttcatttaccctcatttagagccatttgcagagatttagaaagatttacagtaacgaatggattcctatataaagattatttttatactttttgcagcaaaaggaaattgtaatatttgtacagtgttcaagtgaataaaaaccatgcctaaggcta

SEQ ID NO: 297574 - DNA, 1977 bp, Homo sapiens
gcgcggaagtggcggcggcgcgcctggcctggcctggctgaggggaggcggcgggcgggcgcgatggcggaggccgggccacaggcgccgccgcccccgggcactccaagccggcacgaaaagagcctgggactgctcaccaccaagttcgtgtcccttctgcaggaggccaaggacggcgtgcttgacctcaagctggcagctgacaccctagctgtacgccagaagcggcggatttacgacattaccaatgttttggaaggtatcgggctaatcgagaaaaagtccaagaacagcatccagtggaagggtgtggggcctggctgcaatacccgggagattgctgacaaactgattgagctcaaggcagagatcgaggagctgcagcagcgggagcaagaactagaccagcacaaggtgtgggtgcagcagagcatccggaacgtcacagaggacgtgcagaacagctgtttggcctacgtcactcatgaggacatctgcagatgctttgctggagataccctcttggccatccgggccccatcaggcaccagcctggaggtgcccatcccagagggtctcaatgggcagaagaagtaccagattcacctgaagagtgtgagtggtcccattgaggttctgctggtgaacaaggaggcatggagctcaccccctgtggctgtgcctgtgccaccacctgaagatttgctccagagcccatctgctgtttctacacctccacctctgcccaagcctgccctagcccagtcccaggaagcctcacgtccaaatagtcctcagctcactcccactgctgtccctggcagtgcagaagtccagggaatggctggcccagcagctgagatcacagtgagtggcggccctgggactgatagcaaggacagtggtgagctcagttcactcccactgggcccaacaacactggacacccggccactgcagtcttctgccctgctggacagcagcagcagcagcagcagcagcagcagcagcagcagcaacagtaacagcagcagttcgtccggacccaacccttctacctcctttgagcccatcaaggcagaccccacaggtgttttggaactccccaaagagctgtcagaaatctttgatcccacacgagagtgcatgagctcggagctgctggaggagttgatgtcctcagaagggacatgccctgtgtggctgggacccagactgtctgacctgggggttgcctggggacctctcccacccgacccctacagagcttgagagccacagacgcctggcttctccggcctcccctcaccgcacagttctggccacagctcccgctcctgtgctggcacttctgtgctcgcagagcaggggaacaggactcagcccccatcaccgtggagccaaagtgtttgcttctccctttctgcggccttcgccagcccaggctcggctgccacccagtggcacagaaccgaggagctgccattaccccccatagggggcagtgtcttgttcctgccagcctcagtgtcttgcttctgccagctccttcccctaggagggaagggtggggtggaactgggcacatgccagcaccacttctagcttccttcgctatcccccaccccctgaccctccagctcctcctggccctctcacgtgcccacttctgctgggcctttagccctagaacctgcaggtggtgggggcggctaccaagaaggaacagaggtctctggggaggagtctgggtggtccagccctgatgattggccccacctcctgctgccccataaccctctcttcatttcggctttttcatttaccctcatttagagccatttgcagagatttagaaagatttacagtaacgaatggattcctatataaagattatttttatactttttgcagcaaaaggaaattgtaatatttgtacagtgttcaagtgaataaaaaccatgcctaaggcta

SEQ ID NO: 297575 - DNA, 1695 bp, Homo sapiens
gcgtgattagaggatcccggtggcgaggagggtcggtacgtcacagacggacggcagaacagctgtttggcctacgtcactcatgaggacatctgcagatgctttgctggagataccctcttggccatccgggccccatcaggcaccagcctggaggtgcccatcccagagggtctcaatgggcagaagaagtaccagattcacctgaagagtgtgagtggtcccattgaggttctgctggtgaacaaggaggcatggagctcaccccctgtggctgtgcctgtgccaccacctgaagatttgctccagagcccatctgctgtttctacacctccacctctgcccaagcctgccctagcccagtcccaggaagcctcacgtccaaatagtcctcagctcactcccactgctgtccctggcagtgcagaagtccagggaatggctggcccagcagctgagatcacagtgagtggcggccctgggactgatagcaaggacagtggtgagctcagttcactcccactgggcccaacaacactggacacccggccactgcagtcttctgccctgctggacagcagcagcagcagcagcagcagcagcagcagcagcagcaacagtaacagcagcagttcgtccggacccaacccttctacctcctttgagcccatcaaggcagaccccacaggtgttttggaactccccaaagagctgtcagaaatctttgatcccacacgagagtgcatgagctcggagctgctggaggagttgatgtcctcagaagtgtttgcccctctgcttcgtctttctccacccccgggagaccacgattatatctacaacctggacgagagtgaaggtgtctgtgacctctttgatgtgcctgttctcaacctctgactgacagggacatgccctgtgtggctgggacccagactgtctgacctgggggttgcctggggacctctcccacccgacccctacagagcttgagagccacagacgcctggcttctccggcctcccctcaccgcacagttctggccacagctcccgctcctgtgctggcacttctgtgctcgcagagcaggggaacaggactcagcccccatcaccgtggagccaaagtgtttgcttctccctttctgcggccttcgccagcccaggctcggctgccacccagtggcacagaaccgaggagctgccattaccccccatagggggcagtgtcttgttcctgccagcctcagtgtcttgcttctgccagctccttcccctaggagggaagggtggggtggaactgggcacatgccagcaccacttctagcttccttcgctatcccccaccccctgaccctccagctcctcctggccctctcacgtgcccacttctgctgggcctttagccctagaacctgcaggtggtgggggcggctaccaagaaggaacagaggtctctggggaggagtctgggtggtccagccctgatgattggccccacctcctgctgccccataaccctctcttcatttcggctttttcatttaccctcatttagagccatttgcagagatttagaaagatttacagtaacgaatggattcctatataaagattatttttatactttttgcagcaaaaggaaattgtaatatttgtacagtgttcaagtgaataaaaaccatgcctaaggcta

SEQ ID NO: 297576 - DNA, 1593 bp, Homo sapiens
cggagtcgggcaggagccaagcctgcttacaattctacccatctcccatcccttaccacccatctctagggtctcaatgggcagaagaagtaccagattcacctgaagagtgtgagtggtcccattgaggttctgctggtgaacaaggaggcatggagctcaccccctgtggctgtgcctgtgccaccacctgaagatttgctccagagcccatctgctgtttctacacctccacctctgcccaagcctgccctagcccagtcccaggaagcctcacgtccaaatagtcctcagctcactcccactgctgtccctggcagtgcagaagtccagggaatggctggcccagcagctgagatcacagtgagtggcggccctgggactgatagcaaggacagtggtgagctcagttcactcccactgggcccaacaacactggacacccggccactgcagtcttctgccctgctggacagcagcagcagcagcagcagcagcagcagcagcagcagcaacagtaacagcagcagttcgtccggacccaacccttctacctcctttgagcccatcaaggcagaccccacaggtgttttggaactccccaaagagctgtcagaaatctttgatcccacacgagagtgcatgagctcggagctgctggaggagttgatgtcctcagaagtgtttgcccctctgcttcgtctttctccacccccgggagaccacgattatatctacaacctggacgagagtgaaggtgtctgtgacctctttgatgtgcctgttctcaacctctgactgacagggacatgccctgtgtggctgggacccagactgtctgacctgggggttgcctggggacctctcccacccgacccctacagagcttgagagccacagacgcctggcttctccggcctcccctcaccgcacagttctggccacagctcccgctcctgtgctggcacttctgtgctcgcagagcaggggaacaggactcagcccccatcaccgtggagccaaagtgtttgcttctccctttctgcggccttcgccagcccaggctcggctgccacccagtggcacagaaccgaggagctgccattaccccccatagggggcagtgtcttgttcctgccagcctcagtgtcttgcttctgccagctccttcccctaggagggaagggtggggtggaactgggcacatgccagcaccacttctagcttccttcgctatcccccaccccctgaccctccagctcctcctggccctctcacgtgcccacttctgctgggcctttagccctagaacctgcaggtggtgggggcggctaccaagaaggaacagaggtctctggggaggagtctgggtggtccagccctgatgattggccccacctcctgctgccccataaccctctcttcatttcggctttttcatttaccctcatttagagccatttgcagagatttagaaagatttacagtaacgaatggattcctatataaagattatttttatactttttgcagcaaaaggaaattgtaatatttgtacagtgttcaagtgaataaaaaccatgcctaaggcta

SEQ ID NO: 297577 - DNA, 1480 bp, Homo sapiens
gcgcggaagtggcggcggcgcgcctggcctggcctggctgaggggaggcggcgggcgggcgcgatggcggaggccgggccacaggcgccgccgcccccgggcactccaagccggcacgaaaagagcctgggactgctcaccaccaagttcgtgtcccttctgcaggaggccaaggacggcgtgcttgacctcaagctggcagctgacaccctagctgtacgccagaagcggcggatttacgacattaccaatgttttggaaggtatcgggctaatcgagaaaaagtccaagaacagcatccagtggaagggtgtggggcctggctgcaatacccgggagattgctgacaaactgattgagctcaaggcagagatcgaggagctgcagcagcgggagcaagaactagaccagcacaaggtgtgggtgcagcagagcatccggaacgtcacagaggacgtgcagaacagctgtttggcctacgtcactcatgaggacatctgcagatgctttgctggagataccctcttggccatccgggccccatcaggcaccagcctggaggtgcccatcccagagggtctcaatgggcagaagaagtaccagattcacctgaagagtgtgagtggtcccattgaggttctgctggtgaacaaggaggcatggagctcaccccctgtggctgtgcctgtgccaccacctgaagatttgctccagagcccatctgctgtttctacacctccacctctgcccaagcctgccctagcccagtcccaggaagcctcacgtccaaatagtcctcagctcactcccactgctgtccctggcagtgcagaagtccagggaatggctggcccagcagctgagatcacagtgagtggcggccctgggactgatagcaaggacagtggtgagctcagttcactcccactgggcccaacaacactggacacccggccactgcagtcttctgccctgctggacagcagcagcagcagcagcagcagcagcagcagcagcagcaacagtaacagcagcagttcgtccggacccaacccttctacctcctttgagcccatcaaggcagaccccacaggtgttttggaactccccaaagagctgtcagaaatctttgatcccacacgagagctcctcctggccctctcacgtgcccacttctgctgggcctttagccctagaacctgcaggtggtgggggcggctaccaagaaggaacagaggtctctggggaggagtctgggtggtccagccctgatgattggccccacctcctgctgccccataaccctctcttcatttcggctttttcatttaccctcatttagagccatttgcagagatttagaaagatttacagtaacgaatggattcctatataaagattatttttatactttttgcagcaaaaggaaattgtaatatttgtacagtgttcaagtgaataaaaaccatgcctaaggcta

SEQ ID NO: 297578 - DNA, 997 bp, Homo sapiens
ctggaaggtgggagtgggtgtgggcaggggttgggctgctgctaggggagccctggcccagggcctgagactagtgctctctgcagtgtttgcccctctgcttcgtctttctccacccccgggagaccacgattatatctacaacctggacgagagtgaaggtgtctgtgacctctttgatgtgcctgttctcaacctctgactgacagggacatgccctgtgtggctgggacccagactgtctgacctgggggttgcctggggacctctcccacccgacccctacagagcttgagagccacagacgcctggcttctccggcctcccctcaccgcacagttctggccacagctcccgctcctgtgctggcacttctgtgctcgcagagcaggggaacaggactcagcccccatcaccgtggagccaaagtgtttgcttctccctttctgcggccttcgccagcccaggctcggctgccacccagtggcacagaaccgaggagctgccattaccccccatagggggcagtgtcttgttcctgccagcctcagtgtcttgcttctgccagctccttcccctaggagggaagggtggggtggaactgggcacatgccagcaccacttctagcttccttcgctatcccccaccccctgaccctccagctcctcctggccctctcacgtgcccacttctgctgggcctttagccctagaacctgcaggtggtgggggcggctaccaagaaggaacagaggtctctggggaggagtctgggtggtccagccctgatgattggccccacctcctgctgccccataaccctctcttcatttcggctttttcatttaccctcatttagagccatttgcagagatttagaaagatttacagtaacgaatggattcctatataaagattatttttatactttttgcagcaaaaggaaattgtaatatttgtacagtgttcaagtgaataaaaaccatgcctaaggcta

SEQ ID NO: 297579 - DNA, 895 bp, Homo sapiens
ggatccgcggtaggttcgatcgcacgtcgttggtctcgacgctcgaatgaggaggaggtggcctgtgttgagatggaggaatgatgagtgatctgaaactggggatgaggcggatgaggatggacagaggacggaacgcatgaggaggattgatgtgcccgggacaggctgagtactacgtgttcagatgactgcctccatggcgtgtggcactgagtgcctgatccgggtcctggcgcattagtgttggctcgcggccaagaatagagtgttctcgtgatgacgaactcgcaacgaaacattgcagttatgtccttaccatgttctggcttcgtgcactttgtccggtggatttggtagtgtacgctcggctgccacccagtggcacagaaccgaggagctgccattaccccccatagggggcagtgtcttgttcctgccagcctcagtgtcttgcttctgccagctccttcccctaggagggaagggtggggtggaactgggcacatgccagcaccacttctagcttccttcgctatcccccaccccctgaccctccagctcctcctggccctctcacgtgcccacttctgctgggcctttagccctagaacctgcaggtggtgggggcggctaccaagaaggaacagaggtctctggggaggagtctgggtggtccagccctgatgattggccccacctcctgctgccccataaccctctcttcatttcggctttttcatttaccctcatttagagccatttgcagagatttagaaagatttacagtaacgaatggattcctatataaagattatttttatactttttgcagcaaaaggaaattgtaatatttgtacagtgttcaagtgaataaaaaccatgcctaaggcta

SEQ ID NO: 297580 - DNA, 993 bp, Homo sapiens
gcgcggaagtggcggcggcgcgcctggcctggcctggctgaggggaggcggcgggcgggcgcgatggcggaggccgggccacaggcgccgccgcccccgggcactccaagccggcacgaaaagagcctgggactgctcaccaccaagttcgtgtcccttctgcaggaggccaaggacggcgtgcttgacctcaagctggcagctgacaccctagctgtacgccagaagcggcggatttacgacattaccaatgttttggaaggtatcgggctaatcgagaaaaagtccaagaacagcatccagtggaagtgagtgggcatagtgggagggtagtagagtctcccacccagaagtgtcgggcgtggggtggagggtgccgaagaaggcaggggccatgggacccagagttctcagcagtccctctcagccccactccctgggctcaggggtgtggggcctggctgcaatacccgggagattgctgacaaactgattgagctcaaggcagagatcgaggagctgcagcagcgggagcaagaactagaccagcacaaggtgtgggtgcagcagagcatccggaacgtcacagaggacgtgcagaacagctgatatcctcctggcggtccctgctggggggagtgggcaaggggccctctggttcaacttgccctgagtcctgttcctcttgggagtttgtcttataccctagaacctgcaggtggtgggggcggctaccaagaaggaacagaggtctctggggaggagtctgggtggtccagccctgatgattggccccacctcctgctgccccataaccctctcttcatttcggctttttcatttaccctcatttagagccatttgcagagatttagaaagatttacagtaacgaatggattcctatataaagattatttttatactttttgcagcaaaaggaaattgtaatatttgtacagtgttcaagtgaataaaaaccatgcctaaggcta

SEQ ID NO: 297581 - DNA, 245 bp, Homo sapiens
cgacctcttcctgaccttgtatgactgggtttgggggctatcattgtagtgagtggcggccctgggactgatagcaaggacagtggtgagctcagttcactcccactgggcccaacaacactggacacccggccactgcagtcttctgccctgctggacagcagcagcagcagcagcagcagcagcagcagcagcagcaacagtaacagcagcagttcgtccggacccaacccttctacctcctt

SEQ ID NO: 297582 - DNA, 804 bp, Homo sapiens
ctggctgaggggaggcggcgggcgggcgcgatggcggaggccgggccacaggcgccgccgcccccgggcactccaagccggcacgaaaagagcctgggactgctcaccaccaagttcgtgtcccttctgcaggaggccaaggacggcgtgcttgacctcaagctggtgcggcctgggctaaggggagacaagggaggctggtggaccaggcctgggccggtagcgggaaccccgggggcggcccagctgggtcctccgagagccggccgccatcgtgtgctttctcacaggagagaagccgggggatgtttcattcattcggccgaggccatcgagctacagctatgggccaggctcgggctgcaggtgttcgtcctcgtggcccttcctggctggcgaggagaagagctgcctatgggacagagctgcggtcctgagctgcagtagcgcctgggaggcactacagggttggaatccagattactcccttcccagaccacgtctcagggtggctgggggtacaccccagagtggggctgagcattctccattctctctgccaggcagctgacaccctagctgtacgccagaagcggcggatttacgacattaccaatgttttggaaggtatcgggctaatcgagaaaaagtccaagaacagcatccagtggaagtgagtgggcatagtgggagggtagtagagtctcccacccagaagtgtcgggcgtggggtggagggtgccgaagaaggcaggggccatgggacccagagttctcagcagtccctctcagccccactccctg

SEQ ID NO: 297583 - DNA, 463 bp, Homo sapiens
ttttggaactccccaaagagctgtcagaaatctttgatcccacacgagtaggctgctgcattcctccctgaggctaggggtaagggacacagctcattgggtcctatggctgttttcttgcccttttgaggaccttgttgtggcgcttatggtaactggggcaaagggtgaagttcctgatgggcaggtggggttccctttcctgggctttggtgggtggagaggtgggagctggaatgttagtaactgagctccctccattcccagagtgcatgagctcggagctgctggaggagttgatgtcctcagaaggtgggtggccctggaaggtgggagtgggtgtgggcaggggttgggctgctgctaggggagccctggcccagggcctgagactagtgctctctgcagtgtttgcccctctgcttcgtctttctccacccccgggagaccacgattatatcta

SEQ ID NO: 297584 - DNA, 349 bp, Homo sapiens
ccccctgaccctccagctcctcctggccctctcacgtgcccacttctgctgggcctttagccctagaacctgcaggtggtgggggcggctaccaagaaggaacagaggtctctggggaggagtctgggtggtccagccctgatgattggccccacctcctgctgccccataaccctctcttcatttcggctttttcatttaccctcatttagagccatttgcagagatttagaaagatttacagtaacgaatggattcctatataaagattatttttatactttttgcagcaaaaggaaattgtaatatttgtacagtgttcaagtgaataaaaaccatgcctaaggct

SEQ ID NO: 297585 - DNA, 2499 bp, Homo sapiens
ggatcgatttgagtaagagcatagctgtcgggagagcccaggattcaacacgggccttgagaaatgtggctcttgtacctcctggtgccggccctgttctgcagggcaggaggctccattcccatccctcagaagttatttggggaggtgacttcccctctgttccccaagccttaccccaacaactttgaaacaaccactgtgatcacagtccccacgggatacagggtgaagctcgtcttccagcagtttgacctggagccttctgaaggctgcttctatgattatgtcaagatctctgctgataagaaaagcctggggaggttctgtgggcaactgggttctccactgggcaaccccccgggaaagaaggaatttatgtcccaagggaacaagatgctgctgaccttccacacagacttctccaacgaggagaatgggaccatcatgttctacaagggcttcctggcctactaccaagctgtggaccttgatgaatgtgcttcccggagcaaatcaggggaggaggatccccagccccagtgccagcacctgtgtcacaactacgttggaggctacttctgttcctgccgtccaggctatgagcttcaggaagacaggcattcctgccaggctgagtgcagcagcgagctgtacacggaggcatcaggctacatctccagcctggagtaccctcggtcctacccccctgacctgcgctgcaactacagcatccgggtggagcggggcctcaccctgcacctcaagttcctggagccttttgatattgatgaccaccagcaagtacactgcccctatgaccagctacagatctatgccaacgggaagaacattggcgagttctgtgggaagcaaaggccccccgacctcgacaccagcagcaatgctgtggatctgctgttcttcacagatgagtcgggggacagccggggctggaagctgcgctacaccaccgagatcatcaagtgcccccagcccaagaccctagacgagttcaccatcatccagaacctgcagcctcagtaccagttccgtgactacttcattgctacctgcaagcaaggctaccagctcatagaggggaaccaggtgctgcattccttcacagctgtctgccaggatgatggcacgtggcatcgtgccatgcccagatgcaagatcaaggactgtgggcagccccgaaacctgcctaatggtgacttccgttacaccaccacaatgggagtgaacacctacaaggcccgtatccagtactactgccatgagccatattacaagatgcagaccagagctggcagcagggagtctgagcaaggggtgtacacctgcacagcacagggcatttggaagaatgaacagaagggagagaagattcctcggtgcttgccagtgtgtgggaagcccgtgaaccccgtggaacagaggcagcgcatcatcggagggcaaaaagccaagatgggcaacttcccctggcaggtgttcaccaacatccacgggcgcgggggcggggccctgctgggcgaccgctggatcctcacagctgcccacaccctgtatcccaaggaacacgaagcgcaaagcaacgcctctttggatgtgttcctgggccacacaaatgtggaagagctcatgaagctaggaaatcaccccatccgcagggtcagcgtccacccggactaccgtcaggatgagtcctacaattttgagggggacatcgccctgctggagctggaaaatagtgtcaccctgggtcccaacctcctccccatctgcctccctgacaacgataccttctacgacctgggcttgatgggctatgtcagtggcttcggggtcatggaggagaagattgctcatgacctcaggtttgtccgtctgcccgtagctaatccacaggcctgtgagaactggctccggggaaagaataggatggatgtgttctctcaaaacatgttctgtgctggacacccatctctaaagcaggacgcctgccagggggatagtgggggcgtttttgcagtaagggacccgaacactgatcgctgggtggccacgggcatcgtgtcctggggcatcgggtgcagcaggggctatggcttctacaccaaagtgctcaactacgtggactggatcaagaaagagatggaggaggaggactgagcccagaattcactaggttcgaatccagagagcagtgtggaaaaaaaaaaacaaaaaacaactgaccagttgttgataaccactaagagtctctattaaaattactgatgcagaaagaccgtgtgtgaaattctctttcctgtagtcccattgatgtactttacctgaaacaacccaaagggcccctttctttcttctgaggattgcagaggatatagttatcaatctctagttgtcactttcctcttccactttgataccattgggtcattgaatataactttttccaaataaagttttatgagaaatgccagtgtg

SEQ ID NO: 297586 - DNA, 2617 bp, Homo sapiens
gaaactcagatcttttgtttatgcaaatagttcattccctccaacattcctccgggaatggtcccccctccactccacagaaaaccctcccctccctgctgtgcatgacgcgggctccctctgcacacagtgcacgaagacgctgtcgggagagcccaggattcaacacgggccttgagaaatgtggctcttgtacctcctggtgccggccctgttctgcagggcaggaggctccattcccatccctcagaagttatttggggaggtgacttcccctctgttccccaagccttaccccaacaactttgaaacaaccactgtgatcacagtccccacgggatacagggtgaagctcgtcttccagcagtttgacctggagccttctgaaggctgcttctatgattatgtcaagatctctgctgataagaaaagcctggggaggttctgtgggcaactgggttctccactgggcaaccccccgggaaagaaggaatttatgtcccaagggaacaagatgctgctgaccttccacacagacttctccaacgaggagaatgggaccatcatgttctacaagggcttcctggcctactaccaagctgtggaccttgatgaatgtgcttcccggagcaaatcaggggaggaggatccccagccccagtgccagcacctgtgtcacaactacgttggaggctacttctgttcctgccgtccaggctatgagcttcaggaagacaggcattcctgccaggctgagtgcagcagcgagctgtacacggaggcatcaggctacatctccagcctggagtaccctcggtcctacccccctgacctgcgctgcaactacagcatccgggtggagcggggcctcaccctgcacctcaagttcctggagccttttgatattgatgaccaccagcaagtacactgcccctatgaccagctacagatctatgccaacgggaagaacattggcgagttctgtgggaagcaaaggccccccgacctcgacaccagcagcaatgctgtggatctgctgttcttcacagatgagtcgggggacagccggggctggaagctgcgctacaccaccgagatcatcaagtgcccccagcccaagaccctagacgagttcaccatcatccagaacctgcagcctcagtaccagttccgtgactacttcattgctacctgcaagcaaggctaccagctcatagaggggaaccaggtgctgcattccttcacagctgtctgccaggatgatggcacgtggcatcgtgccatgcccagatgcaagatcaaggactgtgggcagccccgaaacctgcctaatggtgacttccgttacaccaccacaatgggagtgaacacctacaaggcccgtatccagtactactgccatgagccatattacaagatgcagaccagagctggcagcagggagtctgagcaaggggtgtacacctgcacagcacagggcatttggaagaatgaacagaagggagagaagattcctcggtgcttgccagtgtgtgggaagcccgtgaaccccgtggaacagaggcagcgcatcatcggagggcaaaaagccaagatgggcaacttcccctggcaggtgttcaccaacatccacgggcgcgggggcggggccctgctgggcgaccgctggatcctcacagctgcccacaccctgtatcccaaggaacacgaagcgcaaagcaacgcctctttggatgtgttcctgggccacacaaatgtggaagagctcatgaagctaggaaatcaccccatccgcagggtcagcgtccacccggactaccgtcaggatgagtcctacaattttgagggggacatcgccctgctggagctggaaaatagtgtcaccctgggtcccaacctcctccccatctgcctccctgacaacgataccttctacgacctgggcttgatgggctatgtcagtggcttcggggtcatggaggagaagattgctcatgacctcaggtttgtccgtctgcccgtagctaatccacaggcctgtgagaactggctccggggaaagaataggatggatgtgttctctcaaaacatgttctgtgctggacacccatctctaaagcaggacgcctgccagggggatagtgggggcgtttttgcagtaagggacccgaacactgatcgctgggtggccacgggcatcgtgtcctggggcatcgggtgcagcaggggctatggcttctacaccaaagtgctcaactacgtggactggatcaagaaagagatggaggaggaggactgagcccagaattcactaggttcgaatccagagagcagtgtggaaaaaaaaaaacaaaaaacaactgaccagttgttgataaccactaagagtctctattaaaattactgatgcagaaagaccgtgtgtgaaattctctttcctgtagtcccattgatgtactttacctgaaacaacccaaagggcccctttctttcttctgaggattgcagaggatatagttatcaatctctagttgtcactttcctcttccactttgataccattgggtcattgaatataactttttccaaataaagttttatgagaaatgccagtgtg

SEQ ID NO: 297587 - DNA, 2594 bp, Homo sapiens
aaggctggtactggccgagatctaggatccgggaatggtcccccctccactccacagaaaaccctcccctccctgctgtgcatgacgcgggctccctctgcacacagtgcacgaagacgctgtcgggagagcccaggattcaacacgggccttgagaaatgtggctcttgtacctcctggtgccggccctgttctgcagggcaggaggctccattcccatccctcagaagttatttggggaggtgacttcccctctgttccccaagccttaccccaacaactttgaaacaaccactgtgatcacagtccccacgggatacagggtgaagctcgtcttccagcagtttgacctggagccttctgaaggctgcttctatgattatgtcaagatctctgctgataagaaaagcctggggaggttctgtgggcaactgggttctccactgggcaaccccccgggaaagaaggaatttatgtcccaagggaacaagatgctgctgaccttccacacagacttctccaacgaggagaatgggaccatcatgttctacaagggcttcctggcctactaccaagctgtggaccttgatgaatgtgcttcccggagcaaatcaggggaggaggatccccagccccagtgccagcacctgtgtcacaactacgttggaggctacttctgttcctgccgtccaggctatgagcttcaggaagacaggcattcctgccaggctgagtgcagcagcgagctgtacacggaggcatcaggctacatctccagcctggagtaccctcggtcctacccccctgacctgcgctgcaactacagcatccgggtggagcggggcctcaccctgcacctcaagttcctggagccttttgatattgatgaccaccagcaagtacactgcccctatgaccagctacagatctatgccaacgggaagaacattggcgagttctgtgggaagcaaaggccccccgacctcgacaccagcagcaatgctgtggatctgctgttcttcacagatgagtcgggggacagccggggctggaagctgcgctacaccaccgagatcatcaagtgcccccagcccaagaccctagacgagttcaccatcatccagaacctgcagcctcagtaccagttccgtgactacttcattgctacctgcaagcaaggctaccagctcatagaggggaaccaggtgctgcattccttcacagctgtctgccaggatgatggcacgtggcatcgtgccatgcccagatgcaagatcaaggactgtgggcagccccgaaacctgcctaatggtgacttccgttacaccaccacaatgggagtgaacacctacaaggcccgtatccagtactactgccatgagccatattacaagatgcagaccagagctggcagcagggagtctgagcaaggggtgtacacctgcacagcacagggcatttggaagaatgaacagaagggagagaagattcctcggtgcttgccagtgtgtgggaagcccgtgaaccccgtggaacagaggcagcgcatcatcggagggcaaaaagccaagatgggcaacttcccctggcaggtgttcaccaacatccacgggcgcgggggcggggccctgctgggcgaccgctggatcctcacagctgcccacaccctgtatcccaaggaacacgaagcgcaaagcaacgcctctttggatgtgttcctgggccacacaaatgtggaagagctcatgaagctaggaaatcaccccatccgcagggtcagcgtccacccggactaccgtcaggatgagtcctacaattttgagggggacatcgccctgctggagctggaaaatagtgtcaccctgggtcccaacctcctccccatctgcctccctgacaacgataccttctacgacctgggcttgatgggctatgtcagtggcttcggggtcatggaggagaagattgctcatgacctcaggtttgtccgtctgcccgtagctaatccacaggcctgtgagaactggctccggggaaagaataggatggatgtgttctctcaaaacatgttctgtgctggacacccatctctaaagcaggacgcctgccagggggatagtgggggcgtttttgcagtaagggacccgaacactgatcgctgggtggccacgggcatcgtgtcctggggcatcgggtgcagcaggggctatggcttctacaccaaagtgctcaactacgtggactggatcaagaaagagatggaggaggaggactgagcccagaattcactaggttcgaatccagagagcagtgtggaaaaaaaaaaacaaaaaacaactgaccagttgttgataaccactaagagtctctattaaaattactgatgcagaaagaccgtgtgtgaaattctctttcctgtagtcccattgatgtactttacctgaaacaacccaaagggcccctttctttcttctgaggattgcagaggatatagttatcaatctctagttgtcactttcctcttccactttgataccattgggtcattgaatataactttttccaaataaagttttatgagaaatgccagtgtg

SEQ ID NO: 297588 - DNA, 2608 bp, Homo sapiens
atggggaactgcatcagctctgtgaattcttgcaatctattgcctgggaaagtgtcttgcacattaaacagaaaaccctcccctccctgctgtgcatgacgcgggctccctctgcacacagtgcacgaagacgctgtcgggagagcccaggattcaacacgggccttgagaaatgtggctcttgtacctcctggtgccggccctgttctgcagggcaggaggctccattcccatccctcagaagttatttggggaggtgacttcccctctgttccccaagccttaccccaacaactttgaaacaaccactgtgatcacagtccccacgggatacagggtgaagctcgtcttccagcagtttgacctggagccttctgaaggctgcttctatgattatgtcaagatctctgctgataagaaaagcctggggaggttctgtgggcaactgggttctccactgggcaaccccccgggaaagaaggaatttatgtcccaagggaacaagatgctgctgaccttccacacagacttctccaacgaggagaatgggaccatcatgttctacaagggcttcctggcctactaccaagctgtggaccttgatgaatgtgcttcccggagcaaatcaggggaggaggatccccagccccagtgccagcacctgtgtcacaactacgttggaggctacttctgttcctgccgtccaggctatgagcttcaggaagacaggcattcctgccaggctgagtgcagcagcgagctgtacacggaggcatcaggctacatctccagcctggagtaccctcggtcctacccccctgacctgcgctgcaactacagcatccgggtggagcggggcctcaccctgcacctcaagttcctggagccttttgatattgatgaccaccagcaagtacactgcccctatgaccagctacagatctatgccaacgggaagaacattggcgagttctgtgggaagcaaaggccccccgacctcgacaccagcagcaatgctgtggatctgctgttcttcacagatgagtcgggggacagccggggctggaagctgcgctacaccaccgagatcatcaagtgcccccagcccaagaccctagacgagttcaccatcatccagaacctgcagcctcagtaccagttccgtgactacttcattgctacctgcaagcaaggctaccagctcatagaggggaaccaggtgctgcattccttcacagctgtctgccaggatgatggcacgtggcatcgtgccatgcccagatgcaagatcaaggactgtgggcagccccgaaacctgcctaatggtgacttccgttacaccaccacaatgggagtgaacacctacaaggcccgtatccagtactactgccatgagccatattacaagatgcagaccagagctggcagcagggagtctgagcaaggggtgtacacctgcacagcacagggcatttggaagaatgaacagaagggagagaagattcctcggtgcttgccagtgtgtgggaagcccgtgaaccccgtggaacagaggcagcgcatcatcggagggcaaaaagccaagatgggcaacttcccctggcaggtgttcaccaacatccacgggcgcgggggcggggccctgctgggcgaccgctggatcctcacagctgcccacaccctgtatcccaaggaacacgaagcgcaaagcaacgcctctttggatgtgttcctgggccacacaaatgtggaagagctcatgaagctaggaaatcaccccatccgcagggtcagcgtccacccggactaccgtcaggatgagtcctacaattttgagggggacatcgccctgctggagctggaaaatagtgtcaccctgggtcccaacctcctccccatctgcctccctgacaacgataccttctacgacctgggcttgatgggctatgtcagtggcttcggggtcatggaggagaagattgctcatgacctcaggtttgtccgtctgcccgtagctaatccacaggcctgtgagaactggctccggggaaagaataggatggatgtgttctctcaaaacatgttctgtgctggacacccatctctaaagcaggacgcctgccagggggatagtgggggcgtttttgcagtaagggacccgaacactgatcgctgggtggccacgggcatcgtgtcctggggcatcgggtgcagcaggggctatggcttctacaccaaagtgctcaactacgtggactggatcaagaaagagatggaggaggaggactgagcccagaattcactaggttcgaatccagagagcagtgtggaaaaaaaaaaacaaaaaacaactgaccagttgttgataaccactaagagtctctattaaaattactgatgcagaaagaccgtgtgtgaaattctctttcctgtagtcccattgatgtactttacctgaaacaacccaaagggcccctttctttcttctgaggattgcagaggatatagttatcaatctctagttgtcactttcctcttccactttgataccattgggtcattgaatataactttttccaaataaagttttatgagaaatgccagtgtg

SEQ ID NO: 297589 - DNA, 2610 bp, Homo sapiens
cactggacttcagccttggacaaaaacactagcagaactatttatgatcctgtacatgcatctccaaccacttctatgcgtgtgttttatattagtgtaggggcgggctccctctgcacacagtgcacgaagacgctgtcgggagagcccaggattcaacacgggccttgagaaatgtggctcttgtacctcctggtgccggccctgttctgcagggcaggaggctccattcccatccctcagaagttatttggggaggtgacttcccctctgttccccaagccttaccccaacaactttgaaacaaccactgtgatcacagtccccacgggatacagggtgaagctcgtcttccagcagtttgacctggagccttctgaaggctgcttctatgattatgtcaagatctctgctgataagaaaagcctggggaggttctgtgggcaactgggttctccactgggcaaccccccgggaaagaaggaatttatgtcccaagggaacaagatgctgctgaccttccacacagacttctccaacgaggagaatgggaccatcatgttctacaagggcttcctggcctactaccaagctgtggaccttgatgaatgtgcttcccggagcaaatcaggggaggaggatccccagccccagtgccagcacctgtgtcacaactacgttggaggctacttctgttcctgccgtccaggctatgagcttcaggaagacaggcattcctgccaggctgagtgcagcagcgagctgtacacggaggcatcaggctacatctccagcctggagtaccctcggtcctacccccctgacctgcgctgcaactacagcatccgggtggagcggggcctcaccctgcacctcaagttcctggagccttttgatattgatgaccaccagcaagtacactgcccctatgaccagctacagatctatgccaacgggaagaacattggcgagttctgtgggaagcaaaggccccccgacctcgacaccagcagcaatgctgtggatctgctgttcttcacagatgagtcgggggacagccggggctggaagctgcgctacaccaccgagatcatcaagtgcccccagcccaagaccctagacgagttcaccatcatccagaacctgcagcctcagtaccagttccgtgactacttcattgctacctgcaagcaaggctaccagctcatagaggggaaccaggtgctgcattccttcacagctgtctgccaggatgatggcacgtggcatcgtgccatgcccagatgcaagatcaaggactgtgggcagccccgaaacctgcctaatggtgacttccgttacaccaccacaatgggagtgaacacctacaaggcccgtatccagtactactgccatgagccatattacaagatgcagaccagagctggcagcagggagtctgagcaaggggtgtacacctgcacagcacagggcatttggaagaatgaacagaagggagagaagattcctcggtgcttgccagtgtgtgggaagcccgtgaaccccgtggaacagaggcagcgcatcatcggagggcaaaaagccaagatgggcaacttcccctggcaggtgttcaccaacatccacgggcgcgggggcggggccctgctgggcgaccgctggatcctcacagctgcccacaccctgtatcccaaggaacacgaagcgcaaagcaacgcctctttggatgtgttcctgggccacacaaatgtggaagagctcatgaagctaggaaatcaccccatccgcagggtcagcgtccacccggactaccgtcaggatgagtcctacaattttgagggggacatcgccctgctggagctggaaaatagtgtcaccctgggtcccaacctcctccccatctgcctccctgacaacgataccttctacgacctgggcttgatgggctatgtcagtggcttcggggtcatggaggagaagattgctcatgacctcaggtttgtccgtctgcccgtagctaatccacaggcctgtgagaactggctccggggaaagaataggatggatgtgttctctcaaaacatgttctgtgctggacacccatctctaaagcaggacgcctgccagggggatagtgggggcgtttttgcagtaagggacccgaacactgatcgctgggtggccacgggcatcgtgtcctggggcatcgggtgcagcaggggctatggcttctacaccaaagtgctcaactacgtggactggatcaagaaagagatggaggaggaggactgagcccagaattcactaggttcgaatccagagagcagtgtggaaaaaaaaaaacaaaaaacaactgaccagttgttgataaccactaagagtctctattaaaattactgatgcagaaagaccgtgtgtgaaattctctttcctgtagtcccattgatgtactttacctgaaacaacccaaagggcccctttctttcttctgaggattgcagaggatatagttatcaatctctagttgtcactttcctcttccactttgataccattgggtcattgaatataactttttccaaataaagttttatgagaaatgccagtgtg

SEQ ID NO: 297590 - DNA, 2563 bp, Homo sapiens
gaaactcagatcttttgtttatgcaaatagttcattccctccaacattcctccgggaatggtcccccctccactccacagaaaaccctcccctccctgctgtgcatgacgcgggctccctctgcacacagtgcacgaagacgctgtcgggagagcccaggattcaacacgggccttgagaaatgtggctcttgtacctcctggtgccggccctgttctgcagggcaggaggctccattcccatccctcagaagttatttggggaggtgacttcccctctgttccccaagccttaccccaacaactttgaaacaaccactgtgatcacagtccccacgggatacagggtgaagctcgtcttccagcagtttgacctggagccttctgaaggctgcttctatgattatgtcaagatctctgctgataagaaaagcctggggaggttctgtgggcaactgggttctccactgggcaaccccccgggaaagaaggaatttatgtcccaagggaacaagatgctgctgaccttccacacagacttctccaacgaggagaatgggaccatcatgttctacaagggcttcctggcctactaccaagctgtggaccttgatgaatgtgcttcccggagcaaatcaggggaggaggatccccagccccagtgccagcacctgtgtcacaactacgttggaggctacttctgttcctgccgtccaggctatgagcttcaggaagacaggcattcctgccaggctgagtgcagcagcgagctgtacacggaggcatcaggctacatctccagcctggagtaccctcggtcctacccccctgacctgcgctgcaactacagcatccgggtggagcggggcctcaccctgcacctcaagttcctggagccttttgatattgatgaccaccagcaagtacactgcccctatgaccagctacagatctatgccaacgggaagaacattggcgagttctgtgggaagcaaaggccccccgacctcgacaccagcagcaatgctgtggatctgctgttcttcacagatgagtcgggggacagccggggctggaagctgcgctacaccaccgagatcatcaagtgcccccagcccaagaccctagacgagttcaccatcatccagaacctgcagcctcagtaccagttccgtgactacttcattgctacctgcaagcaaggctaccagctcatagaggggaaccaggtgctgcattccttcacagctgtctgccaggatgatggcacgtggcatcgtgccatgcccagatgcaagatcaaggactgtgggcagccccgaaacctgcctaatggtgacttccgttacaccaccacaatgggagtgaacacctacaaggcccgtatccagtactactgccatgagccatattacaagatgcagaccagagctggcagcagggagtctgagcaaggggtgtacacctgcacagcacagggcatttggaagaatgaacagaagggagagaagattcctcggtgcttgccagtgtgtgggaagcccgtgaaccccgtggaacagaggcagcgcatcatcggagggcacgggggcggggccctgctgggcgaccgctggatcctcacagctgcccacaccctgtatcccaaggaacacgaagcgcaaagcaacgcctctttggatgtgttcctgggccacacaaatgtggaagagctcatgaagctaggaaatcaccccatccgcagggtcagcgtccacccggactaccgtcaggatgagtcctacaattttgagggggacatcgccctgctggagctggaaaatagtgtcaccctgggtcccaacctcctccccatctgcctccctgacaacgataccttctacgacctgggcttgatgggctatgtcagtggcttcggggtcatggaggagaagattgctcatgacctcaggtttgtccgtctgcccgtagctaatccacaggcctgtgagaactggctccggggaaagaataggatggatgtgttctctcaaaacatgttctgtgctggacacccatctctaaagcaggacgcctgccagggggatagtgggggcgtttttgcagtaagggacccgaacactgatcgctgggtggccacgggcatcgtgtcctggggcatcgggtgcagcaggggctatggcttctacaccaaagtgctcaactacgtggactggatcaagaaagagatggaggaggaggactgagcccagaattcactaggttcgaatccagagagcagtgtggaaaaaaaaaaacaaaaaacaactgaccagttgttgataaccactaagagtctctattaaaattactgatgcagaaagaccgtgtgtgaaattctctttcctgtagtcccattgatgtactttacctgaaacaacccaaagggcccctttctttcttctgaggattgcagaggatatagttatcaatctctagttgtcactttcctcttccactttgataccattgggtcattgaatataactttttccaaataaagttttatgagaaatgccagtgtg

SEQ ID NO: 297591 - DNA, 1366 bp, Homo sapiens
gaaactcagatcttttgtttatgcaaatagttcattccctccaacattcctccgggaatggtcccccctccactccacagaaaaccctcccctccctgctgtgcatgacgcgggctccctctgcacacagtgcacgaagacgctgtcgggagagcccaggattcaacacgggccttgagaaatgtggctcttgtacctcctggtgccggccctgttctgcagggcaggaggctccattcccatccctcagaagttatttggggaggtgacttcccctctgttccccaagccttaccccaacaactttgaaacaaccactgtgatcacagtccccacgggatacagggtgaagctcgtcttccagcagtttgacctggagccttctgaaggctgcttctatgattatgtcaagatctctgctgataagaaaagcctggggaggttctgtgggcaactgggttctccactgggcaaccccccgggaaagaaggaatttatgtcccaagggaacaagatgctgctgaccttccacacagacttctccaacgaggagaatgggaccatcatgttctacaagggcttcctggcctactaccaagctgtggaccttgatgaatgtgcttcccggagcaaatcaggggaggaggatccccagccccagtgccagcacctgtgtcacaactacgttggaggctacttctgttcctgccgtccaggctatgagcttcaggaagacaggcattcctgccaggctgagtgcagcagcgagctgtacacggaggcatcaggctacatctccagcctggagtaccctcggtcctacccccctgacctgcgctgcaactacagcatccgggtggagcggggcctcaccctgcacctcaagttcctggagccttttgatattgatgaccaccagcaagtacactgcccctatgaccagctacagatctatgccaacgggaagaacattggcgagttctgtgggaagcaaaggccccccgacctcgacaccagcagcaatgctgtggatctgctgttcttcacagatgagtcgggggacagccggggctggaagctgcgctacaccaccgagatcatcaagtgcccccagcccaagaccctagacgagttcaccatcatccagaacctgcagcctcagtaccagttccgtgactacttcattgctacctgcaagcaaggctaccagctcatagaggggaaccaggtgctgcattccttcacagctgtctgccaggatgatggcacgtggcatcgtgccatgcccagatgcaagatcacagcgttccttgtctacgcctcgatacgctcccttttgtgacctctcctgtacaccacacatcat

SEQ ID NO: 297592 - DNA, 3205 bp, Homo sapiens
  misc_feature (100)..(100): n is a, c, g, or t
ggatcgatttgagtaagagcatagctgtcgggagagcccaggattcaacacgggccttgagaaatgtgagtaagggtgatgggcaaccaggtgggagggngaagccaggggagaagccagggcatgggaggcaattcagggagacaggaacacccttctctcttcacacacctcatcagttccactgtgcacacgcgtggacacacacaacacacgccccatccctcctcctagggatcagaggagacttcatacatagatgctcatgccatggtcctttcttccctctgggctcttggcagggagcagcgagaggaggggaccccttgcccaggacgggacactctgtgcctgtgtcccccactccacagatggtttctcccagacgctcttgctgaacctgtgggagccctttcagagacccacgggtggaaaccctcaccctccattaactggtcccaagccagtcctattcctggaaggggaggggagggacgcgtccgggcaggggaggaggctggaaagggagtgtgaggggagtgtggtggcctctggactggacactgccctggagagtgacccgatgcagcagctgcacaggccatcctccccacccacgcacccctgctgagaacatgtctgtgaggttcagggtgggcagagaggagaatgcccagtggtatggccgtctcatcccctgccacagccactgcccacatggcaagagtgctgaacccctccagctccagatactctcttttgttttggcaggtggctcttgtacctcctggtgccggccctgttctgcagggcaggaggctccattcccatccctcagaagttatttggggaggtgacttcccctctgttccccaagccttaccccaacaactttgaaacaaccactgtgatcacagtccccacgggatacagggtgaagctcgtcttccagcagtttgacctggagccttctgaaggctgcttctatgattatgtcaagatctctgctgataagaaaagcctggggaggttctgtgggcaactgggttctccactgggcaaccccccgggaaagaaggaatttatgtcccaagggaacaagatgctgctgaccttccacacagacttctccaacgaggagaatgggaccatcatgttctacaagggcttcctggcctactaccaagctgtggaccttgatgaatgtgcttcccggagcaaatcaggggaggaggatccccagccccagtgccagcacctgtgtcacaactacgttggaggctacttctgttcctgccgtccaggctatgagcttcaggaagacaggcattcctgccaggctgagtgcagcagcgagctgtacacggaggcatcaggctacatctccagcctggagtaccctcggtcctacccccctgacctgcgctgcaactacagcatccgggtggagcggggcctcaccctgcacctcaagttcctggagccttttgatattgatgaccaccagcaagtacactgcccctatgaccagctacagatctatgccaacgggaagaacattggcgagttctgtgggaagcaaaggccccccgacctcgacaccagcagcaatgctgtggatctgctgttcttcacagatgagtcgggggacagccggggctggaagctgcgctacaccaccgagatcatcaagtgcccccagcccaagaccctagacgagttcaccatcatccagaacctgcagcctcagtaccagttccgtgactacttcattgctacctgcaagcaaggctaccagctcatagaggggaaccaggtgctgcattccttcacagctgtctgccaggatgatggcacgtggcatcgtgccatgcccagatgcaagatcaaggactgtgggcagccccgaaacctgcctaatggtgacttccgttacaccaccacaatgggagtgaacacctacaaggcccgtatccagtactactgccatgagccatattacaagatgcagaccagagctggcagcagggagtctgagcaaggggtgtacacctgcacagcacagggcatttggaagaatgaacagaagggagagaagattcctcggtgcttgccagtgtgtgggaagcccgtgaaccccgtggaacagaggcagcgcatcatcggagggcaaaaagccaagatgggcaacttcccctggcaggtgttcaccaacatccacgggcgcgggggcggggccctgctgggcgaccgctggatcctcacagctgcccacaccctgtatcccaaggaacacgaagcgcaaagcaacgcctctttggatgtgttcctgggccacacaaatgtggaagagctcatgaagctaggaaatcaccccatccgcagggtcagcgtccacccggactaccgtcaggatgagtcctacaattttgagggggacatcgccctgctggagctggaaaatagtgtcaccctgggtcccaacctcctccccatctgcctccctgacaacgataccttctacgacctgggcttgatgggctatgtcagtggcttcggggtcatggaggagaagattgctcatgacctcaggtttgtccgtctgcccgtagctaatccacaggcctgtgagaactggctccggggaaagaataggatggatgtgttctctcaaaacatgttctgtgctggacacccatctctaaagcaggacgcctgccagggggatagtgggggcgtttttgcagtaagggacccgaacactgatcgctgggtggccacgggcatcgtgtcctggggcatcgggtgcagcaggggctatggcttctacaccaaagtgctcaactacgtggactggatcaagaaagagatggaggaggaggactgagcccagaattcactaggttcgaatccagagagcagtgtggaaaaaaaaaaacaaaaaacaactgaccagttgttgataaccactaagagtctctattaaaattactgatgcagaaagaccgtgtgtgaaattctctttcctgtagtcccattgatgtactttacctgaaacaacccaaagggcccctttctttcttctgaggattgcagaggatatagttatcaatctctagttgtcactttcctcttccactttgataccattgggtcattgaatataactttttccaaataaagttttatgagaaatgccagtgtg

SEQ ID NO: 297593 - DNA, 3512 bp, Homo sapiens
  misc_feature (100)..(100): n is a, c, g, or t
ggatcgatttgagtaagagcatagctgtcgggagagcccaggattcaacacgggccttgagaaatgtgagtaagggtgatgggcaaccaggtgggagggngaagccaggggagaagccagggcatgggaggcaattcagggagacaggaacacccttctctcttcacacacctcatcagttccactgtgcacacgcgtggacacacacaacacacgccccatccctcctcctagggatcagaggagacttcatacatagatgctcatgccatggtcctttcttccctctgggctcttggcagggagcagcgagaggaggggaccccttgcccaggacgggacactctgtgcctgtgtcccccactccacagatggtttctcccagacgctcttgctgaacctgtgggagccctttcagagacccacgggtggaaaccctcaccctccattaactggtcccaagccagtcctattcctggaaggggaggggagggacgcgtccgggcaggggaggaggctggaaagggagtgtgaggggagtgtggtggcctctggactggacactgccctggagagtgacccgatgcagcagctgcacaggccatcctccccacccacgcacccctgctgagaacatgtctgtgaggttcagggtgggcagagaggagaatgcccagtggtatggccgtctcatcccctgccacagccactgcccacatggcaagagtgctgaacccctccagctccagatactctcttttgttttggcaggtggctcttgtacctcctggtgccggccctgttctgcagggcaggaggctccattcccatccctcagaagttatttggggaggtgacttcccctctgttccccaagccttaccccaacaactttgaaacaaccactgtgatcacagtccccacgggatacagggtgaagctcgtcttccagcagtttgacctggagccttctgaaggctgcttctatgattatgtcaagatctctgctgataagaaaagcctggggaggttctgtgggcaactgggttctccactgggcaaccccccgggaaagaaggaatttatgtcccaagggaacaagatgctgctgaccttccacacagacttctccaacgaggagaatgggaccatcatgttctacaagggcttcctggcctactaccaagctgtggaccttgatgaatgtgcttcccggagcaaatcaggggaggaggatccccagccccagtgccagcacctgtgtcacaactacgttggaggctacttctgttcctgccgtccaggctatgagcttcaggaagacaggcattcctgccaggctgagtgcagcagcgagctgtacacggaggcatcaggctacatctccagcctggagtaccctcggtcctacccccctgacctgcgctgcaactacagcatccgggtggagcggggcctcaccctgcacctcaagttcctggagccttttgatattgatgaccaccagcaagtacactgcccctatgaccagctacagggtacagccgtcctacccctgaaagaccccttcctccccttctgtctgcacttggctcctcttgtcccaacttcctcctggatcccctggccagctggggcaggaacggccaacatcacccatgggctgggtaagttcccacacaactagaattgggtcatggggatcccttttcaccttcccctgaaaacacacataaggcaggatttcatcaccaccaccaccaccctggccaccaggctactacccagttggccctgtgtaaaaacgtccaagctgaaaaaaaaaaaccctcctcccctactagatctatgccaacgggaagaacattggcgagttctgtgggaagcaaaggccccccgacctcgacaccagcagcaatgctgtggatctgctgttcttcacagatgagtcgggggacagccggggctggaagctgcgctacaccaccgagatcatcaagtgcccccagcccaagaccctagacgagttcaccatcatccagaacctgcagcctcagtaccagttccgtgactacttcattgctacctgcaagcaaggctaccagctcatagaggggaaccaggtgctgcattccttcacagctgtctgccaggatgatggcacgtggcatcgtgccatgcccagatgcaagatcaaggactgtgggcagccccgaaacctgcctaatggtgacttccgttacaccaccacaatgggagtgaacacctacaaggcccgtatccagtactactgccatgagccatattacaagatgcagaccagagctggcagcagggagtctgagcaaggggtgtacacctgcacagcacagggcatttggaagaatgaacagaagggagagaagattcctcggtgcttgccagtgtgtgggaagcccgtgaaccccgtggaacagaggcagcgcatcatcggagggcaaaaagccaagatgggcaacttcccctggcaggtgttcaccaacatccacgggcgcgggggcggggccctgctgggcgaccgctggatcctcacagctgcccacaccctgtatcccaaggaacacgaagcgcaaagcaacgcctctttggatgtgttcctgggccacacaaatgtggaagagctcatgaagctaggaaatcaccccatccgcagggtcagcgtccacccggactaccgtcaggatgagtcctacaattttgagggggacatcgccctgctggagctggaaaatagtgtcaccctgggtcccaacctcctccccatctgcctccctgacaacgataccttctacgacctgggcttgatgggctatgtcagtggcttcggggtcatggaggagaagattgctcatgacctcaggtttgtccgtctgcccgtagctaatccacaggcctgtgagaactggctccggggaaagaataggatggatgtgttctctcaaaacatgttctgtgctggacacccatctctaaagcaggacgcctgccagggggatagtgggggcgtttttgcagtaagggacccgaacactgatcgctgggtggccacgggcatcgtgtcctggggcatcgggtgcagcaggggctatggcttctacaccaaagtgctcaactacgtggactggatcaagaaagagatggaggaggaggactgagcccagaattcactaggttcgaatccagagagcagtgtggaaaaaaaaaaacaaaaaacaactgaccagttgttgataaccactaagagtctctattaaaattactgatgcagaaagaccgtgtgtgaaattctctttcctgtagtcccattgatgtactttacctgaaacaacccaaagggcccctttctttcttctgaggattgcagaggatatagttatcaatctctagttgtcactttcctcttccactttgataccattgggtcattgaatataactttttccaaataaagttttatgagaaatgccagtgtg

SEQ ID NO: 297594 - DNA, 3080 bp, Homo sapiens
  misc_feature (344)..(344): n is a, c, g, or t
  misc_feature (354)..(354): n is a, c, g, or t
  misc_feature (550)..(551): n is a, c, g, or t
  misc_feature (568)..(568): n is a, c, g, or t
  misc_feature (619)..(619): n is a, c, g, or t
  misc_feature (673)..(673): n is a, c, g, or t
  misc_feature (710)..(710): n is a, c, g, or t
cgggtggagcggggcctcaccctgcacctcaagttcctggagccttttgatattgatgaccaccagcaagtacactgcccctatgaccagctacagatctatgccaacgggaagaacattggcgagttctgtgggaagcaaaggccccccgacctcgacaccagcagcaatgctgtggatctgctgttcttcacagatgagtcgggggacagccggggctggaagctgcgctacaccaccgagatcatcaagtgcccccagcccaagaccctagacgagttcaccatcggagggcaaaaagccaagatgggcaacttcccctggcaggtgttcaccaacatccncgggcggggncggggcctgctgggcgacgctggatcctcacagctgcccacacctgtatcccaaggaacacgaagcgcaaagcaacgcctctttggatgtgttcctgggccacacaaatgtggaagagctcatgaagctaggaaatcaccccatccgcagggtcagcgtccacccggactaccgtcaggatgagtcctacaatttnnagggggacatcgcctgntggagctggaaaatagtgtcaccctgggtcccaacctcctccccatctgcntcctgacaagataccttctacgacctgggcttgatgggctatgtcagtggctcngggtcatggaggagaagattgtcatgacctcaggttngtccgtctgccgtagctaatccacaggcctctgttccccaagccttaccccaacaactttgaaacaaccactgtgatcacagtccccacgggatacagggtgaagctcgtcttccagcagtttgacctggagccttctgaaggctgcttctatgattatgtcaagatctctgctgataagaaaagcctggggaggttctgtgggcaactgggttctccactgggcaaccccccgggaaagaaggaatttatgtcccaagggaacaagatgctgctgaccttccacacagacttctccaacgaggagaatgggaccatcatgttctacaagggcttcctggcctactaccaagctgtggaccttgatgaatgtgcttcccggagcaaatcaggggaggaggatccccagccccagtgccagcacctgtgtcacaactacgttggaggctacttctgttcctgccgtccaggctatgagcttcaggaagacaggcattcctgccaggctgagtgcagcagcgagctgtacacggaggcatcaggctacatctccagcctggagtaccctcggtcctacccccctgacctgcgctgcaactacagcatccgggtggagcggggcctcaccctgcacctcaagttcctggagccttttgatattgatgaccaccagcaagtacactgcccctatgaccagctacagatctatgccaacgggaagaacattggcgagttctgtgggaagcaaaggccccccgacctcgacaccagcagcaatgctgtggatctgctgttcttcacagatgagtcgggggacagccggggctggaagctgcgctacaccaccgagatcatcaagtgcccccagcccaagaccctagacgagttcaccatcatccagaacctgcagcctcagtaccagttccgtgactacttcattgctacctgcaagcaaggctaccagctcatagaggggaaccaggtgctgcattccttcacagctgtctgccaggatgatggcacgtggcatcgtgccatgcccagatgcaagatcaaggactgtgggcagccccgaaacctgcctaatggtgacttccgttacaccaccacaatgggagtgaacacctacaaggcccgtatccagtactactgccatgagccatattacaagatgcagaccagagctggcagcagggagtctgagcaaggggtgtacacctgcacagcacagggcatttggaagaatgaacagaagggagagaagattcctcggtgcttgccagtgtgtgggaagcccgtgaaccccgtggaacagaggcagcgcatcatcggagggcaaaaagccaagatgggcaacttcccctggcaggtgttcaccaacatccacgggcgcgggggcggggccctgctgggcgaccgctggatcctcacagctgcccacaccctgtatcccaaggaacacgaagcgcaaagcaacgcctctttggatgtgttcctgggccacacaaatgtggaagagctcatgaagctaggaaatcaccccatccgcagggtcagcgtccacccggactaccgtcaggatgagtcctacaattttgagggggacatcgccctgctggagctggaaaatagtgtcaccctgggtcccaacctcctccccatctgcctccctgacaacgataccttctacgacctgggcttgatgggctatgtcagtggcttcggggtcatggaggagaagattgctcatgacctcaggtttgtccgtctgcccgtagctaatccacaggcctgtgagaactggctccggggaaagaataggatggatgtgttctctcaaaacatgttctgtgctggacacccatctctaaagcaggacgcctgccagggggatagtgggggcgtttttgcagtaagggacccgaacactgatcgctgggtggccacgggcatcgtgtcctggggcatcgggtgcagcaggggctatggcttctacaccaaagtgctcaactacgtggactggatcaagaaagagatggaggaggaggactgagcccagaattcactaggttcgaatccagagagcagtgtggaaaaaaaaaaacaaaaaacaactgaccagttgttgataaccactaagagtctctattaaaattactgatgcagaaagaccgtgtgtgaaattctctttcctgtagtcccattgatgtactttacctgaaacaacccaaagggcccctttctttcttctgaggattgcagaggatatagttatcaatctctagttgtcactttcctcttccactttgataccattgggtcattgaatataactttttccaaataaagttttatgagaaatgccagtgtg

SEQ ID NO: 297595 - DNA, 2681 bp, Homo sapiens
aaggctggtactggccgagatctaggatccgggaatggtcccccctccactccacagaaaaccctcccctccctgctgtgcatgacgcgggctccctctgcacacagtgcacgaagacgctgtcgggagagcccaggattcaacacgggccttgagaaatgtggctcttgtacctcctggtgccggccctgttctgcagggcaggaggctccattcccatccctcagaagttatttggggaggtgacttcccctctgttccccaagccttaccccaacaactttgaaacaaccactgtgatcacagtccccacgggatacagggtgaagctcgtcttccagcagtttgacctggagccttctgaaggctgcttctatgattatgtcaagatctctgctgataagaaaagcctggggaggttctgtgggcaactgggttctccactgggcaaccccccgggaaagaaggaatttatgtcccaagggaacaagatgctgctgaccttccacacagacttctccaacgaggagaatgggaccatcatgttctacaagggcttcctggcctactaccaagctgtgggtctctggtgagtgacctccctaagatcagagccactactcaggtctcccagcagaagcttaaccctccttcctgaatgccttccagaccttgatgaatgtgcttcccggagcaaatcaggggaggaggatccccagccccagtgccagcacctgtgtcacaactacgttggaggctacttctgttcctgccgtccaggctatgagcttcaggaagacaggcattcctgccaggctgagtgcagcagcgagctgtacacggaggcatcaggctacatctccagcctggagtaccctcggtcctacccccctgacctgcgctgcaactacagcatccgggtggagcggggcctcaccctgcacctcaagttcctggagccttttgatattgatgaccaccagcaagtacactgcccctatgaccagctacagatctatgccaacgggaagaacattggcgagttctgtgggaagcaaaggccccccgacctcgacaccagcagcaatgctgtggatctgctgttcttcacagatgagtcgggggacagccggggctggaagctgcgctacaccaccgagatcatcaagtgcccccagcccaagaccctagacgagttcaccatcatccagaacctgcagcctcagtaccagttccgtgactacttcattgctacctgcaagcaaggctaccagctcatagaggggaaccaggtgctgcattccttcacagctgtctgccaggatgatggcacgtggcatcgtgccatgcccagatgcaagatcaaggactgtgggcagccccgaaacctgcctaatggtgacttccgttacaccaccacaatgggagtgaacacctacaaggcccgtatccagtactactgccatgagccatattacaagatgcagaccagagctggcagcagggagtctgagcaaggggtgtacacctgcacagcacagggcatttggaagaatgaacagaagggagagaagattcctcggtgcttgccagtgtgtgggaagcccgtgaaccccgtggaacagaggcagcgcatcatcggagggcaaaaagccaagatgggcaacttcccctggcaggtgttcaccaacatccacgggcgcgggggcggggccctgctgggcgaccgctggatcctcacagctgcccacaccctgtatcccaaggaacacgaagcgcaaagcaacgcctctttggatgtgttcctgggccacacaaatgtggaagagctcatgaagctaggaaatcaccccatccgcagggtcagcgtccacccggactaccgtcaggatgagtcctacaattttgagggggacatcgccctgctggagctggaaaatagtgtcaccctgggtcccaacctcctccccatctgcctccctgacaacgataccttctacgacctgggcttgatgggctatgtcagtggcttcggggtcatggaggagaagattgctcatgacctcaggtttgtccgtctgcccgtagctaatccacaggcctgtgagaactggctccggggaaagaataggatggatgtgttctctcaaaacatgttctgtgctggacacccatctctaaagcaggacgcctgccagggggatagtgggggcgtttttgcagtaagggacccgaacactgatcgctgggtggccacgggcatcgtgtcctggggcatcgggtgcagcaggggctatggcttctacaccaaagtgctcaactacgtggactggatcaagaaagagatggaggaggaggactgagcccagaattcactaggttcgaatccagagagcagtgtggaaaaaaaaaaacaaaaaacaactgaccagttgttgataaccactaagagtctctattaaaattactgatgcagaaagaccgtgtgtgaaattctctttcctgtagtcccattgatgtactttacctgaaacaacccaaagggcccctttctttcttctgaggattgcagaggatatagttatcaatctctagttgtcactttcctcttccactttgataccattgggtcattgaatataactttttccaaataaagttttatgagaaatgccagtgtg

SEQ ID NO: 297596 - DNA, 2411 bp, Homo sapiens
  misc_feature (344)..(344): n is a, c, g, or t
  misc_feature (354)..(354): n is a, c, g, or t
  misc_feature (550)..(551): n is a, c, g, or t
  misc_feature (568)..(568): n is a, c, g, or t
cgggtggagcggggcctcaccctgcacctcaagttcctggagccttttgatattgatgaccaccagcaagtacactgcccctatgaccagctacagatctatgccaacgggaagaacattggcgagttctgtgggaagcaaaggccccccgacctcgacaccagcagcaatgctgtggatctgctgttcttcacagatgagtcgggggacagccggggctggaagctgcgctacaccaccgagatcatcaagtgcccccagcccaagaccctagacgagttcaccatcggagggcaaaaagccaagatgggcaacttcccctggcaggtgttcaccaacatccncgggcggggncggggcctgctgggcgacgctggatcctcacagctgcccacacctgtatcccaaggaacacgaagcgcaaagcaacgcctctttggatgtgttcctgggccacacaaatgtggaagagctcatgaagctaggaaatcaccccatccgcagggtcagcgtccacccggactaccgtcaggatgagtcctacaatttnnagggggacatcgcctgntggagctggaaaatagtgtcaccctgggtcccaacctcctccccatctgccccctgacctgcgctgcaactacagcatccgggtggagcggggcctcaccctgcacctcaagttcctggagccttttgatattgatgaccaccagcaagtacactgcccctatgaccagctacagatctatgccaacgggaagaacattggcgagttctgtgggaagcaaaggccccccgacctcgacaccagcagcaatgctgtggatctgctgttcttcacagatgagtcgggggacagccggggctggaagctgcgctacaccaccgagatcatcaagtgcccccagcccaagaccctagacgagttcaccatcatccagaacctgcagcctcagtaccagttccgtgactacttcattgctacctgcaagcaaggctaccagctcatagaggggaaccaggtgctgcattccttcacagctgtctgccaggatgatggcacgtggcatcgtgccatgcccagatgcaagatcaaggactgtgggcagccccgaaacctgcctaatggtgacttccgttacaccaccacaatgggagtgaacacctacaaggcccgtatccagtactactgccatgagccatattacaagatgcagaccagagctggcagcagggagtctgagcaaggggtgtacacctgcacagcacagggcatttggaagaatgaacagaagggagagaagattcctcggtgcttgccagtgtgtgggaagcccgtgaaccccgtggaacagaggcagcgcatcatcggagggcaaaaagccaagatgggcaacttcccctggcaggtgttcaccaacatccacgggcgcgggggcggggccctgctgggcgaccgctggatcctcacagctgcccacaccctgtatcccaaggaacacgaagcgcaaagcaacgcctctttggatgtgttcctgggccacacaaatgtggaagagctcatgaagctaggaaatcaccccatccgcagggtcagcgtccacccggactaccgtcaggatgagtcctacaattttgagggggacatcgccctgctggagctggaaaatagtgtcaccctgggtcccaacctcctccccatctgcctccctgacaacgataccttctacgacctgggcttgatgggctatgtcagtggcttcggggtcatggaggagaagattgctcatgacctcaggtttgtccgtctgcccgtagctaatccacaggcctgtgagaactggctccggggaaagaataggatggatgtgttctctcaaaacatgttctgtgctggacacccatctctaaagcaggacgcctgccagggggatagtgggggcgtttttgcagtaagggacccgaacactgatcgctgggtggccacgggcatcgtgtcctggggcatcgggtgcagcaggggctatggcttctacaccaaagtgctcaactacgtggactggatcaagaaagagatggaggaggaggactgagcccagaattcactaggttcgaatccagagagcagtgtggaaaaaaaaaaacaaaaaacaactgaccagttgttgataaccactaagagtctctattaaaattactgatgcagaaagaccgtgtgtgaaattctctttcctgtagtcccattgatgtactttacctgaaacaacccaaagggcccctttctttcttctgaggattgcagaggatatagttatcaatctctagttgtcactttcctcttccactttgataccattgggtcattgaatataactttttccaaataaagttttatgagaaatgccagtgtg

SEQ ID NO: 297597 - DNA, 1810 bp, Homo sapiens
  misc_feature (24)..(24): n is a, c, g, or t
gaatgtcgagctacggtacccacncggagcgtggaactacagcatccgggtggagcggggcctcaccctgcacctcaagttcctggagccttttgatattgatgaccaccagcaagtacactgcccctatgaccagctacagatctatgccaacgggaagaacattggcgagttctgtgggaagcaaaggccccccgacctcgacaccagcagcaatgctgtggatctgctgttcttcacagatgagtcgggggacagccggggctggaagctgcgctacaccaccgagatcatcaagtgcccccagcccaagaccctagacgagttcaccatcatccagaacctgcagcctcagtaccagttccgtgactacttcattgctacctgcaagcaaggctaccagctcatagaggggaaccaggtgctgcattccttcacagctgtctgccaggatgatggcacgtggcatcgtgccatgcccagatgcaagatcaaggactgtgggcagccccgaaacctgcctaatggtgacttccgttacaccaccacaatgggagtgaacacctacaaggcccgtatccagtactactgccatgagccatattacaagatgcagaccagagctggcagcagggagtctgagcaaggggtgtacacctgcacagcacagggcatttggaagaatgaacagaagggagagaagattcctcggtgcttgccagtgtgtgggaagcccgtgaaccccgtggaacagaggcagcgcatcatcggagggcaaaaagccaagatgggcaacttcccctggcaggtgttcaccaacatccacgggcgcgggggcggggccctgctgggcgaccgctggatcctcacagctgcccacaccctgtatcccaaggaacacgaagcgcaaagcaacgcctctttggatgtgttcctgggccacacaaatgtggaagagctcatgaagctaggaaatcaccccatccgcagggtcagcgtccacccggactaccgtcaggatgagtcctacaattttgagggggacatcgccctgctggagctggaaaatagtgtcaccctgggtcccaacctcctccccatctgcctccctgacaacgataccttctacgacctgggcttgatgggctatgtcagtggcttcggggtcatggaggagaagattgctcatgacctcaggtttgtccgtctgcccgtagctaatccacaggcctgtgagaactggctccggggaaagaataggatggatgtgttctctcaaaacatgttctgtgctggacacccatctctaaagcaggacgcctgccagggggatagtgggggcgtttttgcagtaagggacccgaacactgatcgctgggtggccacgggcatcgtgtcctggggcatcgggtgcagcaggggctatggcttctacaccaaagtgctcaactacgtggactggatcaagaaagagatggaggaggaggactgagcccagaattcactaggttcgaatccagagagcagtgtggaaaaaaaaaaacaaaaaacaactgaccagttgttgataaccactaagagtctctattaaaattactgatgcagaaagaccgtgtgtgaaattctctttcctgtagtcccattgatgtactttacctgaaacaacccaaagggcccctttctttcttctgaggattgcagaggatatagttatcaatctctagttgtcactttcctcttccactttgataccattgggtcattgaatataactttttccaaataaagttttatgagaaatgccagtgtg

SEQ ID NO: 297598 - DNA, 932 bp, Homo sapiens
  misc_feature (925)..(925): n is a, c, g, or t
  misc_feature (930)..(930): n is a, c, g, or t
gaaactcagatcttttgtttatgcaaatagttcattccctccaacattcctccgggaatggtcccccctccactccacagaaaaccctcccctccctgctgtgcatgacgcgggctccctctgcacacagtgcacgaagacgctgtcgggagagcccaggattcaacacgggccttgagaaatgtggctcttgtacctcctggtgccggccctgttctgcagggcaggaggctccattcccatccctcagaagttatttggggaggtgacttcccctctgttccccaagccttaccccaacaactttgaaacaaccactgtgatcacagtccccacgggatacagggtgaagctcgtcttccagcagtttgacctggagccttctgaaggctgcttctatgattatgtcaagatctctgctgataagaaaagcctggggaggttctgtgggcaactgggttctccactgggcaaccccccgggaaagaaggaatttatgtcccaagggaacaagatgctgctgaccttccacacagacttctccaacgaggagaatgggaccatcatgttctacaagggcttcctggcctactaccaagctgtggaccttgatgaatgtgcttcccggagcaaatcaggggaggaggatccccagccccagtgccagcacctgtgtcacaactacgttggaggctacttctgttcctgccgtccaggctatgagcttcaggaagacaggcattcctgccaggctgagtgcagcagcgagctgtacacggaggcatcaggctacatctccagcctggagtaccctcggtcctacccccctgacctgcgctgcaactacagcatccgggtggagcgtaacctgactaagttctgagctttgaatgatacacagaagtcatgcctatacactcgattngcacnga

SEQ ID NO: 297599 - DNA, 1292 bp, Homo sapiens
gaaactcagatcttttgtttatgcaaatagttcattccctccaacattcctccgggaatggtcccccctccactccacagaaaaccctcccctccctgctgtgcatgacgcgggctccctctgcacacagtgcacgaagacgctgtcgggagagcccaggattcaacacgggccttgagaaatgtggctcttgtacctcctggtgccggccctgttctgcagggcaggaggctccattcccatccctcagaagttatttggggaggtgacttcccctctgttccccaagccttaccccaacaactttgaaacaaccactgtgatcacagtccccacgggatacagggtgaagctcgtcttccagcagtttgacctggagccttctgaaggctgcttctatgattatgtcaagatctctgctgataagaaaagcctggggaggttctgtgggcaactgggttctccactgggcaaccccccgggaaagaaggaatttatgtcccaagggaacaagatgctgctgaccttccacacagacttctccaacgaggagaatgggaccatcatgttctacaagggcttcctggcctactaccaagctgtggaccttgatgaatgtgcttcccggagcaaatcaggggaggaggatccccagccccagtgccagcacctgtgtcacaactacgttggaggctacttctgttcctgccgtccaggctatgagcttcaggaagacaggcattcctgccaggctgagtgcagcagcgagctgtacacggaggcatcaggctacatctccagcctggagtaccctcggtcctacccccctgacctgcgctgcaactacagcatccgggtggagcgccacgggcatcgtgtcctggggcatcgggtgcagcaggggctatggcttctacaccaaagtgctcaactacgtggactggatcaagaaagagatggaggaggaggactgagcccagaattcactaggttcgaatccagagagcagtgtggaaaaaaaaaaacaaaaaacaactgaccagttgttgataaccactaagagtctctattaaaattactgatgcagaaagaccgtgtgtgaaattctctttcctgtagtcccattgatgtactttacctgaaacaacccaaagggcccctttctttcttctgaggattgcagaggatatagttatcaatctctagttgtcactttcctcttccactttgataccattgggtcattgaatataactttttccaaataaagttttatgagaaatgccagtgtg

SEQ ID NO: 297600 - DNA, 2195 bp, Homo sapiens
caccggcaggttgtactccaccgggagttgtactccaccgggaggttgtactccaccggcagttgtactccaccggcaggttgtactccaccggcaggttgtactccaccggcaggttgtactccaccggcaggttgtactccaccggcaggttgtattcctggagccttttgatattgatgaccaccagcaagtacactgcccctatgaccagctacagggtacagccgtcctacccctgaaagaccccttcctccccttctgtctgcacttggctcctcttgtcccaacttcctcctggatcccctggccagctggggcaggaacggccaacatcacccatgggctgggtaagttcccacacaactagaattgggtcatggggatcccttttcaccttcccctgaaaacacacataaggcaggatttcatcaccaccaccaccaccctggccaccaggctactacccagttggccctgtgtaaaaacgtccaagctgaaaaaaaaaaaccctcctcccctactagatctatgccaacgggaagaacattggcgagttctgtgggaagcaaaggccccccgacctcgacaccagcagcaatgctgtggatctgctgttcttcacagatgagtcgggggacagccggggctggaagctgcgctacaccaccgagatcatcaagtgcccccagcccaagaccctagacgagttcaccatcatccagaacctgcagcctcagtaccagttccgtgactacttcattgctacctgcaagcaaggctaccagctcatagaggggaaccaggtgctgcattccttcacagctgtctgccaggatgatggcacgtggcatcgtgccatgcccagatgcaagatcaaggactgtgggcagccccgaaacctgcctaatggtgacttccgttacaccaccacaatgggagtgaacacctacaaggcccgtatccagtactactgccatgagccatattacaagatgcagaccagagctggcagcagggagtctgagcaaggggtgtacacctgcacagcacagggcatttggaagaatgaacagaagggagagaagattcctcggtgcttgccagtgtgtgggaagcccgtgaaccccgtggaacagaggcagcgcatcatcggagggcaaaaagccaagatgggcaacttcccctggcaggtgttcaccaacatccacgggcgcgggggcggggccctgctgggcgaccgctggatcctcacagctgcccacaccctgtatcccaaggaacacgaagcgcaaagcaacgcctctttggatgtgttcctgggccacacaaatgtggaagagctcatgaagctaggaaatcaccccatccgcagggtcagcgtccacccggactaccgtcaggatgagtcctacaattttgagggggacatcgccctgctggagctggaaaatagtgtcaccctgggtcccaacctcctccccatctgcctccctgacaacgataccttctacgacctgggcttgatgggctatgtcagtggcttcggggtcatggaggagaagattgctcatgacctcaggtttgtccgtctgcccgtagctaatccacaggcctgtgagaactggctccggggaaagaataggatggatgtgttctctcaaaacatgttctgtgctggacacccatctctaaagcaggacgcctgccagggggatagtgggggcgtttttgcagtaagggacccgaacactgatcgctgggtggccacgggcatcgtgtcctggggcatcgggtgcagcaggggctatggcttctacaccaaagtgctcaactacgtggactggatcaagaaagagatggaggaggaggactgagcccagaattcactaggttcgaatccagagagcagtgtggaaaaaaaaaaacaaaaaacaactgaccagttgttgataaccactaagagtctctattaaaattactgatgcagaaagaccgtgtgtgaaattctctttcctgtagtcccattgatgtactttacctgaaacaacccaaagggcccctttctttcttctgaggattgcagaggatatagttatcaatctctagttgtcactttcctcttccactttgataccattgggtcattgaatataactttttccaaataaagttttatgagaaatgccagtgtg

SEQ ID NO: 297601 - DNA, 1717 bp, Homo sapiens
ctagcggatccttatgaggcaggacactgcccgtctgaccatgttacagatctatgccaacgggaagaacattggcgagttctgtgggaagcaaaggccccccgacctcgacaccagcagcaatgctgtggatctgctgttcttcacagatgagtcgggggacagccggggctggaagctgcgctacaccaccgagatcatcaagtgcccccagcccaagaccctagacgagttcaccatcatccagaacctgcagcctcagtaccagttccgtgactacttcattgctacctgcaagcaaggctaccagctcatagaggggaaccaggtgctgcattccttcacagctgtctgccaggatgatggcacgtggcatcgtgccatgcccagatgcaagatcaaggactgtgggcagccccgaaacctgcctaatggtgacttccgttacaccaccacaatgggagtgaacacctacaaggcccgtatccagtactactgccatgagccatattacaagatgcagaccagagctggcagcagggagtctgagcaaggggtgtacacctgcacagcacagggcatttggaagaatgaacagaagggagagaagattcctcggtgcttgccagtgtgtgggaagcccgtgaaccccgtggaacagaggcagcgcatcatcggagggcaaaaagccaagatgggcaacttcccctggcaggtgttcaccaacatccacgggcgcgggggcggggccctgctgggcgaccgctggatcctcacagctgcccacaccctgtatcccaaggaacacgaagcgcaaagcaacgcctctttggatgtgttcctgggccacacaaatgtggaagagctcatgaagctaggaaatcaccccatccgcagggtcagcgtccacccggactaccgtcaggatgagtcctacaattttgagggggacatcgccctgctggagctggaaaatagtgtcaccctgggtcccaacctcctccccatctgcctccctgacaacgataccttctacgacctgggcttgatgggctatgtcagtggcttcggggtcatggaggagaagattgctcatgacctcaggtttgtccgtctgcccgtagctaatccacaggcctgtgagaactggctccggggaaagaataggatggatgtgttctctcaaaacatgttctgtgctggacacccatctctaaagcaggacgcctgccagggggatagtgggggcgtttttgcagtaagggacccgaacactgatcgctgggtggccacgggcatcgtgtcctggggcatcgggtgcagcaggggctatggcttctacaccaaagtgctcaactacgtggactggatcaagaaagagatggaggaggaggactgagcccagaattcactaggttcgaatccagagagcagtgtggaaaaaaaaaaacaaaaaacaactgaccagttgttgataaccactaagagtctctattaaaattactgatgcagaaagaccgtgtgtgaaattctctttcctgtagtcccattgatgtactttacctgaaacaacccaaagggcccctttctttcttctgaggattgcagaggatatagttatcaatctctagttgtcactttcctcttccactttgataccattgggtcattgaatataactttttccaaataaagttttatgagaaatgccagtgtg

SEQ ID NO: 297602 - DNA, 1453 bp, Homo sapiens
  misc_feature (344)..(344): n is a, c, g, or t
  misc_feature (354)..(354): n is a, c, g, or t
  misc_feature (550)..(551): n is a, c, g, or t
  misc_feature (568)..(568): n is a, c, g, or t
  misc_feature (619)..(619): n is a, c, g, or t
  misc_feature (673)..(673): n is a, c, g, or t
  misc_feature (710)..(710): n is a, c, g, or t
cgggtggagcggggcctcaccctgcacctcaagttcctggagccttttgatattgatgaccaccagcaagtacactgcccctatgaccagctacagatctatgccaacgggaagaacattggcgagttctgtgggaagcaaaggccccccgacctcgacaccagcagcaatgctgtggatctgctgttcttcacagatgagtcgggggacagccggggctggaagctgcgctacaccaccgagatcatcaagtgcccccagcccaagaccctagacgagttcaccatcggagggcaaaaagccaagatgggcaacttcccctggcaggtgttcaccaacatccncgggcggggncggggcctgctgggcgacgctggatcctcacagctgcccacacctgtatcccaaggaacacgaagcgcaaagcaacgcctctttggatgtgttcctgggccacacaaatgtggaagagctcatgaagctaggaaatcaccccatccgcagggtcagcgtccacccggactaccgtcaggatgagtcctacaatttnnagggggacatcgcctgntggagctggaaaatagtgtcaccctgggtcccaacctcctccccatctgcntcctgacaagataccttctacgacctgggcttgatgggctatgtcagtggctcngggtcatggaggagaagattgtcatgacctcaggttngtccgtctgccgtagctaatccacaggcctctgttccccaagccttaccccaacaactttgaaacaaccactgtgatcacagtccccacgggatacagggtgaagctcgtcttccagcagtttgacctggagccttctgaaggctgcttctatgattatgtcaagatctctgctgataagaaaagcctggggaggttctgtgggcaactgggttctccactgggcaaccccccgggaaagaaggaatttatgtcccaagggaacaagatgctgctgaccttccacacagacttctccaacgaggagaatgggaccccacgggcatcgtgtcctggggcatcgggtgcagcaggggctatggcttctacaccaaagtgctcaactacgtggactggatcaagaaagagatggaggaggaggactgagcccagaattcactaggttcgaatccagagagcagtgtggaaaaaaaaaaacaaaaaacaactgaccagttgttgataaccactaagagtctctattaaaattactgatgcagaaagaccgtgtgtgaaattctctttcctgtagtcccattgatgtactttacctgaaacaacccaaagggcccctttctttcttctgaggattgcagaggatatagttatcaatctctagttgtcactttcctcttccactttgataccattgggtcattgaatataactttttccaaataaagttttatgagaaatgccagtgtg

SEQ ID NO: 297603 - DNA, 316 bp, Homo sapiens
aaagggtgaggtacccagtccaggacaacacgcaaagagtgaatcagtgggagactcagggaacagctgaaagtcacatggggaagtttgcagcagctgagcccagcaggtagtgaccagccagagccattgcggtgcatgatgcactctgggcgagacaaggaggaccatcactgagccaccacgtgcgccactccgcaacagatcttcttcctacccactgtccttcttccaccagatctctgctgataagaaaagcctggggaggttctgtgggcaactgggttctccactgggcaaccccccgggaaagaag

SEQ ID NO: 297604 - DNA, 1717 bp, Homo sapiens
  misc_feature (1717)..(1717): n is a, c, g, or t
gagtcagctgggtatgtgtgcttgtgggtatcaggtgcatggctgtgcgtacatgtgtgcgtaagagtcggtgcatttgtgtttcagcgcggctaaggccctgactgagatgctgtgtgtgcgggggtgggtgtgactgaatgcgggcacgggtgtccgtctgtttatacgtgtgtttgcgtgtttgggtgtgcaggtggctctgcgtaagcgtctgtgtgcagggggtcggcacatgggggaggatgcccatggttgggtaaccgcaggtccgcttgaccctctgccacctaggactgtgtctatacggcgtctgggctacagtgtgtttgagttgccgtgtgcgtttccgttgcggggtgtgggttgccacggggcaactgcatttttctgcgtcttcatggccaggggtacagggggcgtcgggcttttcctgggggtttttctgtgtgcgtgtgtaattatgtgcttagttcacatcttcatagtgcgcctttgtgttttcctgggtatctaaccattgcacgtgtgcccgggacttcagcgataagtgtttcggtgttcctgcgtgcggatttgtgctctccggggaggtctgcggcccaggttcgattcctgcgacttgtcctaggcaggcctgtatgtgcgcggcggccgcgtgctgtacagtgtgagggaacgtgtaccaaacgctcgcgggatacctgtgcccgtctagccaagagtgcacccgtgtgcgcgagcgggcttctgggacgccgccgtggtcgggggcggccctgcgaggggagggggtcacagggactggccggcgccggccccgtgcgcacggaggcgggggcggggggcgggggccgcgaggggggaggcggtacgaaaagggcggcgcgcgcggcggcggcggcagctccccggcagcggcggtggagagcgcagcgcgcagcccggtgcagccctggctttcccctcgctgcgcgcccgcgccccctttcgcgtccgcaaccagaagcccagtgcggcgccaggagccggacccgcgcccgcaccgctcccgggaccgcgaccccggccgcccagagatgaccgcgaccgaagccctcctgcgcgtcctcttgctcctgctggctttcggccacagcacctatggggctgaatgcttcccggcctgcaacccccaaaatggattctgcgaggatgacaatgtttgcaggtgccagcctggctggcagggtcccctttgtgaccagtgcgtgacctctcccggctgccttcacggactctgtggagaacccgggcagtgcatttgcaccgacggctgggacggggagctctgtgatagagatgttcgggcctgctcctcggccccctgtgccaacaacgggacctgcgtgagcctggacgatggcctctatgaatgctcctgtgcccccgggtactcgggaaaggactgccagaaaaaggacgggccctgtgtgatcaacggctccccctgccagcacggaggcacctgcgtggatgatgagggccgggcctcccatgcctcctgcctgtgcccccctggcttctcaggcaatttctgcgagatcgtggccaacagctgcacccccaacccatgcgagaacgacggcgtctgcactgacatcgggggcgcccttcgtgcggtctacgtacgacgagctcaagaaggtatctaagaagtcctcggaacagcagacan

SEQ ID NO: 297605 - DNA, 1705 bp, Homo sapiens
  misc_feature (1622)..(1622): n is a, c, g, or t
  misc_feature (1678)..(1678): n is a, c, g, or t
  misc_feature (1705)..(1705): n is a, c, g, or t
gagtcagctgggtatgtgtgcttgtgggtatcaggtgcatggctgtgcgtacatgtgtgcgtaagagtcggtgcatttgtgtttcagcgcggctaaggccctgactgagatgctgtgtgtgcgggggtgggtgtgactgaatgcgggcacgggtgtccgtctgtttatacgtgtgtttgcgtgtttgggtgtgcaggtggctctgcgtaagcgtctgtgtgcagggggtcggcacatgggggaggatgcccatggttgggtaaccgcaggtccgcttgaccctctgccacctaggactgtgtctatacggcgtctgggctacagtgtgtttgagttgccgtgtgcgtttccgttgcggggtgtgggttgccacggggcaactgcatttttctgcgtcttcatggccaggggtacagggggcgtcgggcttttcctgggggtttttctgtgtgcgtgtgtaattatgtgcttagttcacatcttcatagtgcgcctttgtgttttcctgggtatctaaccattgcacgtgtgcccgggacttcagcgataagtgtttcggtgttcctgcgtgcggatttgtgctctccggggaggtctgcggcccaggttcgattcctgcgacttgtcctaggcaggcctgtatgtgcgcggcggccgcgtgctgtacagtgtgagggaacgtgtaccaaacgctcgcgggatacctgtgcccgtctagccaagagtgcacccgtgtgcgcgagcgggcttctgggacgccgccgtggtcgggggcggccctgcgaggggagggggtcacagggactggccggcgccggccccgtgcgcacggaggcgggggcggggggcgggggccgcgaggggggaggcggtacgaaaagggcggcgcgcgcggcggcggcggcagctccccggcagcggcggtggagagcgcagcgcgcagcccggtgcagccctggctttcccctcgctgcgcgcccgcgccccctttcgcgtccgcaaccagaagcccagtgcggcgccaggagccggacccgcgcccgcaccgctcccgggaccgcgaccccggccgcccagagatgaccgcgaccgaagccctcctgcgcgtcctcttgctcctgctggctttcggccacagcacctatggggctgaatgcttcccggcctgcaacccccaaaatggattctgcgaggatgacaatgtttgcaggtgccagcctggctggcagggtcccctttgtgaccagtgcgtgacctctcccggctgccttcacggactctgtggagaacccgggcagtgcatttgcaccgacggctgggacggggagctctgtgatagagatgttcgggcctgctcctcggccccctgtgccaacaacgggacctgcgtgagcctggacgatggcctctatgaatgctcctgtgcccccgggtactcgggaaaggactgccagaaaaaggacgggccctgtgtgatcaacggctccccctgccagcacggaggcacctgcgtggatgatgagggccgggcctcccatgcctcctgcctgtgcccccctggcttctcaggcaatttctgcgagatcgtggccaacagctgcaccccaaccatgcagacacgngttgatgaatcgggcacttcgtgcgtgcagcgttatgcaactgagcgcgtacatgnagagctcaacgggactgtgaaacagtn

SEQ ID NO: 297606 - DNA, 1696 bp, Homo sapiens
  misc_feature (1611)..(1611): n is a, c, g, or t
  misc_feature (1619)..(1619): n is a, c, g, or t
  misc_feature (1678)..(1678): n is a, c, g, or t
gagtcagctgggtatgtgtgcttgtgggtatcaggtgcatggctgtgcgtacatgtgtgcgtaagagtcggtgcatttgtgtttcagcgcggctaaggccctgactgagatgctgtgtgtgcgggggtgggtgtgactgaatgcgggcacgggtgtccgtctgtttatacgtgtgtttgcgtgtttgggtgtgcaggtggctctgcgtaagcgtctgtgtgcagggggtcggcacatgggggaggatgcccatggttgggtaaccgcaggtccgcttgaccctctgccacctaggactgtgtctatacggcgtctgggctacagtgtgtttgagttgccgtgtgcgtttccgttgcggggtgtgggttgccacggggcaactgcatttttctgcgtcttcatggccaggggtacagggggcgtcgggcttttcctgggggtttttctgtgtgcgtgtgtaattatgtgcttagttcacatcttcatagtgcgcctttgtgttttcctgggtatctaaccattgcacgtgtgcccgggacttcagcgataagtgtttcggtgttcctgcgtgcggatttgtgctctccggggaggtctgcggcccaggttcgattcctgcgacttgtcctaggcaggcctgtatgtgcgcggcggccgcgtgctgtacagtgtgagggaacgtgtaccaaacgctcgcgggatacctgtgcccgtctagccaagagtgcacccgtgtgcgcgagcgggcttctgggacgccgccgtggtcgggggcggccctgcgaggggagggggtcacagggactggccggcgccggccccgtgcgcacggaggcgggggcggggggcgggggccgcgaggggggaggcggtacgaaaagggcggcgcgcgcggcggcggcggcagctccccggcagcggcggtggagagcgcagcgcgcagcccggtgcagccctggctttcccctcgctgcgcgcccgcgccccctttcgcgtccgcaaccagaagcccagtgcggcgccaggagccggacccgcgcccgcaccgctcccgggaccgcgaccccggccgcccagagatgaccgcgaccgaagccctcctgcgcgtcctcttgctcctgctggctttcggccacagcacctatggggctgaatgcttcccggcctgcaacccccaaaatggattctgcgaggatgacaatgtttgcaggtgccagcctggctggcagggtcccctttgtgaccagtgcgtgacctctcccggctgccttcacggactctgtggagaacccgggcagtgcatttgcaccgacggctgggacggggagctctgtgatagagatgttcgggcctgctcctcggccccctgtgccaacaacgggacctgcgtgagcctggacgatggcctctatgaatgctcctgtgcccccgggtactcgggaaaggactgccagaaaaaggacgggccctgtgtgatcaacggctccccctgccagcacggaggcacctgcgtggatgatgagggccgggcctcccatgcctcctgcctgtgcccccctggcttctcaggcaatttctgcgagatcgtggccaacagctgcacccccaaanccaatgcngaagaaacgaacggggggttctgcaacttgaaaatccgggggggcgaaactttccggcntgcccgggttgccccaag

SEQ ID NO: 297607 - DNA, 1568 bp, Homo sapiens
gagtcagctgggtatgtgtgcttgtgggtatcaggtgcatggctgtgcgtacatgtgtgcgtaagagtcggtgcatttgtgtttcagcgcggctaaggccctgactgagatgctgtgtgtgcgggggtgggtgtgactgaatgcgggcacgggtgtccgtctgtttatacgtgtgtttgcgtgtttgggtgtgcaggtggctctgcgtaagcgtctgtgtgcagggggtcggcacatgggggaggatgcccatggttgggtaaccgcaggtccgcttgaccctctgccacctaggactgtgtctatacggcgtctgggctacagtgtgtttgagttgccgtgtgcgtttccgttgcggggtgtgggttgccacggggcaactgcatttttctgcgtcttcatggccaggggtacagggggcgtcgggcttttcctgggggtttttctgtgtgcgtgtgtaattatgtgcttagttcacatcttcatagtgcgcctttgtgttttcctgggtatctaaccattgcacgtgtgcccgggacttcagcgataagtgtttcggtgttcctgcgtgcggatttgtgctctccggggaggtctgcggcccaggttcgattcctgcgacttgtcctaggcaggcctgtatgtgcgcggcggccgcgtgctgtacagtgtgagggaacgtgtaccaaacgctcgcgggatacctgtgcccgtctagccaagagtgcacccgtgtgcgcgagcgggcttctgggacgccgccgtggtcgggggcggccctgcgaggggagggggtcacagggactggccggcgccggccccgtgcgcacggaggcgggggcggggggcgggggccgcgaggggggaggcggtacgaaaagggcggcgcgcgcggcggcggcggcagctccccggcagcggcggtggagagcgcagcgcgcagcccggtgcagccctggctttcccctcgctgcgcgcccgcgccccctttcgcgtccgcaaccagaagcccagtgcggcgccaggagccggacccgcgcccgcaccgctcccgggaccgcgaccccggccgcccagagatgaccgcgaccgaagccctcctgcgcgtcctcttgctcctgctggctttcggccacagcacctatggggctgaatgcttcccggcctgcaacccccaaaatggattctgcgaggatgacaatgtttgcaggtgccagcctggctggcagggtcccctttgtgaccagtgcgtgacctctacttgtcgcttcacgcgcttgtctcgaaccccggcagcgtcgttccgcctatcttaccgctcgctctgtcttcactatgtcaccgtcttcccctctgcccttgatcctctccacatctgtctccccacacgccgccaccttccactctccttctcctcccctaccatcctttgtgacttcctccttctacctaccataccttccacgcgctcttctattcttctgcccccttccaccgctccccttctactcacgagctcccggactatccatcccctcctactctctcctctacgcctctccctctcc

SEQ ID NO: 297608 - DNA, 1407 bp, Homo sapiens
  misc_feature (1347)..(1348): n is a, c, g, or t
  misc_feature (1368)..(1368): n is a, c, g, or t
  misc_feature (1380)..(1380): n is a, c, g, or t
gagtcagctgggtatgtgtgcttgtgggtatcaggtgcatggctgtgcgtacatgtgtgcgtaagagtcggtgcatttgtgtttcagcgcggctaaggccctgactgagatgctgtgtgtgcgggggtgggtgtgactgaatgcgggcacgggtgtccgtctgtttatacgtgtgtttgcgtgtttgggtgtgcaggtggctctgcgtaagcgtctgtgtgcagggggtcggcacatgggggaggatgcccatggttgggtaaccgcaggtccgcttgaccctctgccacctaggactgtgtctatacggcgtctgggctacagtgtgtttgagttgccgtgtgcgtttccgttgcggggtgtgggttgccacggggcaactgcatttttctgcgtcttcatggccaggggtacagggggcgtcgggcttttcctgggggtttttctgtgtgcgtgtgtaattatgtgcttagttcacatcttcatagtgcgcctttgtgttttcctgggtatctaaccattgcacgtgtgcccgggacttcagcgataagtgtttcggtgttcctgcgtgcggatttgtgctctccggggaggtctgcggcccaggttcgattcctgcgacttgtcctaggcaggcctgtatgtgcgcggcggccgcgtgctgtacagtgtgagggaacgtgtaccaaacgctcgcgggatacctgtgcccgtctagccaagagtgcacccgtgtgcgcgagcgggcttctgggacgccgccgtggtcgggggcggccctgcgaggggagggggtcacagggactggccggcgccggccccgtgcgcacggaggcgggggcggggggcgggggccgcgaggggggaggcggtacgaaaagggcggcgcgcgcggcggcggcggcagctccccggcagcggcggtggagagcgcagcgcgcagcccggtgcagccctggctttcccctcgctgcgcgcccgcgccccctttcgcgtccgcaaccagaagcccagtgcggcgccaggagccggacccgcgcccgcaccgctcccgggaccgcgaccccggccgcccagagatgaccgcgaccgaagccctcctgcgcgtcctcttgctcctgctggctttcggccacagcacctatggggctgaatgcttcccggcctgcaacccccaaaatggattctgcgaggatgacaatgtttgcaggtgccagcctggctggcagggtcccctttgtgaccagtgcgtgacctctcccggctgccttcacggactctgtggagaacccgggcagtgcatttgcaccgacggctgggacggggagctctgtgatagagatgttnncgggcctggctccctccggnccccccccctgntggccaaaacgaacgggacctgcgtga

SEQ ID NO: 297609 - DNA, 2937 bp, Homo sapiens
gagtcagctgggtatgtgtgcttgtgggtatcaggtgcatggctgtgcgtacatgtgtgcgtaagagtcggtgcatttgtgtttcagcgcggctaaggccctgactgagatgctgtgtgtgcgggggtgggtgtgactgaatgcgggcacgggtgtccgtctgtttatacgtgtgtttgcgtgtttgggtgtgcaggtggctctgcgtaagcgtctgtgtgcagggggtcggcacatgggggaggatgcccatggttgggtaaccgcaggtccgcttgaccctctgccacctaggactgtgtctatacggcgtctgggctacagtgtgtttgagttgccgtgtgcgtttccgttgcggggtgtgggttgccacggggcaactgcatttttctgcgtcttcatggccaggggtacagggggcgtcgggcttttcctgggggtttttctgtgtgcgtgtgtaattatgtgcttagttcacatcttcatagtgcgcctttgtgttttcctgggtatctaaccattgcacgtgtgcccgggacttcagcgataagtgtttcggtgttcctgcgtgcggatttgtgctctccggggaggtctgcggcccaggttcgattcctgcgacttgtcctaggcaggcctgtatgtgcgcggcggccgcgtgctgtacagtgtgagggaacgtgtaccaaacgctcgcgggatacctgtgcccgtctagccaagagtgcacccgtgtgcgcgagcgggcttctgggacgccgccgtggtcgggggcggccctgcgaggggagggggtcacagggactggccggcgccggccccgtgcgcacggaggcgggggcggggggcgggggccgcgaggggggaggcggtacgaaaagggcggcgcgcgcggcggcggcggcagctccccggcagcggcggtggagagcgcagcgcgcagcccggtgcagccctggctttcccctcgctgcgcgcccgcgccccctttcgcgtccgcaaccagaagcccagtgcggcgccaggagccggacccgcgcccgcaccgctcccgggaccgcgaccccggccgcccagagatgaccgcgaccgaagccctcctgcgcgtcctcttgctcctgctggctttcggccacagcacctatggggctgaatgcttcccggcctgcaacccccaaaatggattctgcgaggatgacaatgtttgcaggtgccagcctggctggcagggtcccctttgtgaccagtgcgtgacctctcccggctgccttcacggactctgtggagaacccgggcagtgcatttgcaccgacggctgggacggggagctctgtgatagagatgttcgggcctgctcctcggccccctgtgccaacaacgggacctgcgtgagcctggacgatggcctctatgaatgctcctgtgcccccgggtactcgggaaaggactgccagaaaaaggacgggccctgtgtgatcaacggctccccctgccagcacggaggcacctgcgtggatgatgagggccgggcctcccatgcctcctgcctgtgcccccctggcttctcaggcaatttctgcgagatcgtggccaacagctgcacccccaacccatgcgagaacgacggcgtctgcactgacatcgggggcgacttccgctgccggtgcccagccggcttcatcgacaagacctgcagccgcccggtgaccaactgcgccagcagcccgtgccagaacgggggcacctgcctgcagcacacccaggtgagctacgagtgtctgtgcaagcccgagttcacaggtctcacctgtgtcaagaagcgcgcgctgagcccccagcaggtcacccgtctgcccagcggctatgggctggcctaccgcctgacccctggggtgcacgagctgccggtgcagcagccggagcaccgcatcctgaaggtgtccatgaaagagctcaacaagaaaacccctctcctcaccgagggccaggccatctgcttcaccatcctgggcgtgctcaccagcctggtggtgctgggcactgtgggtatcgtcttcctcaacaagtgcgagacctgggtgtccaacctgcgctacaaccacatgctgcggaagaagaagaacctgctgcttcagtacaacagcggggaggacctggccgtcaacatcatcttccccgagaagatcgacatgaccaccttcagcaaggaggccggcgacgaggagatctaagcagcgttcccacagccccctctagattcttggagttccgcagagcttactatacgcggtctgtcctaatctttgtggtgttcgctatctcttgtgtcaaatctggtgaacgctacgcttacatatattgtctttgtgctgctgtgtgacaaacgcaatgcaaaaacaatcctctttctctctcttaatgcatgatacagaataataataagaatttcatctttaaatgagaaaaaaaaaaaaaaaaaaaaaaaaaaaaaaaaaaaaaaaaaaaaaaaaaaaaaaaaaaaaaaaaaaaaaaaaaaaacaagaaggaaacgaaagcaagaacacacacaaacacgaaagaacaacacaagaaacaaccaaaggggggcggcggcgccacaacaaataaaatcatccccgggggggagccacacatgtgatagccaccccccatattgtctgaagagacgagcccccccccacgctgaacggcgatttaattcaaacaagcgacgaccgggcccacgttaccaagccacccccacgcgacacacaccgccggaggctgactgtcggagcgcaaccccactctgtcgggcggggggacaacagagggcacccacccccccagagataccggcggcggccgaataaacacgtcgcggcggtgtggggaccaccaccatcttggcgggaaacggcgcgacgattacaatac

SEQ ID NO: 297610 - DNA, 2555 bp, Homo sapiens
gagtcagctgggtatgtgtgcttgtgggtatcaggtgcatggctgtgcgtacatgtgtgcgtaagagtcggtgcatttgtgtttcagcgcggctaaggccctgactgagatgctgtgtgtgcgggggtgggtgtgactgaatgcgggcacgggtgtccgtctgtttatacgtgtgtttgcgtgtttgggtgtgcaggtggctctgcgtaagcgtctgtgtgcagggggtcggcacatgggggaggatgcccatggttgggtaaccgcaggtccgcttgaccctctgccacctaggactgtgtctatacggcgtctgggctacagtgtgtttgagttgccgtgtgcgtttccgttgcggggtgtgggttgccacggggcaactgcatttttctgcgtcttcatggccaggggtacagggggcgtcgggcttttcctgggggtttttctgtgtgcgtgtgtaattatgtgcttagttcacatcttcatagtgcgcctttgtgttttcctgggtatctaaccattgcacgtgtgcccgggacttcagcgataagtgtttcggtgttcctgcgtgcggatttgtgctctccggggaggtctgcggcccaggttcgattcctgcgacttgtcctaggcaggcctgtatgtgcgcggcggccgcgtgctgtacagtgtgagggaacgtgtaccaaacgctcgcgggatacctgtgcccgtctagccaagagtgcacccgtgtgcgcgagcgggcttctgggacgccgccgtggtcgggggcggccctgcgaggggagggggtcacagggactggccggcgccggccccgtgcgcacggaggcgggggcggggggcgggggccgcgaggggggaggcggtacgaaaagggcggcgcgcgcggcggcggcggcagctccccggcagcggcggtggagagcgcagcgcgcagcccggtgcagccctggctttcccctcgctgcgcgcccgcgccccctttcgcgtccgcaaccagaagcccagtgcggcgccaggagccggacccgcgcccgcaccgctcccgggaccgcgaccccggccgcccagagatgaccgcgaccgaagccctcctgcgcgtcctcttgctcctgctggctttcggccacagcacctatggggctgaatgcttcccggcctgcaacccccaaaatggattctgcgaggatgacaatgtttgcaggtgccagcctggctggcagggtcccctttgtgaccagtgcgtgacctctcccggctgccttcacggactctgtggagaacccgggcagtgcatttgcaccgacggctgggacggggagctctgtgatagagatgttcgggcctgctcctcggccccctgtgccaacaacgggacctgcgtgagcctggacgatggcctctatgaatgctcctgtgcccccgggtactcgggaaaggactgccagaaaaaggacgggccctgtgtgatcaacggctccccctgccagcacggaggcacctgcgtggatgatgagggccgggcctcccatgcctcctgcctgtgcccccctggcttctcaggcaatttctgcgagatcgtggccaacagctgcacccccaacccatgcgagaacgacggcgtctgcactgacatcgggggcgacttccgctgccggtgcccagccggcttcatcgacaagacctgcagccgcccggtgaccaactgcgccagcagcccgtgccagaacgggggcacctgcctgcagcacacccaggtgagctacgagtgtctgtgcaagcccgagttcacaggtctcacctgtgtcaagaagcgcgcgctgagcccccagcaggtcacccgtctgcccagcggctatgggctggcctaccgcctgacccctggggtgcacgagctgccggtgcagcagccggagcaccgcatcctgaaggtgtccatgaaagagctcaacaagaaaacccctctcctcaccgagggccaggccatctgcttcaccatcctgggcgtgctcaccagcctggtggtgctgggcactgtgggtatcgtcttcctcaacaagtgcgagacctgggtgtccaacctgcgctacaaccacatgctgcggaagaagaagaacctgctgcttcagtacaacagcggggaggacctggccgtcaacatcatcttccccgagaagatcgacatgaccaccttcagcaaggaggccggcgacgaggagatctaagcagcgttcccacagccccctctagattcttggagttccgcagagcttactatacgcggtctgtcctaatctttgtggtgttcgctatctcttgtgtcaaatctggtgaacgctacgcttacatatattgtctttgtgctgctgtgtgacaaacgcaatgcaaaaacaatcctctttctctctcttaatgcatgatacagaataataataagaatttcatctttaaatgagagtaagagaaataagtatgttattctaaaatctaaactcaaatgaaatttcaaaaaagaccaaaaaaaaacaaggcaacagaaccagggctca

SEQ ID NO: 297611 - DNA, 2718 bp, Homo sapiens
gagtcagctgggtatgtgtgcttgtgggtatcaggtgcatggctgtgcgtacatgtgtgcgtaagagtcggtgcatttgtgtttcagcgcggctaaggccctgactgagatgctgtgtgtgcgggggtgggtgtgactgaatgcgggcacgggtgtccgtctgtttatacgtgtgtttgcgtgtttgggtgtgcaggtggctctgcgtaagcgtctgtgtgcagggggtcggcacatgggggaggatgcccatggttgggtaaccgcaggtccgcttgaccctctgccacctaggactgtgtctatacggcgtctgggctacagtgtgtttgagttgccgtgtgcgtttccgttgcggggtgtgggttgccacggggcaactgcatttttctgcgtcttcatggccaggggtacagggggcgtcgggcttttcctgggggtttttctgtgtgcgtgtgtaattatgtgcttagttcacatcttcatagtgcgcctttgtgttttcctgggtatctaaccattgcacgtgtgcccgggacttcagcgataagtgtttcggtgttcctgcgtgcggatttgtgctctccggggaggtctgcggcccaggttcgattcctgcgacttgtcctaggcaggcctgtatgtgcgcggcggccgcgtgctgtacagtgtgagggaacgtgtaccaaacgctcgcgggatacctgtgcccgtctagccaagagtgcacccgtgtgcgcgagcgggcttctgggacgccgccgtggtcgggggcggccctgcgaggggagggggtcacagggactggccggcgccggccccgtgcgcacggaggcgggggcggggggcgggggccgcgaggggggaggcggtacgaaaagggcggcgcgcgcggcggcggcggcagctccccggcagcggcggtggagagcgcagcgcgcagcccggtgcagccctggctttcccctcgctgcgcgcccgcgccccctttcgcgtccgcaaccagaagcccagtgcggcgccaggagccggacccgcgcccgcaccgctcccgggaccgcgaccccggccgcccagagatgaccgcgaccgaagccctcctgcgcgtcctcttgctcctgctggctttcggccacagcacctatggggctgaatgcttcccggcctgcaacccccaaaatggattctgcgaggatgacaatgtttgcaggtgccagcctggctggcagggtcccctttgtgaccagtgcgtgacctctcccggctgccttcacggactctgtggagaacccgggcagtgcatttgcaccgacggctgggacggggagctctgtgatagagatgttcgggcctgctcctcggccccctgtgccaacaacgggacctgcgtgagcctggacgatggcctctatgaatgctcctgtgcccccgggtactcgggaaaggactgccagaaaaaggacgggccctgtgtgatcaacggctccccctgccagcacggaggcacctgcgtggatgatgagggccgggcctcccatgcctcctgcctgtgcccccctggcttctcaggcaatttctgcgagatcgtggccaacagctgcacccccaacccatgcgagaacgacggcgtctgcactgacatcgggggcgacttccgctgccggtgcccagccggcttcatcgacaagacctgcagccgcccggtgaccaactgcgccagcagcccgtgccagaacgggggcacctgcctgcagcacacccagggccaggccatctgcttcaccatcctgggcgtgctcaccagcctggtggtgctgggcactgtgggtatcgtcttcctcaacaagtgcgagacctgggtgtccaacctgcgctacaaccacatgctgcggaagaagaagaacctgctgcttcagtacaacagcggggaggacctggccgtcaacatcatcttccccgagaagatcgacatgaccaccttcagcaaggaggccggcgacgaggagatctaagcagcgttcccacagccccctctagattcttggagttccgcagagcttactatacgcggtctgtcctaatctttgtggtgttcgctatctcttgtgtcaaatctggtgaacgctacgcttacatatattgtctttgtgctgctgtgtgacaaacgcaatgcaaaaacaatcctctttctctctcttaatgcatgatacagaataataataagaatttcatctttaaatgagaaaaaaaaaaaaaaaaaaaaaaaaaaaaaaaaaaaaaaaaaaaaaaaaaaaaaaaaaaaaaaaaaaaaaaaaaaaacaagaaggaaacgaaagcaagaacacacacaaacacgaaagaacaacacaagaaacaaccaaaggggggcggcggcgccacaacaaataaaatcatccccgggggggagccacacatgtgatagccaccccccatattgtctgaagagacgagcccccccccacgctgaacggcgatttaattcaaacaagcgacgaccgggcccacgttaccaagccacccccacgcgacacacaccgccggaggctgactgtcggagcgcaaccccactctgtcgggcggggggacaacagagggcacccacccccccagagataccggcggcggccgaataaacacgtcgcggcggtgtggggaccaccaccatcttggcgggaaacggcgcgacgattacaatac

SEQ ID NO: 297612 - DNA, 2832 bp, Homo sapiens
gagtcagctgggtatgtgtgcttgtgggtatcaggtgcatggctgtgcgtacatgtgtgcgtaagagtcggtgcatttgtgtttcagcgcggctaaggccctgactgagatgctgtgtgtgcgggggtgggtgtgactgaatgcgggcacgggtgtccgtctgtttatacgtgtgtttgcgtgtttgggtgtgcaggtggctctgcgtaagcgtctgtgtgcagggggtcggcacatgggggaggatgcccatggttgggtaaccgcaggtccgcttgaccctctgccacctaggactgtgtctatacggcgtctgggctacagtgtgtttgagttgccgtgtgcgtttccgttgcggggtgtgggttgccacggggcaactgcatttttctgcgtcttcatggccaggggtacagggggcgtcgggcttttcctgggggtttttctgtgtgcgtgtgtaattatgtgcttagttcacatcttcatagtgcgcctttgtgttttcctgggtatctaaccattgcacgtgtgcccgggacttcagcgataagtgtttcggtgttcctgcgtgcggatttgtgctctccggggaggtctgcggcccaggttcgattcctgcgacttgtcctaggcaggcctgtatgtgcgcggcggccgcgtgctgtacagtgtgagggaacgtgtaccaaacgctcgcgggatacctgtgcccgtctagccaagagtgcacccgtgtgcgcgagcgggcttctgggacgccgccgtggtcgggggcggccctgcgaggggagggggtcacagggactggccggcgccggccccgtgcgcacggaggcgggggcggggggcgggggccgcgaggggggaggcggtacgaaaagggcggcgcgcgcggcggcggcggcagctccccggcagcggcggtggagagcgcagcgcgcagcccggtgcagccctggctttcccctcgctgcgcgcccgcgccccctttcgcgtccgcaaccagaagcccagtgcggcgccaggagccggacccgcgcccgcaccgctcccgggaccgcgaccccggccgcccagagatgaccgcgaccgaagccctcctgcgcgtcctcttgctcctgctggctttcggccacagcacctatggggctgaatgcttcccggcctgcaacccccaaaatggattctgcgaggatgacaatgtttgcaggtgccagcctggctggcagggtcccctttgtgaccagtgcgtgacctctcccggctgccttcacggactctgtggagaacccgggcagtgcatttgcaccgacggctgggacggggagctctgtgatagagatgttcgggcctgctcctcggccccctgtgccaacaacgggacctgcgtgagcctggacgatggcctctatgaatgctcctgtgcccccgggtactcgggaaaggactgccagaaaaaggacgggccctgtgtgatcaacggctccccctgccagcacggaggcacctgcgtggatgatgagggccgggcctcccatgcctcctgcctgtgcccccctggcttctcaggcaatttctgcgagatcgtggccaacagctgcacccccaacccatgcgagaacgacggcgtctgcactgacatcgggggcgacttccgctgccggtgcccagccggcttcatcgacaagacctgcagccgcccggtgaccaactgcgccagcagcccgtgccagaacgggggcacctgcctgcagcacacccaggtgagctacgagtgtctgtgcaagcccgagttcacaggtctcacctgtgtcaagaagcgcgcgctgagcccccagcaggtcacccgtctgcccagcggctatgggctggcctaccgcctgacccctggggtgcacgagctgccggtgcagcagccggagcaccgcatcctgaaggtgtccatgaaagagctcaacaagtgcgagacctgggtgtccaacctgcgctacaaccacatgctgcggaagaagaagaacctgctgcttcagtacaacagcggggaggacctggccgtcaacatcatcttccccgagaagatcgacatgaccaccttcagcaaggaggccggcgacgaggagatctaagcagcgttcccacagccccctctagattcttggagttccgcagagcttactatacgcggtctgtcctaatctttgtggtgttcgctatctcttgtgtcaaatctggtgaacgctacgcttacatatattgtctttgtgctgctgtgtgacaaacgcaatgcaaaaacaatcctctttctctctcttaatgcatgatacagaataataataagaatttcatctttaaatgagaaaaaaaaaaaaaaaaaaaaaaaaaaaaaaaaaaaaaaaaaaaaaaaaaaaaaaaaaaaaaaaaaaaaaaaaaaaacaagaaggaaacgaaagcaagaacacacacaaacacgaaagaacaacacaagaaacaaccaaaggggggcggcggcgccacaacaaataaaatcatccccgggggggagccacacatgtgatagccaccccccatattgtctgaagagacgagcccccccccacgctgaacggcgatttaattcaaacaagcgacgaccgggcccacgttaccaagccacccccacgcgacacacaccgccggaggctgactgtcggagcgcaaccccactctgtcgggcggggggacaacagagggcacccacccccccagagataccggcggcggccgaataaacacgtcgcggcggtgtggggaccaccaccatcttggcgggaaacggcgcgacgattacaatac

SEQ ID NO: 297613 - DNA, 2883 bp, Homo sapiens
gagtcagctgggtatgtgtgcttgtgggtatcaggtgcatggctgtgcgtacatgtgtgcgtaagagtcggtgcatttgtgtttcagcgcggctaaggccctgactgagatgctgtgtgtgcgggggtgggtgtgactgaatgcgggcacgggtgtccgtctgtttatacgtgtgtttgcgtgtttgggtgtgcaggtggctctgcgtaagcgtctgtgtgcagggggtcggcacatgggggaggatgcccatggttgggtaaccgcaggtccgcttgaccctctgccacctaggactgtgtctatacggcgtctgggctacagtgtgtttgagttgccgtgtgcgtttccgttgcggggtgtgggttgccacggggcaactgcatttttctgcgtcttcatggccaggggtacagggggcgtcgggcttttcctgggggtttttctgtgtgcgtgtgtaattatgtgcttagttcacatcttcatagtgcgcctttgtgttttcctgggtatctaaccattgcacgtgtgcccgggacttcagcgataagtgtttcggtgttcctgcgtgcggatttgtgctctccggggaggtctgcggcccaggttcgattcctgcgacttgtcctaggcaggcctgtatgtgcgcggcggccgcgtgctgtacagtgtgagggaacgtgtaccaaacgctcgcgggatacctgtgcccgtctagccaagagtgcacccgtgtgcgcgagcgggcttctgggacgccgccgtggtcgggggcggccctgcgaggggagggggtcacagggactggccggcgccggccccgtgcgcacggaggcgggggcggggggcgggggccgcgaggggggaggcggtacgaaaagggcggcgcgcgcggcggcggcggcagctccccggcagcggcggtggagagcgcagcgcgcagcccggtgcagccctggctttcccctcgctgcgcgcccgcgccccctttcgcgtccgcaaccagaagcccagtgcggcgccaggagccggacccgcgcccgcaccgctcccgggaccgcgaccccggccgcccagagatgaccgcgaccgaagccctcctgcgcgtcctcttgctcctgctggctttcggccacagcacctatggggctgaatgcttcccggcctgcaacccccaaaatggattctgcgaggatgacaatgtttgcaggtgccagcctggctggcagggtcccctttgtgaccagtgcgtgacctctcccggctgccttcacggactctgtggagaacccgggcagtgcatttgcaccgacggctgggacggggagctctgtgatagagatgttcgggcctgctcctcggccccctgtgccaacaacgggacctgcgtgagcctggacgatggcctctatgaatgctcctgtgcccccgggtactcgggaaaggactgccagagcgtggatgatgagggccgggcctcccatgcctcctgcctgtgcccccctggcttctcaggcaatttctgcgagatcgtggccaacagctgcacccccaacccatgcgagaacgacggcgtctgcactgacatcgggggcgacttccgctgccggtgcccagccggcttcatcgacaagacctgcagccgcccggtgaccaactgcgccagcagcccgtgccagaacgggggcacctgcctgcagcacacccaggtgagctacgagtgtctgtgcaagcccgagttcacaggtctcacctgtgtcaagaagcgcgcgctgagcccccagcaggtcacccgtctgcccagcggctatgggctggcctaccgcctgacccctggggtgcacgagctgccggtgcagcagccggagcaccgcatcctgaaggtgtccatgaaagagctcaacaagaaaacccctctcctcaccgagggccaggccatctgcttcaccatcctgggcgtgctcaccagcctggtggtgctgggcactgtgggtatcgtcttcctcaacaagtgcgagacctgggtgtccaacctgcgctacaaccacatgctgcggaagaagaagaacctgctgcttcagtacaacagcggggaggacctggccgtcaacatcatcttccccgagaagatcgacatgaccaccttcagcaaggaggccggcgacgaggagatctaagcagcgttcccacagccccctctagattcttggagttccgcagagcttactatacgcggtctgtcctaatctttgtggtgttcgctatctcttgtgtcaaatctggtgaacgctacgcttacatatattgtctttgtgctgctgtgtgacaaacgcaatgcaaaaacaatcctctttctctctcttaatgcatgatacagaataataataagaatttcatctttaaatgagaaaaaaaaaaaaaaaaaaaaaaaaaaaaaaaaaaaaaaaaaaaaaaaaaaaaaaaaaaaaaaaaaaaaaaaaaaaacaagaaggaaacgaaagcaagaacacacacaaacacgaaagaacaacacaagaaacaaccaaaggggggcggcggcgccacaacaaataaaatcatccccgggggggagccacacatgtgatagccaccccccatattgtctgaagagacgagcccccccccacgctgaacggcgatttaattcaaacaagcgacgaccgggcccacgttaccaagccacccccacgcgacacacaccgccggaggctgactgtcggagcgcaaccccactctgtcgggcggggggacaacagagggcacccacccccccagagataccggcggcggccgaataaacacgtcgcggcggtgtggggaccaccaccatcttggcgggaaacggcgcgacgattacaatac

SEQ ID NO: 297614 - DNA, 1879 bp, Homo sapiens
cggacgcgtgggccgggtactcgggaaaggactgccagaaaaaggacgggccctgtgtgatcaacggctccccctgccagcacggaggcaccgcgcccgcaccgctcccgggaccgcgaccccggccgcccagagatgaccgcgaccgaagccctcctgcgcgtcctcttgctcctgctggctttcggccacagcacctatggggctgaatgcttcccggcctgcaacccccaaaatggattctgcgaggatgacaatgtttgcaggtgccagcctggctggcagggtcccctttgtgaccagtgcgtgacctctcccggctgccttcacggactctgtggagaacccgggcagtgcatttgcaccgacggctgggacggggagctctgtgatagagatgttcgggcctgctcctcggccccctgtgccaacaacgggacctgcgtgagcctggacgatggcctctatgaatgctcccatgcctcctgcctgtgcccccctggcttctcaggcaatttctgcgagatcgtggccaacagctgcacccccaacccatgcgagaacgacggcgtctgcactgacatcgggggcgacttccgctgccggtgcccagccggcttcatcgacaagacctgcagccgcccggtgaccaactgcgccagcagcccgtgccagaacgggggcacctgcctgcagcacacccaggtgagctacgagtgtctgtgcaagcccgagttcacaggtctcacctgtgtcaagaagcgcgcgctgagcccccagcaggtcacccgtctgcccagcggctatgggctggcctaccgcctgacccctggggtgcacgagctgccggtgcagcagccggagcaccgcatcctgaaggtgtccatgaaagagctcaacaagaaaacccctctcctcaccgagggccaggccatctgcttcaccatcctgggcgtgctcaccagcctggtggtgctgggcactgtgggtatcgtcttcctcaacaagtgcgagacctgggtgtccaacctgcgctacaaccacatgctgcggaagaagaagaacctgctgcttcagtacaacagcggggaggacctggccgtcaacatcatcttccccgagaagatcgacatgaccaccttcagcaaggaggccggcgacgaggagatctaagcagcgttcccacagccccctctagattcttggagttccgcagagcttactatacgcggtctgtcctaatctttgtggtgttcgctatctcttgtgtcaaatctggtgaacgctacgcttacatatattgtctttgtgctgctgtgtgacaaacgcaatgcaaaaacaatcctctttctctctcttaatgcatgatacagaataataataagaatttcatctttaaatgagaaaaaaaaaaaaaaaaaaaaaaaaaaaaaaaaaaaaaaaaaaaaaaaaaaaaaaaaaaaaaaaaaaaaaaaaaaaacaagaaggaaacgaaagcaagaacacacacaaacacgaaagaacaacacaagaaacaaccaaaggggggcggcggcgccacaacaaataaaatcatccccgggggggagccacacatgtgatagccaccccccatattgtctgaagagacgagcccccccccacgctgaacggcgatttaattcaaacaagcgacgaccgggcccacgttaccaagccacccccacgcgacacacaccgccggaggctgactgtcggagcgcaaccccactctgtcgggcggggggacaacagagggcacccacccccccagagataccggcggcggccgaataaacacgtcgcggcggtgtggggaccaccaccatcttggcgggaaacggcgcgacgattacaatac

SEQ ID NO: 297615 - DNA, 1926 bp, Homo sapiens
  misc_feature (1651)..(1651): n is a, c, g, or t
  misc_feature (1670)..(1670): n is a, c, g, or t
  misc_feature (1761)..(1761): n is a, c, g, or t
gagtcagctgggtatgtgtgcttgtgggtatcaggtgcatggctgtgcgtacatgtgtgcgtaagagtcggtgcatttgtgtttcagcgcggctaaggccctgactgagatgctgtgtgtgcgggggtgggtgtgactgaatgcgggcacgggtgtccgtctgtttatacgtgtgtttgcgtgtttgggtgtgcaggtggctctgcgtaagcgtctgtgtgcagggggtcggcacatgggggaggatgcccatggttgggtaaccgcaggtccgcttgaccctctgccacctaggactgtgtctatacggcgtctgggctacagtgtgtttgagttgccgtgtgcgtttccgttgcggggtgtgggttgccacggggcaactgcatttttctgcgtcttcatggccaggggtacagggggcgtcgggcttttcctgggggtttttctgtgtgcgtgtgtaattatgtgcttagttcacatcttcatagtgcgcctttgtgttttcctgggtatctaaccattgcacgtgtgcccgggacttcagcgataagtgtttcggtgttcctgcgtgcggatttgtgctctccggggaggtctgcggcccaggttcgattcctgcgacttgtcctaggcaggcctgtatgtgcgcggcggccgcgtgctgtacagtgtgagggaacgtgtaccaaacgctcgcgggatacctgtgcccgtctagccaagagtgcacccgtgtgcgcgagcgggcttctgggacgccgccgtggtcgggggcggccctgcgaggggagggggtcacagggactggccggcgccggccccgtgcgcacggaggcgggggcggggggcgggggccgcgaggggggaggcggtacgaaaagggcggcgcgcgcggcggcggcggcagctccccggcagcggcggtggagagcgcagcgcgcagcccggtgcagccctggctttcccctcgctgcgcgcccgcgccccctttcgcgtccgcaaccagaagcccagtgcggcgccaggagccggacccgcgcccgcaccgctcccgggaccgcgaccccggccgcccagagatgaccgcgaccgaagccctcctgcgcgtcctcttgctcctgctggctttcggccacagcacctatggggctgaatgcttcccggcctgcaacccccaaaatggattctgcgaggatgacaatgtttgcaggtgccagcctggctggcagggtcccctttgtgaccagtgcgtgacctctcccggctgccttcacggactctgtggagaacccgggcagtgcatttgcaccgacggctgggacggggagctctgtgatagagatgttcgggcctgctcctcggccccctgtgccaacaacgggacctgcgtgagcctggacgatggcctctatgaatgctctcatgttgcctctccgcagggttacatcgtgggagaaggaactgccgatggataacacaggacgcggacgcctgatgctgtagtcacaccggtcgtccccctcttggcactagacaccagtgagagcaatccttgacagatagggaatgaatgaatgtggtcgcgtggtctcttccacgaatgcgctcatcgctgctcgtgttgtccgccacgcgtggactatcttcaagngtctaatttatcatgtcgnagagtcggttgagcgcaaagcagtcatgcgagtcccgctaaccgcgatgtcggacgcaagctggaccgtgactgctacctcgtccatcctngtagccattcagcgctgttgcgccgacctttccctgctggtccgggctagcccccatgggcccgcgtcgtttccgatgccgcaccgagaggcatcccgttggcatagcccggtccctccgggtggaaccgctaagcttgtcggccccaaggccgagccccccgtg

SEQ ID NO: 297616 - DNA, 4990 bp, Homo sapiens
  misc_feature (13)..(13): n is a, c, g, or t
  misc_feature (15)..(15): n is a, c, g, or t
  misc_feature (23)..(23): n is a, c, g, or t
  misc_feature (107)..(107): n is a, c, g, or t
  misc_feature (157)..(157): n is a, c, g, or t
acagaggtcattnantctttggnaattattatttataaagcactggactatggtttgaaggagaatgaagaaagggaattaagccctcccctagagcagcttatcgntcacatggccaacacggtggaagctgacggtagcaatgatgagggctatnaggctgcagaagaaggcctgggagatgaagatgaaaagagaaaaatctcagctattcggtcatatagagatgtcatgaagttgtgtgctgctcatctccctactgaatcagatgcaccaaatcattatcaggcagtatgtcgtgcactgtttgcagaaacaatggagctccatacatttctgaccaaaattaagagtgcgaaagagaatcttaagaagattcaagaaatggaaaagagcgatgaatctagcacagacttggaagagctgaaaaacgctgactgggcacgattctgggtacaggtgatgagggatttgaggaatggggtaaaacttaagaaggtccaagagcggcagtacaaccctttgcccattgaatatcagctcaccccttatgagatgttaatggatgacattcgctgcaaaagatacaccttgcgaaaagtgatggtgaatggtgatattccccctcggttaaaaaagagtgctcatgaaatcatcctcgacttcatcagatccagacctcctttaaatccagtctcagccagaaaactgaaaccaactccaccacggccacggagcctccatgaaagaatattagaagaaattaaagcagaaagaaagctgcggcctgtatcaccagaggagattagacgtagcagattagatgtgactacccctgaatctacaaagaatcttgtggagtcatctatggtgaatggaggtttgacatcacaaacaaaagaaaacgggttaagtacctcacagcaggtgcctgcacagcggaagaagctcctcagagccccaactctggccgaactggacagctctgagtctgaggaagaaacgctgcacaagtcgaccagcagcagcagcgtgtctccctctttccctgaagagccagtcctggaggccgtgtccacaaggaagaagcctccaaaattcctgcccatatcatcaacaccccagccagagagacggcagccaccccagagacgacattccattgaaaaggaaacgcctactaacgtgaggcagttcctgccgccttccaggcagagttcccgctctcttgaggaattctgctacccagtggaatgcctcgctcttactgtggaagaagtgatgcatattcgccaggtcctggtgaaggcagagctggaaaaataccaacagtataaagacatctacaccgccttgaaaaaaggaaagctctgcttttgttgccgaaccaggaggttttccttcttcacttggtcttatacctgtcagttctgtaagaggccggtgtgctcacagtgttgcaaaaagatgcggctgccctccaaaccatactccactcttcctatcttttcattgggaccttctgctctgcaaagaggggaaagtagtatgaggtcagaaaaaccctccactgcccatcatcggccacttcggagcattgccaggttctcctcaaaatctaagtctatggacaaatcagatgaagaactccagtttcccaaagagttgatggaggactggagcaccatggaggtgtgtgtggactgcaagaagttcatttcggaaatcatcagttcaagccggcgcagtctggtgttggccaacaaaagggcccgattgaaaaggaaaacgcagtctttctacatgtcctcgccaggcccctcggagtactgcccttcagagaggacgatcagtgagatctgagcctcgtgcctttcagctgcttttgtgctacgagtcagcgtccgtgcgcgaggacactgagccgggctggctctcctttctgtggttttatttaatgggcttgaatttgcattagatcagatttttgccgcatcacattgttccacagactgaatgctgtgttcgtatcgattgatgaaacgtgacaggtccgccaattgctcgtttgcactgagagaggacaacagtttgaaacttacttttgtgtgtgtgtggctttggaagccagtagctacttccttagttcagttctttactgttcctcgaataatctcctgactaaggcaaaaaaaaaaagcttctcctacgagaatcagtctaacagagatgccgatgtcagcacagccctaagcagtaagtcatattggcatttccacgtgactgtgtttctatcccgtgtacagagagatccagagccctacactccacgacctgggggctcacagcacagaacctagaagcacctgctgacactcttcaactgatttttaaatgttgttgcttggagataaaaattacataagggactttttgcctgcattctagtgcaaaacatctgaagagctgtacacccacaagggtgactatttcccctgagtggccgtgttgtcccagtgccctggttcagtgtctcctgagtggatgacaggtcttcattctctatcttgaatgtattatggttactaatagttttataatggaggtctaagaattaaagttgtgtgggagtttcaggacaaaggaaggctaaaagtttgtcaagacgttgagcgtattttggttacctatgagaagggttgtgacagtgtacagtggcagctgttggccacgctgcagaaatgagctggagctcatgggttttcagctacatttttcataactttgtagtacatccatcttgagtaaattaagccacaatttggtacctagggtctcaaactaaaatttatttttataaatgaattttaaaagaaaaaatatctacttcttttaaagttagaagaaaattaacctgctgacaggcaacatttttggggtgctttctgcactagttttccttgtaaatgatttgagtgagtaggtttggtttctgacgaaagtagactggagggtagcattgtatgcctcaaatgtctcagtgtgtttggctcatacgtgggctatactttattattttggtatgcttacaaatgactaaccaatcaaattgtcattaatgtttggaaaatctgttaatgcacatgcacaataatttcctgaaagccataggacatgtctgtagtcagcaccacgatagcaccgtttcatgaaaggcatggcggctgcatttcataccacatcaaaatacagtaacatttctatactaaattaacagtaatacctcaaaactgctccggtagtagtttttaatggattgaaatttacagtttagtaaaaggcttaaaattacttatacttatgaaataaactttaccagttgactaaaataatgcatgttaacagttggtctgtatttgcatgtaaaagtgggccaccagagaacccttattgattacttaagtgtttacattattttaaagactcctgtttaagagctttcagaattgtactgggtgaatctcatttataaaacttcctaagagactatctgaactctatactccagacagttaggtgggagtataaatctaccccttttgatgaccccaggcttgagtttttaaaatgactacccagaagggcacaagggggaaggaaatggtatttgtatatgtatataaatatgcacctaggagaatgtgctttttaaaataatgactactgtttttattaaaacataagaaactacacccccaaaataagactttcattcacattcacaaagcaaacatctagtacatgtctttcacttcactttatgatagtgtattggatgatttgggcattacgatcacctcttaccacagcacagaacatacattcttcaacagcattaacggagtttgccaagtgcattaaagaggtcacgtggagggtacgttcatatgaaacaatctgcagaaagtggggtaagaaagggcacatggcacagttaaagttgtagaaatcaaattactatcattttttgttgccaaaacaaagtcttacatttaacccccctttctaccaccccccctccacacttcacgtcagctacatagtttccacagggtaattcactaagagcttgtggagcttggttttaaaatccttagcctggtctgactttaggcatagcttccagttcttccttccttgtcctggtttcttgttcagcttttacttctaatccaacaacaaaagaaatgtctggctggtctcagctagagtctgatgtgtcttagagcatgtgtgcgtatctgaaccatcatccctgctctcatctcagctccctccaggcctgagcaccggttccttttgtcccatacgtcatgaagtcacactattgggaaacctgtgcttccctctccatggcttaactccctgtcagtgtcggagtgtataagaatgcttgtaaatactgtaatatatttattaatatttgaaaggcattcattcagtggacagtgggaattaactctcccaaggcaagtgaaaatgaatgattgacgtacgttgatttaacaatcttactagattttaattcttaaggatttcaaatgaaaccagaaggtggttatgtaagaggcttaaaatgatcttatgtttaaagagattctgttattagcaccatgaactcgtactatgaaatttttaagccttttatttttctaactatattactgtaggactggatattaggtgtcatataggaaacacaaaagttattgctgtttgctaaagcaaaatagcagaaaattttgtatatgcaaaactgttgaaggaccatagagaaatgtgtactactgacggggcttttactaggcttcctgcgtgtgtaaaagtcgaggtattgctggcattcagggtgacatgatggtactaaatgttttccattaaagtcttctattttaaaatttagagaaaaataaaatggctttccatcaga

SEQ ID NO: 297617 - DNA, 4583 bp, Homo sapiens
  misc_feature (13)..(13): n is a, c, g, or t
  misc_feature (15)..(15): n is a, c, g, or t
  misc_feature (23)..(23): n is a, c, g, or t
  misc_feature (107)..(107): n is a, c, g, or t
  misc_feature (157)..(157): n is a, c, g, or t
acagaggtcattnantctttggnaattattatttataaagcactggactatggtttgaaggagaatgaagaaagggaattaagccctcccctagagcagcttatcgntcacatggccaacacggtggaagctgacggtagcaatgatgagggctatnaggctgcagaagaaggcctgggagatgaagatgaaaagagaaaaatctcagctattcggtcatatagagatgtcatgaagttgtgtgctgctcatctccctactgaatcagatgcaccaaatcattatcaggcagtatgtcgtgcactgtttgcagaaacaatggagctccatacatttctgaccaaaattaagagtgcgaaagagaatcttaagaagattcaagaaatggaaaagagcgatgaatctagcacagacttggaagagctgaaaaacgctgactgggcacgattctgggtacaggtgatgagggatttgaggaatggggtaaaacttaagaaggtccaagagcggcagtacaaccctttgcccattgaatatcagctcaccccttatgagatgttaatggatgacattcgctgcaaaagatacaccttgcgaaaagtgatggtgaatggtgatattccccctcggttaaaaaagagtgctcatgaaatcatcctcgacttcatcagatccagacctcctttaaatccagtctcagccagaaaactgaaaccaactccaccacggccacggagcctccatgaaagaatattagaagaaattaaagcagaaagaaagctgcggcctgtatcaccagaggagattagacgtagcagattaggaggaattctgctacccagtggaatgcctcgctcttactgtggaagaagtgatgcatattcgccaggtcctggtgaaggcagagctggaaaaataccaacagtataaagacatctacaccgccttgaaaaaaggaaagctctgcttttgttgccgaaccaggaggttttccttcttcacttggtcttatacctgtcagttctgtaagaggccggtgtgctcacagtgttgcaaaaagatgcggctgccctccaaaccatactccactcttcctatcttttcattgggaccttctgctctgcaaagaggggaaagtagtatgaggtcagaaaaaccctccactgcccatcatcggccacttcggagcattgccaggttctcctcaaaatctaagtctatggacaaatcagatgaagaactccagtttcccaaagagttgatggaggactggagcaccatggaggtgtgtgtggactgcaagaagttcatttcggaaatcatcagttcaagccggcgcagtctggtgttggccaacaaaagggcccgattgaaaaggaaaacgcagtctttctacatgtcctcgccaggcccctcggagtactgcccttcagagaggacgatcagtgagatctgagcctcgtgcctttcagctgcttttgtgctacgagtcagcgtccgtgcgcgaggacactgagccgggctggctctcctttctgtggttttatttaatgggcttgaatttgcattagatcagatttttgccgcatcacattgttccacagactgaatgctgtgttcgtatcgattgatgaaacgtgacaggtccgccaattgctcgtttgcactgagagaggacaacagtttgaaacttacttttgtgtgtgtgtggctttggaagccagtagctacttccttagttcagttctttactgttcctcgaataatctcctgactaaggcaaaaaaaaaaagcttctcctacgagaatcagtctaacagagatgccgatgtcagcacagccctaagcagtaagtcatattggcatttccacgtgactgtgtttctatcccgtgtacagagagatccagagccctacactccacgacctgggggctcacagcacagaacctagaagcacctgctgacactcttcaactgatttttaaatgttgttgcttggagataaaaattacataagggactttttgcctgcattctagtgcaaaacatctgaagagctgtacacccacaagggtgactatttcccctgagtggccgtgttgtcccagtgccctggttcagtgtctcctgagtggatgacaggtcttcattctctatcttgaatgtattatggttactaatagttttataatggaggtctaagaattaaagttgtgtgggagtttcaggacaaaggaaggctaaaagtttgtcaagacgttgagcgtattttggttacctatgagaagggttgtgacagtgtacagtggcagctgttggccacgctgcagaaatgagctggagctcatgggttttcagctacatttttcataactttgtagtacatccatcttgagtaaattaagccacaatttggtacctagggtctcaaactaaaatttatttttataaatgaattttaaaagaaaaaatatctacttcttttaaagttagaagaaaattaacctgctgacaggcaacatttttggggtgctttctgcactagttttccttgtaaatgatttgagtgagtaggtttggtttctgacgaaagtagactggagggtagcattgtatgcctcaaatgtctcagtgtgtttggctcatacgtgggctatactttattattttggtatgcttacaaatgactaaccaatcaaattgtcattaatgtttggaaaatctgttaatgcacatgcacaataatttcctgaaagccataggacatgtctgtagtcagcaccacgatagcaccgtttcatgaaaggcatggcggctgcatttcataccacatcaaaatacagtaacatttctatactaaattaacagtaatacctcaaaactgctccggtagtagtttttaatggattgaaatttacagtttagtaaaaggcttaaaattacttatacttatgaaataaactttaccagttgactaaaataatgcatgttaacagttggtctgtatttgcatgtaaaagtgggccaccagagaacccttattgattacttaagtgtttacattattttaaagactcctgtttaagagctttcagaattgtactgggtgaatctcatttataaaacttcctaagagactatctgaactctatactccagacagttaggtgggagtataaatctaccccttttgatgaccccaggcttgagtttttaaaatgactacccagaagggcacaagggggaaggaaatggtatttgtatatgtatataaatatgcacctaggagaatgtgctttttaaaataatgactactgtttttattaaaacataagaaactacacccccaaaataagactttcattcacattcacaaagcaaacatctagtacatgtctttcacttcactttatgatagtgtattggatgatttgggcattacgatcacctcttaccacagcacagaacatacattcttcaacagcattaacggagtttgccaagtgcattaaagaggtcacgtggagggtacgttcatatgaaacaatctgcagaaagtggggtaagaaagggcacatggcacagttaaagttgtagaaatcaaattactatcattttttgttgccaaaacaaagtcttacatttaacccccctttctaccaccccccctccacacttcacgtcagctacatagtttccacagggtaattcactaagagcttgtggagcttggttttaaaatccttagcctggtctgactttaggcatagcttccagttcttccttccttgtcctggtttcttgttcagcttttacttctaatccaacaacaaaagaaatgtctggctggtctcagctagagtctgatgtgtcttagagcatgtgtgcgtatctgaaccatcatccctgctctcatctcagctccctccaggcctgagcaccggttccttttgtcccatacgtcatgaagtcacactattgggaaacctgtgcttccctctccatggcttaactccctgtcagtgtcggagtgtataagaatgcttgtaaatactgtaatatatttattaatatttgaaaggcattcattcagtggacagtgggaattaactctcccaaggcaagtgaaaatgaatgattgacgtacgttgatttaacaatcttactagattttaattcttaaggatttcaaatgaaaccagaaggtggttatgtaagaggcttaaaatgatcttatgtttaaagagattctgttattagcaccatgaactcgtactatgaaatttttaagccttttatttttctaactatattactgtaggactggatattaggtgtcatataggaaacacaaaagttattgctgtttgctaaagcaaaatagcagaaaattttgtatatgcaaaactgttgaaggaccatagagaaatgtgtactactgacggggcttttactaggcttcctgcgtgtgtaaaagtcgaggtattgctggcattcagggtgacatgatggtactaaatgttttccattaaagtcttctattttaaaatttagagaaaaataaaatggctttccatcaga

SEQ ID NO: 297618 - DNA, 4569 bp, Homo sapiens
ataataagctgatctggggcatcagtctgattacaggcgtgatgagggatttgaggaatggggtaaaacttaagaaggtccaagagcggcagtacaaccctttgcccattgaatatcagctcaccccttatgagatgttaatggatgacattcgctgcaaaagatacaccttgcgaaaagtgatggtgaatggtgatattccccctcggttaaaaaagagtgctcatgaaatcatcctcgacttcatcagatccagacctcctttaaatccagtctcagccagaaaactgaaaccaactccaccacggccacggagcctccatgaaagaatattagaagaaattaaagcagaaagaaagctgcggcctgtatcaccagaggagattagacgtagcagattagatgtgactacccctgaatctacaaagaatcttgtggagtcatctatggtgaatggaggtttgacatcacaaacaaaagaaaacgggttaagtacctcacagcaggtgcctgcacagcggaagaagctcctcagagccccaactctggccgaactggacagctctgagtctgaggaagaaacgctgcacaagtcgaccagcagcagcagcgtgtctccctctttccctgaagagccagtcctggaggccgtgtccacaaggaagaagcctccaaaattcctgcccatatcatcaacaccccagccagagagacggcagccaccccagagacgacattccattgaaaaggaaacgcctactaacgtgaggcagttcctgccgccttccaggcagagttcccgctctcttgaggaattctgctacccagtggaatgcctcgctcttactgtggaagaagtgatgcatattcgccaggtcctggtgaaggcagagctggaaaaataccaacagtataaagacatctacaccgccttgaaaaaaggaaagctctgcttttgttgccgaaccaggaggttttccttcttcacttggtcttatacctgtcagttctgtaagaggccggtgtgctcacagtgttgcaaaaagatgcggctgccctccaaaccatactccactcttcctatcttttcattgggaccttctgctctgcaaagaggggaaagtagtatgaggtcagaaaaaccctccactgcccatcatcggccacttcggagcattgccaggttctcctcaaaatctaagtctatggacaaatcagatgaagaactccagtttcccaaagagttgatggaggactggagcaccatggaggtgtgtgtggactgcaagaagttcatttcggaaatcatcagttcaagccggcgcagtctggtgttggccaacaaaagggcccgattgaaaaggaaaacgcagtctttctacatgtcctcgccaggcccctcggagtactgcccttcagagaggacgatcagtgagatctgagcctcgtgcctttcagctgcttttgtgctacgagtcagcgtccgtgcgcgaggacactgagccgggctggctctcctttctgtggttttatttaatgggcttgaatttgcattagatcagatttttgccgcatcacattgttccacagactgaatgctgtgttcgtatcgattgatgaaacgtgacaggtccgccaattgctcgtttgcactgagagaggacaacagtttgaaacttacttttgtgtgtgtgtggctttggaagccagtagctacttccttagttcagttctttactgttcctcgaataatctcctgactaaggcaaaaaaaaaaagcttctcctacgagaatcagtctaacagagatgccgatgtcagcacagccctaagcagtaagtcatattggcatttccacgtgactgtgtttctatcccgtgtacagagagatccagagccctacactccacgacctgggggctcacagcacagaacctagaagcacctgctgacactcttcaactgatttttaaatgttgttgcttggagataaaaattacataagggactttttgcctgcattctagtgcaaaacatctgaagagctgtacacccacaagggtgactatttcccctgagtggccgtgttgtcccagtgccctggttcagtgtctcctgagtggatgacaggtcttcattctctatcttgaatgtattatggttactaatagttttataatggaggtctaagaattaaagttgtgtgggagtttcaggacaaaggaaggctaaaagtttgtcaagacgttgagcgtattttggttacctatgagaagggttgtgacagtgtacagtggcagctgttggccacgctgcagaaatgagctggagctcatgggttttcagctacatttttcataactttgtagtacatccatcttgagtaaattaagccacaatttggtacctagggtctcaaactaaaatttatttttataaatgaattttaaaagaaaaaatatctacttcttttaaagttagaagaaaattaacctgctgacaggcaacatttttggggtgctttctgcactagttttccttgtaaatgatttgagtgagtaggtttggtttctgacgaaagtagactggagggtagcattgtatgcctcaaatgtctcagtgtgtttggctcatacgtgggctatactttattattttggtatgcttacaaatgactaaccaatcaaattgtcattaatgtttggaaaatctgttaatgcacatgcacaataatttcctgaaagccataggacatgtctgtagtcagcaccacgatagcaccgtttcatgaaaggcatggcggctgcatttcataccacatcaaaatacagtaacatttctatactaaattaacagtaatacctcaaaactgctccggtagtagtttttaatggattgaaatttacagtttagtaaaaggcttaaaattacttatacttatgaaataaactttaccagttgactaaaataatgcatgttaacagttggtctgtatttgcatgtaaaagtgggccaccagagaacccttattgattacttaagtgtttacattattttaaagactcctgtttaagagctttcagaattgtactgggtgaatctcatttataaaacttcctaagagactatctgaactctatactccagacagttaggtgggagtataaatctaccccttttgatgaccccaggcttgagtttttaaaatgactacccagaagggcacaagggggaaggaaatggtatttgtatatgtatataaatatgcacctaggagaatgtgctttttaaaataatgactactgtttttattaaaacataagaaactacacccccaaaataagactttcattcacattcacaaagcaaacatctagtacatgtctttcacttcactttatgatagtgtattggatgatttgggcattacgatcacctcttaccacagcacagaacatacattcttcaacagcattaacggagtttgccaagtgcattaaagaggtcacgtggagggtacgttcatatgaaacaatctgcagaaagtggggtaagaaagggcacatggcacagttaaagttgtagaaatcaaattactatcattttttgttgccaaaacaaagtcttacatttaacccccctttctaccaccccccctccacacttcacgtcagctacatagtttccacagggtaattcactaagagcttgtggagcttggttttaaaatccttagcctggtctgactttaggcatagcttccagttcttccttccttgtcctggtttcttgttcagcttttacttctaatccaacaacaaaagaaatgtctggctggtctcagctagagtctgatgtgtcttagagcatgtgtgcgtatctgaaccatcatccctgctctcatctcagctccctccaggcctgagcaccggttccttttgtcccatacgtcatgaagtcacactattgggaaacctgtgcttccctctccatggcttaactccctgtcagtgtcggagtgtataagaatgcttgtaaatactgtaatatatttattaatatttgaaaggcattcattcagtggacagtgggaattaactctcccaaggcaagtgaaaatgaatgattgacgtacgttgatttaacaatcttactagattttaattcttaaggatttcaaatgaaaccagaaggtggttatgtaagaggcttaaaatgatcttatgtttaaagagattctgttattagcaccatgaactcgtactatgaaatttttaagccttttatttttctaactatattactgtaggactggatattaggtgtcatataggaaacacaaaagttattgctgtttgctaaagcaaaatagcagaaaattttgtatatgcaaaactgttgaaggaccatagagaaatgtgtactactgacggggcttttactaggcttcctgcgtgtgtaaaagtcgaggtattgctggcattcagggtgacatgatggtactaaatgttttccattaaagtcttctattttaaaatttagagaaaaataaaatggctttccatcaga

SEQ ID NO: 297619 - DNA, 4936 bp, Homo sapiens
  misc_feature (13)..(13): n is a, c, g, or t
  misc_feature (15)..(15): n is a, c, g, or t
  misc_feature (23)..(23): n is a, c, g, or t
  misc_feature (107)..(107): n is a, c, g, or t
  misc_feature (157)..(157): n is a, c, g, or t
acagaggtcattnantctttggnaattattatttataaagcactggactatggtttgaaggagaatgaagaaagggaattaagccctcccctagagcagcttatcgntcacatggccaacacggtggaagctgacggtagcaatgatgagggctatnaggctgcagaagaaggcctgggagatgaagatgaaaagagaaaaatctcagctattcggtcatatagagatgtcatgaagttgtgtgctgctcatctccctactgaatcagatgcaccaaatcattatcaggcagtatgtcgtgcactgtttgcagaaacaatggagctccatacatttctgaccaaaattaagagtgcgaaagagaatcttaagaagattcaagaaatggaaaagagcgatgaatctagcacagacttggaagagctgaaaaacgctgactgggcacgattctgggtacaggtgatgagggatttgaggaatggggtaaaacttaagaaggtccaagagcggcagtacaaccctttgcccattgaatatcagctcaccccttatgagatgttaatggatgacattcgctgcaaaagatacaccttgcgaaaagtgatggtgaatggtgatattccccctcggttaaaaaagagtgctcatgaaatcatcctcgacttcatcagatccagacctcctttaaatccagtctcagccagaaaactgaaaccaactccaccacggccacggagcctccatgaaagaatattagaagaaattaaagcagaaagaaagctgcggcctgtatcaccagaggagattagacgtagcagattagatgtgactacccctgaatctacaaagaatcttgtggagtcatctatggtgaatggaggtttgacatcacaaacaaaagaaaacgggttaagtacctcacagcaggtgcctgcacagcggaagaagctcctcagagccccaactctggccgaactggacagctctgagtctgaggaagaaacgctgcacaagtcgaccagcagcagcagcgtgtctccctctttccctgaagagccagtcctggaggccgtgtccacaaggaagaagcctccaaaattcctgcccatatcatcaacaccccagccagagagacggcagccaccccagagacgacattccattgaaaaggaaacgcctactaacgtgaggcagttcctgccgccttccaggcagagttcccgctctcttgaggaattctgctacccagtggaatgcctcgctcttactgtggaagaagtgatgcatattcgccaggtcctggtgaaggcagagctggaaaaataccaacagtataaagacatctacaccgccttgaaaaaaggaaagctctgcttttgttgccgaaccaggaggttttccttcttcacttggtcttatacctgtcagttctgtaagaggccggtgtgctcacagtgttgcaaaaagatgcggctgccctccaaaccatactccactcttcctatcttttcattgggaccttctgctctgcaaagaggggaaagtagtatgaggtcagaaaaaccctccactgcccatcatcggccacttcggagcattgccaggttctcctcaaaatctaagtctatggacaaatcagatgaagaactccagtttcccaaagagttgatggaggactggagcaccatggaggtgtgtgtggactgcaagaagttcatttcggaaatcatcagttcaagccggcgcagtctggtgttggccaacaaaagggcccgattgaaaaggaaaacgcagtctttctacatgtcctcgccaggcccctcggagtactgcccttcagagaggacgatcagtgagatctgagcctcgtgcctttcagctgcttttgtgctacgagtcagcgtccgtgcgcgaggacactgagccgggctggctctcctttctgtggttttatttaatgggcttgaatttgcattagatcagatttttgccgcatcacattgttccacagactgaatgctgtgttcgtatcgattgatgaaacgtgacaggtccgccaattgctcgtttgcactgagagaggacaacagtttgaaacttacttttgtgtgtgtgtggctttggaagccagtagctacttccttagttcagttctttactgttcctcgaataatctcctgactaaggcaaaaaaaaaaagcttctcctacgagaatcagtctaacagagatgccgatgtcagcacagccctaagcagtaagtcatattggcatttccacgtgactgtgtttctatcccgtgtacagagagatccagagccctacactccacgacctgggggctcacagcacagaacctagaagcacctgctgacactcttcaactgatttttaaatgttgttgcttggagataaaaattacataagggactttttgcctgcattctagtgcaaaacatctgaagagctgtacacccacaagggtgactatttcccctgagtggccgtgttgtcccagtgccctggttcagtgtctcctgagtggatgacaggtcttcattctctatcttgaatgtattatggttactaatagttttataatggaggtctaagaattaaagttgtgtgggagtttcaggacaaaggaaggctaaaagtttgtcaagacgttgagcgtattttggttacctatgagaagggttgtgacagtgtacagtggcagctgttggccacgctgcagaaatgagctggagctcatgggttttcagctacatttttcataactttgtagtacatccatcttgagtaaattaagccacaatttggtacctagggtctcaaactaaaatttatttttataaatgaattttaaaagaaaaaatatctacttcttttaaagttagaagaaaattaacctgctgacaggcaacatttttggggtgctttctgcactagttttccttgtaaatgatttgagtgagtaggtttggtttctgacgaaagtagactggagggtagcattgtatgcctcaaatgtctcagtgtgtttggctcatacgtgggctatactttattattttggtatgcttacaaatgactaaccaatcaaattgtcattaatgtttggaaaatctgttaatgcacatgcacaataatttcctgaaagccataggacatgtctgtagtcagcaccacgatagcaccgtttcatgaaaggcatggcggctgcatttcataccacatcaaaatacatttttaatggattgaaatttacagtttagtaaaaggcttaaaattacttatacttatgaaataaactttaccagttgactaaaataatgcatgttaacagttggtctgtatttgcatgtaaaagtgggccaccagagaacccttattgattacttaagtgtttacattattttaaagactcctgtttaagagctttcagaattgtactgggtgaatctcatttataaaacttcctaagagactatctgaactctatactccagacagttaggtgggagtataaatctaccccttttgatgaccccaggcttgagtttttaaaatgactacccagaagggcacaagggggaaggaaatggtatttgtatatgtatataaatatgcacctaggagaatgtgctttttaaaataatgactactgtttttattaaaacataagaaactacacccccaaaataagactttcattcacattcacaaagcaaacatctagtacatgtctttcacttcactttatgatagtgtattggatgatttgggcattacgatcacctcttaccacagcacagaacatacattcttcaacagcattaacggagtttgccaagtgcattaaagaggtcacgtggagggtacgttcatatgaaacaatctgcagaaagtggggtaagaaagggcacatggcacagttaaagttgtagaaatcaaattactatcattttttgttgccaaaacaaagtcttacatttaacccccctttctaccaccccccctccacacttcacgtcagctacatagtttccacagggtaattcactaagagcttgtggagcttggttttaaaatccttagcctggtctgactttaggcatagcttccagttcttccttccttgtcctggtttcttgttcagcttttacttctaatccaacaacaaaagaaatgtctggctggtctcagctagagtctgatgtgtcttagagcatgtgtgcgtatctgaaccatcatccctgctctcatctcagctccctccaggcctgagcaccggttccttttgtcccatacgtcatgaagtcacactattgggaaacctgtgcttccctctccatggcttaactccctgtcagtgtcggagtgtataagaatgcttgtaaatactgtaatatatttattaatatttgaaaggcattcattcagtggacagtgggaattaactctcccaaggcaagtgaaaatgaatgattgacgtacgttgatttaacaatcttactagattttaattcttaaggatttcaaatgaaaccagaaggtggttatgtaagaggcttaaaatgatcttatgtttaaagagattctgttattagcaccatgaactcgtactatgaaatttttaagccttttatttttctaactatattactgtaggactggatattaggtgtcatataggaaacacaaaagttattgctgtttgctaaagcaaaatagcagaaaattttgtatatgcaaaactgttgaaggaccatagagaaatgtgtactactgacggggcttttactaggcttcctgcgtgtgtaaaagtcgaggtattgctggcattcagggtgacatgatggtactaaatgttttccattaaagtcttctattttaaaatttagagaaaaataaaatggctttccatcaga

SEQ ID NO: 297620 - DNA, 3877 bp, Homo sapiens
atacaaacagcttctctgctcagctctcatccttttgaagcagccatgtttggggtagcaggggctatgtattatctgtgtgagagagcttttaccagcaggtggaaatcctcaaaggaggaattctgctacccagtggaatgcctcgctcttactgtggaagaagtgatgcatattcgccaggtcctggtgaaggcagagctggaaaaataccaacagtataaagacatctacaccgccttgaaaaaaggaaagctctgcttttgttgccgaaccaggaggttttccttcttcacttggtcttatacctgtcagttctgtaagaggccggtgtgctcacagtgttgcaaaaagatgcggctgccctccaaaccatactccactcttcctatcttttcattgggaccttctgctctgcaaagaggggaaagtagtatgaggtcagaaaaaccctccactgcccatcatcggccacttcggagcattgccaggttctcctcaaaatctaagtctatggacaaatcagatgaagaactccagtttcccaaagagttgatggaggactggagcaccatggaggtgtgtgtggactgcaagaagttcatttcggaaatcatcagttcaagccggcgcagtctggtgttggccaacaaaagggcccgattgaaaaggaaaacgcagtctttctacatgtcctcgccaggcccctcggagtactgcccttcagagaggacgatcagtgagatctgagcctcgtgcctttcagctgcttttgtgctacgagtcagcgtccgtgcgcgaggacactgagccgggctggctctcctttctgtggttttatttaatgggcttgaatttgcattagatcagatttttgccgcatcacattgttccacagactgaatgctgtgttcgtatcgattgatgaaacgtgacaggtccgccaattgctcgtttgcactgagagaggacaacagtttgaaacttacttttgtgtgtgtgtggctttggaagccagtagctacttccttagttcagttctttactgttcctcgaataatctcctgactaaggcaaaaaaaaaaagcttctcctacgagaatcagtctaacagagatgccgatgtcagcacagccctaagcagtaagtcatattggcatttccacgtgactgtgtttctatcccgtgtacagagagatccagagccctacactccacgacctgggggctcacagcacagaacctagaagcacctgctgacactcttcaactgatttttaaatgttgttgcttggagataaaaattacataagggactttttgcctgcattctagtgcaaaacatctgaagagctgtacacccacaagggtgactatttcccctgagtggccgtgttgtcccagtgccctggttcagtgtctcctgagtggatgacaggtcttcattctctatcttgaatgtattatggttactaatagttttataatggaggtctaagaattaaagttgtgtgggagtttcaggacaaaggaaggctaaaagtttgtcaagacgttgagcgtattttggttacctatgagaagggttgtgacagtgtacagtggcagctgttggccacgctgcagaaatgagctggagctcatgggttttcagctacatttttcataactttgtagtacatccatcttgagtaaattaagccacaatttggtacctagggtctcaaactaaaatttatttttataaatgaattttaaaagaaaaaatatctacttcttttaaagttagaagaaaattaacctgctgacaggcaacatttttggggtgctttctgcactagttttccttgtaaatgatttgagtgagtaggtttggtttctgacgaaagtagactggagggtagcattgtatgcctcaaatgtctcagtgtgtttggctcatacgtgggctatactttattattttggtatgcttacaaatgactaaccaatcaaattgtcattaatgtttggaaaatctgttaatgcacatgcacaataatttcctgaaagccataggacatgtctgtagtcagcaccacgatagcaccgtttcatgaaaggcatggcggctgcatttcataccacatcaaaatacagtaacatttctatactaaattaacagtaatacctcaaaactgctccggtagtagtttttaatggattgaaatttacagtttagtaaaaggcttaaaattacttatacttatgaaataaactttaccagttgactaaaataatgcatgttaacagttggtctgtatttgcatgtaaaagtgggccaccagagaacccttattgattacttaagtgtttacattattttaaagactcctgtttaagagctttcagaattgtactgggtgaatctcatttataaaacttcctaagagactatctgaactctatactccagacagttaggtgggagtataaatctaccccttttgatgaccccaggcttgagtttttaaaatgactacccagaagggcacaagggggaaggaaatggtatttgtatatgtatataaatatgcacctaggagaatgtgctttttaaaataatgactactgtttttattaaaacataagaaactacacccccaaaataagactttcattcacattcacaaagcaaacatctagtacatgtctttcacttcactttatgatagtgtattggatgatttgggcattacgatcacctcttaccacagcacagaacatacattcttcaacagcattaacggagtttgccaagtgcattaaagaggtcacgtggagggtacgttcatatgaaacaatctgcagaaagtggggtaagaaagggcacatggcacagttaaagttgtagaaatcaaattactatcattttttgttgccaaaacaaagtcttacatttaacccccctttctaccaccccccctccacacttcacgtcagctacatagtttccacagggtaattcactaagagcttgtggagcttggttttaaaatccttagcctggtctgactttaggcatagcttccagttcttccttccttgtcctggtttcttgttcagcttttacttctaatccaacaacaaaagaaatgtctggctggtctcagctagagtctgatgtgtcttagagcatgtgtgcgtatctgaaccatcatccctgctctcatctcagctccctccaggcctgagcaccggttccttttgtcccatacgtcatgaagtcacactattgggaaacctgtgcttccctctccatggcttaactccctgtcagtgtcggagtgtataagaatgcttgtaaatactgtaatatatttattaatatttgaaaggcattcattcagtggacagtgggaattaactctcccaaggcaagtgaaaatgaatgattgacgtacgttgatttaacaatcttactagattttaattcttaaggatttcaaatgaaaccagaaggtggttatgtaagaggcttaaaatgatcttatgtttaaagagattctgttattagcaccatgaactcgtactatgaaatttttaagccttttatttttctaactatattactgtaggactggatattaggtgtcatataggaaacacaaaagttattgctgtttgctaaagcaaaatagcagaaaattttgtatatgcaaaactgttgaaggaccatagagaaatgtgtactactgacggggcttttactaggcttcctgcgtgtgtaaaagtcgaggtattgctggcattcagggtgacatgatggtactaaatgttttccattaaagtcttctattttaaaatttagagaaaaataaaatggctttccatcaga

SEQ ID NO: 297621 - DNA, 3915 bp, Homo sapiens
cttatgttctgacccacccttatgttctgacccaccattgggaaacctgttctcttctctgaagctactaatcaggggtctgatctgaagggaaattttgcacttccagaacagggggtaggaatctcttattcacgtgacattttgaatttcaggaggaattctgctacccagtggaatgcctcgctcttactgtggaagaagtgatgcatattcgccaggtcctggtgaaggcagagctggaaaaataccaacagtataaagacatctacaccgccttgaaaaaaggaaagctctgcttttgttgccgaaccaggaggttttccttcttcacttggtcttatacctgtcagttctgtaagaggccggtgtgctcacagtgttgcaaaaagatgcggctgccctccaaaccatactccactcttcctatcttttcattgggaccttctgctctgcaaagaggggaaagtagtatgaggtcagaaaaaccctccactgcccatcatcggccacttcggagcattgccaggttctcctcaaaatctaagtctatggacaaatcagatgaagaactccagtttcccaaagagttgatggaggactggagcaccatggaggtgtgtgtggactgcaagaagttcatttcggaaatcatcagttcaagccggcgcagtctggtgttggccaacaaaagggcccgattgaaaaggaaaacgcagtctttctacatgtcctcgccaggcccctcggagtactgcccttcagagaggacgatcagtgagatctgagcctcgtgcctttcagctgcttttgtgctacgagtcagcgtccgtgcgcgaggacactgagccgggctggctctcctttctgtggttttatttaatgggcttgaatttgcattagatcagatttttgccgcatcacattgttccacagactgaatgctgtgttcgtatcgattgatgaaacgtgacaggtccgccaattgctcgtttgcactgagagaggacaacagtttgaaacttacttttgtgtgtgtgtggctttggaagccagtagctacttccttagttcagttctttactgttcctcgaataatctcctgactaaggcaaaaaaaaaaagcttctcctacgagaatcagtctaacagagatgccgatgtcagcacagccctaagcagtaagtcatattggcatttccacgtgactgtgtttctatcccgtgtacagagagatccagagccctacactccacgacctgggggctcacagcacagaacctagaagcacctgctgacactcttcaactgatttttaaatgttgttgcttggagataaaaattacataagggactttttgcctgcattctagtgcaaaacatctgaagagctgtacacccacaagggtgactatttcccctgagtggccgtgttgtcccagtgccctggttcagtgtctcctgagtggatgacaggtcttcattctctatcttgaatgtattatggttactaatagttttataatggaggtctaagaattaaagttgtgtgggagtttcaggacaaaggaaggctaaaagtttgtcaagacgttgagcgtattttggttacctatgagaagggttgtgacagtgtacagtggcagctgttggccacgctgcagaaatgagctggagctcatgggttttcagctacatttttcataactttgtagtacatccatcttgagtaaattaagccacaatttggtacctagggtctcaaactaaaatttatttttataaatgaattttaaaagaaaaaatatctacttcttttaaagttagaagaaaattaacctgctgacaggcaacatttttggggtgctttctgcactagttttccttgtaaatgatttgagtgagtaggtttggtttctgacgaaagtagactggagggtagcattgtatgcctcaaatgtctcagtgtgtttggctcatacgtgggctatactttattattttggtatgcttacaaatgactaaccaatcaaattgtcattaatgtttggaaaatctgttaatgcacatgcacaataatttcctgaaagccataggacatgtctgtagtcagcaccacgatagcaccgtttcatgaaaggcatggcggctgcatttcataccacatcaaaatacagtaacatttctatactaaattaacagtaatacctcaaaactgctccggtagtagtttttaatggattgaaatttacagtttagtaaaaggcttaaaattacttatacttatgaaataaactttaccagttgactaaaataatgcatgttaacagttggtctgtatttgcatgtaaaagtgggccaccagagaacccttattgattacttaagtgtttacattattttaaagactcctgtttaagagctttcagaattgtactgggtgaatctcatttataaaacttcctaagagactatctgaactctatactccagacagttaggtgggagtataaatctaccccttttgatgaccccaggcttgagtttttaaaatgactacccagaagggcacaagggggaaggaaatggtatttgtatatgtatataaatatgcacctaggagaatgtgctttttaaaataatgactactgtttttattaaaacataagaaactacacccccaaaataagactttcattcacattcacaaagcaaacatctagtacatgtctttcacttcactttatgatagtgtattggatgatttgggcattacgatcacctcttaccacagcacagaacatacattcttcaacagcattaacggagtttgccaagtgcattaaagaggtcacgtggagggtacgttcatatgaaacaatctgcagaaagtggggtaagaaagggcacatggcacagttaaagttgtagaaatcaaattactatcattttttgttgccaaaacaaagtcttacatttaacccccctttctaccaccccccctccacacttcacgtcagctacatagtttccacagggtaattcactaagagcttgtggagcttggttttaaaatccttagcctggtctgactttaggcatagcttccagttcttccttccttgtcctggtttcttgttcagcttttacttctaatccaacaacaaaagaaatgtctggctggtctcagctagagtctgatgtgtcttagagcatgtgtgcgtatctgaaccatcatccctgctctcatctcagctccctccaggcctgagcaccggttccttttgtcccatacgtcatgaagtcacactattgggaaacctgtgcttccctctccatggcttaactccctgtcagtgtcggagtgtataagaatgcttgtaaatactgtaatatatttattaatatttgaaaggcattcattcagtggacagtgggaattaactctcccaaggcaagtgaaaatgaatgattgacgtacgttgatttaacaatcttactagattttaattcttaaggatttcaaatgaaaccagaaggtggttatgtaagaggcttaaaatgatcttatgtttaaagagattctgttattagcaccatgaactcgtactatgaaatttttaagccttttatttttctaactatattactgtaggactggatattaggtgtcatataggaaacacaaaagttattgctgtttgctaaagcaaaatagcagaaaattttgtatatgcaaaactgttgaaggaccatagagaaatgtgtactactgacggggcttttactaggcttcctgcgtgtgtaaaagtcgaggtattgctggcattcagggtgacatgatggtactaaatgttttccattaaagtcttctattttaaaatttagagaaaaataaaatggctttccatcaga

SEQ ID NO: 297622 - DNA, 5182 bp, Homo sapiens
  misc_feature (13)..(13): n is a, c, g, or t
  misc_feature (15)..(15): n is a, c, g, or t
  misc_feature (23)..(23): n is a, c, g, or t
  misc_feature (107)..(107): n is a, c, g, or t
  misc_feature (157)..(157): n is a, c, g, or t
acagaggtcattnantctttggnaattattatttataaagcactggactatggtttgaaggagaatgaagaaagggaattaagccctcccctagagcagcttatcgntcacatggccaacacggtggaagctgacggtagcaatgatgagggctatnaggctgcagaagaaggcctgggagatgaagatgaaaagagaaaaatctcagctattcggtcatatagagatgtcatgaagttgtgtgctgctcatctccctactgaatcagatgcaccaaatcattatcaggcagtatgtcgtgcactgtttgcagaaacaatggagctccatacatttctgaccaaaattaagagtgcgaaagagaatcttaagaagattcaagaaatggaaaagagcgatgaatctagcacagacttggaagagctgaaaaacgctgactgggcacgattctgggtacaggtgatgagggatttgaggaatggggtaaaacttaagaaggtccaagagcggcagtacaaccctttgcccattgaatatcagctcaccccttatgagatgttaatggatgacattcgctgcaaaagatacaccttgcgaaaagtgatggtgaatggtgatattccccctcggttaaaaaagagtgctcatgaaatcatcctcgacttcatcagatccagacctcctttaaatccagtctcagccagaaaactgaaaccaactccaccacggccacggagcctccatgaaagaatattagaagaaattaaagcagaaagaaagctgcggcctgtatcaccagaggagattagacgtagcagattagatgtgactacccctgaatctacaaagaatcttgtggagtcatctatggtgaatggaggtttgacatcacaaacaaaagaaaacgggttaagtacctcacagcaggtgcctgcacagcggaagaagctcctcagagccccaactctggccgaactggacagctctgagtctgaggaagaaacgctgcacaagtcgaccagcagcagcagcgtgtctccctctttccctgaagagccagtcctggaggccgtgtccacaaggaagaagcctccaaaattcctgcccatatcatcaacaccccagccagagagacggcagccaccccagagacgacattccattgaaaaggaaacgcctactaacgtgaggcagttcctgccgccttccaggcagagttcccgctctcttgaggaattctgctacccagtggaatgcctcgctcttactgtggaagaagtgatgcatattcgccaggtcctggtgaaggcagagctggaaaaataccaacagtataaagacatctacaccgccttgaaaaaaggaaagctctgcttttgttgccgaaccaggaggttttccttcttcacttggtcttatacctgtcagttctgtaagaggccggtgtgctcacagtgttgcaaaaagatgcggctgccctccaaaccatactccactcttcctatcttttcattgggaccttctgctctgcaaagaggggaaagtagtatgaggtcagaaaaaccctccactgcccatcatcggccacttcggagcattgccaggttctcctcaaaatctaagtctatggacaaatcagatgaagaactccagtttcccaaagagttgatggaggactggagcaccatggaggtgtgtgtggactgcaagaagttcatttcggaaatcatcagttcaagccggcgcagtctggtgttggccaacaaaagggcccgattgaaaaggaaaacgcagtctttctacatgtcctcgccaggcccctcggagtactgcccttcagagaggacgatcagtgagatctgagcctcgtgcctttcagctgcttttgtgctacgagtcagcgtccgtgcgcgaggacactgagccgggctggctctcctttctgtggttttatttaatgggcttgaatttgcattagatcagatttttgccgcatcacattgttccacagactgaatgctgtgttcgtatcgattgatgaaacgtgacaggtccgccaattgctcgtttgcactgagagaggacaacagtttgaaacttacttttgtgtgtgtgtggctttggaagccagtagctacttccttagttcagttctttactgttcctcgaataatctcctgactaaggcaaaaaaaaaaagcttctcctacgagaatcagtctaacagagatgccgatgtcagcacagccctaagcagtaagtcatattggcatttccacgtgactgtgtttctatcccgtgtacagagagatccagagccctacactccacgacctgggggctcacagcacagaacctagaagcacctgctgacactcttcaactgatttttaaatgttgttgcttggagataaaaattacataagggactttttgcctgcattctagtgcaaaacatctgaagagctgtacacccacaagggtgactatttcccctgagtggccgtgttgtcccagtgccctggttcagtgtctcctgagtggatgacaggtcttcattctctatcttgaatgtattatggttactaatagttttataatggaggtctaagaattaaagttgtgtgggagtttcaggacaaaggaaggctaaaagtttgtcaagacgttgagcgtattttggttacctatgagaagggttgtgacagtgtacagtggcagctgttggccacgctgcagaaatgagctggagctcatgggttttcagctacatttttcataactttgtagtacatccatcttgagtaaattaagccacaatttggtacctagggtctcaaactaaaatttatttttataaatgaattttaaaagaaaaaatatctacttcttttaaagttagaagaaaattaacctgctgacaggcaacatttttggggtgctttctgcactagttttccttgtaaatgatttgagtgagtaggtttggtttctgacgaaagtagactggagggtagcattgtatgcctcaaatgtctcagtgtgtttggctcatacgtgggctatactttattattttggtatgcttacaaatgactaaccaatcaaattgtcattaatgtttggaaaatctgttaatgcacatgcacaataatttcctgaaagccataggacatgtctgtagtcagcaccacgatagcaccgtttcatgaaaggcatggcggctgcatttcataccacatcaaaatacagtaacatttctatactaaattaacagtaatacctcaaaactgctccggtagtagtttttaatggattgaaatttacagtttagtaaaaggcttaaaattacttatacttatgaaataaactttaccagttgactaaaataatgcatgttaacagttggtctgtatttgcatgtaaaagtgggccaccagagaacccttattgattacttaagtgtttacattattttaaagactcctgtttaagagctttcagaattgtactgggtgaatctcatttataaaacttcctaagagactatctgaactctatactccagacagttaggtgggagtataaatctaccccttttgatgaccccaggcttgagtttttaaaatgactacccagaagggcacaagggggaaggaaatggtatttgtatatgtatataaatatgcacctaggagaatgtgctttttaaaataatgactactgtttttattaaaacataagaaactacacccccaaaataagactttcattcacattcacaaagcaaacatctagtacatgtctttcacttcactttatgatagtgtattggatgatttgggcattacgatcacctcttaccacagcacagaacatacattcttcaacagcattaacggagtttgccaagtgcattaaagaggtcacgtggagggtacgttcatatgaaacaatctgcagaaagtggggtaagaaagggcacatggcacagttaaagttgtagaaatcaaattactatcattttttgttgccaaaacaaagtcttacatttaacccccctttctaccaccccccctccacacttcacgtcagctacatagtttccacagggtaattcactaagagcttgtggagcttggttttaaaatccttagcctggtctgactttaggcatagcttccagttcttccttccttgtcctggtttcttgttcagcttttacttctaatccaacaacaaaagaaatgtctggctggtctcagctagagtctgatgtgtcttagagcatgtgtgcgtatctgaaccatcatccctgctctcatctcagctccctccaggcctgagcaccggttccttttgtcccatacgtcatgaagtcacactattgggaaacctgtgcttccctctccatggcttaactccctgtcagtgtcggagtgtataagaatgcttgtaaatactgtaatatatttattaatatttgaaaggcattcattcagtggacagtgggaattaactctcccaaggcaagtgaaaatgaatgattgacgtacgttgatttaacaatcttactagattttaattcttaaggatttcaaatgaaaccagaaggtggttatgtaagaggcttaaaatgatcttatgtttaaagagattctgttattagcaccatgaactcgtactatgaaatttttaagccttttatttttctaactatattactgtaggactggatattaggtgtcatataggaaacacaaaagttattgctgtttgctaaagcaaaatagcagaaaattttgtatatgcaaaactgttgaaggaccatagagaaatgtgtactactgacggggcttttactaggcttcctgcgtgtgtaaaagtcgaggtattgctggcattcagggtgacatgatggtactaaatgttttccattaaagtcttctattttaaaatttagagaaaaataaaatggctttccatcagactttctgtgttgagttgctatcgtaagacggtgatgtcttttggtaattagctgtcagaaatcacctcaattgggaaggcagggtacttttataagcagcctgtgatctttgaagaaatacagtctaggccgggcatggtggttcacgcctgtaatcccagcactttgggaggctgaggcagacggatcacc

SEQ ID NO: 297623 - DNA, 3710 bp, Homo sapiens
  misc_feature (13)..(13): n is a, c, g, or t
  misc_feature (15)..(15): n is a, c, g, or t
  misc_feature (23)..(23): n is a, c, g, or t
  misc_feature (107)..(107): n is a, c, g, or t
  misc_feature (157)..(157): n is a, c, g, or t
acagaggtcattnantctttggnaattattatttataaagcactggactatggtttgaaggagaatgaagaaagggaattaagccctcccctagagcagcttatcgntcacatggccaacacggtggaagctgacggtagcaatgatgagggctatnaggctgcagaagaaggcctgggagatgaagatgaaaagagaaaaatctcagctattcggtcatatagagatgtcatgaagttgtgtgctgctcatctccctactgaatcagatgcaccaaatcattatcaggcagtatgtcgtgcactgtttgcagaaacaatggagctccatacatttctgaccaaaattaagagtgcgaaagagaatcttaagaagattcaagaaatggaaaagagcgatgaatctagcacagacttggaagagctgaaaaacgctgactgggcacgattctgggtacaggtgatgagggatttgaggaatggggtaaaacttaagaaggtccaagagcggcagtacaaccctttgcccattgaatatcagctcaccccttatgagatgttaatggatgacattcgctgcaaaagatacaccttgcgaaaagtgatggtgaatggtgatattccccctcggttaaaaaagagtgctcatgaaatcatcctcgacttcatcagatccagacctcctttaaatccagtctcagccagaaaactgaaaccaactccaccacggccacggagcctccatgaaagaatattagaagaaattaaagcagaaagaaagctgcggcctgtatcaccagaggagattagacgtagcagattagatgtgactacccctgaatctacaaagaatcttgtggagtcatctatggtgaatggaggtttgacatcacaaacaaaagaaaacgggttaagtacctcacagcaggtgcctgcacagcggaagaagctcctcagagccccaactctggccgaactggacagctctgagtctgaggaagaaacgctgcacaagtcgaccagcagcagcagcgtgtctccctctttccctgaagagccagtcctggaggccgtgtccacaaggaagaagcctccaaaattcctgcccatatcatcaacaccccagccagagagacggcagccaccccagagacgacattccattgaaaaggaaacgcctactaacgtgaggcagttcctgccgccttccaggcagagttcccgctctcttgaggaattctgctacccagtggaatgcctcgctcttactgtggaagaagtgatgcatattcgccaggtcctggtgaaggcagagctggaaaaataccaacagtataaagacatctacaccgccttgaaaaaaggaaagctctgcttttgttgccgaaccaggaggttttccttcttcacttggtcttatacctgtcagttctgtaagaggccggtgtgctcacagtgttgcaaaaagatgcggctgccctccaaaccatactccactcttcctatcttttcattgggaccttctgctctgcaaagaggggaaagtagtatgaggtcagaaaaaccctccactgcccatcatcggccacttcggagcattgccaggttctcctcaaaatctaagtctatggacaaatcagatgaagaactccagtttcccaaagagttgatggaggactggagcaccatggaggtgtgtgtggactgcaagaagttcatttcggaaatcatcagttcaagccggcgcagtctggtgttggccaacaaaagggcccgattgaaaaggaaaacgcagtctttctacatgtcctcgccaggcccctcggagtactgcccttcagagaggacgatcagtgagatctgagcctcgtgcctttcagctgcttttgtgctacgagtcagcgtccgtgcgcgaggacactgagccgggctggctctcctttctgtggttttatttaatgggcttgaatttgcattagatcagatttttgccgcatcacattgttccacagactgaatgctgtgttcgtatcgattgatgaaacgtgacaggtccgccaattgctcgtttgcactgagagaggacaacagtttgaaacttacttttgtgtgtgtgtggctttggaagccagtagctacttccttagttcagttctttactgttcctcgaataatctcctgactaaggcaaaaaaaaaaagcttctcctacgagaatcagtctaacagagatgccgatgtcagcacagccctaagcagtaagtcatattggcatttccacgtgactgtgtttctatcccgtgtacagagagatccagagccctacactccacgacctgggggctcacagcacagaacctagaagcacctgctgacactcttcaactgatttttaaatgttgttgcttggagataaaaattacataagggactttttgcctgcattctagtgcaaaacatctgaagagctgtacacccacaagggtgactatttcccctgagtggccgtgttgtcccagtgccctggttcagtgtctcctgagtggatgacaggtcttcattctctatcttgaatgtattatggttactaatagttttataatggaggtctaagaattaaagttgtgtgggagtttcaggacaaaggaaggctaaaagtttgtcaagacgttgagcgtattttggttacctatgagaagggttgtgacagtgtacagtggcagctgttggccacgctgcagaaatgagctggagctcatgggttttcagctacatttttcataactttgtagtacatccatcttgagtaaattaagccacaatttggtacctagggtctcaaactaaaatttatttttataaatgaattttaaaagaaaaaatatctacttcttttaaagttagaagaaaattaacctgctgacaggcaacatttttggggtgctttctgcactagttttccttgtaaatgatttgagtgagtaggtttggtttctgacgaaagtagactggagggtagcattgtatgcctcaaatgtctcagtgtgtttggctcatacgtgggctatactttattattttggtatgcttacaaatgactaaccaatcaaattgtcattaatgtttggaaaatctgttaatgcacatgcacaataatttcctgaaagccataggacatgtctgtagtcagcaccacgatagcaccgtttcatgaaaggcatggcggctgcatttcataccacatcaaaatacagtaacatttctatactaaattaacagtaatacctcaaaactgctccggtagtagtttttaatggattgaaatttacagtttagtaaaaggcttaaaattacttatacttatgaaataaactttaccagttgactaaaataatgcatgttaacagttggtctgtatttgcatgtaaaagtgggccaccagagaacccttattgattacttaagtgtttacattattttaaagactcctgtttaagagctttcagaattgtactgggtgaatctcatttataaaacttcctaagagactatctgaactctatactccagacagttaggtgggagtataaatctaccccttttgatgaccccaggcttgagtttttaaaatgactacccagaagggcacaagggggaaggaaatggtatttgtatatgtatataaatatgcacctaggagaatgtgcttttt

SEQ ID NO: 297624 - DNA, 369 bp, Homo sapiens
ctgaatcactcagccatttactccccactttattgatttgaaatgtatccttggtaattacacttcactaattttatggcatatttgagataacagctatacccagaaattcatgatagtcttatatagtcacatgaatcttctgctttttgtctccttttaggtgaatggtgatattccccctcggttaaaaaagagtgctcatgaaatcatcctcgacttcatcagatccagacctcctttaaatccagtatgtaattcgacatagttctctagattggagatatcataatgaattattctactctagggtgtcatctctagaactcagctttcctaggtggtttttcctctgagctttttactctg

SEQ ID NO: 297625 - DNA, 2687 bp, Homo sapiens
agagccgcgggatttgcggccgccgccatgccgtcgtccccgctgcgggtggcggtggtgtgctcgagcaaccagaaccggagcatggaggcgcacaacatcctcagcaaacggggattcagcgtccgatcctttggaacagggactcacgtgaagcttccaggaccagctcccgacaagcccaatgtttatgatttcaaaaccacatatgaccagatgtacaatgatcttcttaggaaagacaaagaactgtatcccagcgggttgccctttaaaaaccccccgtgtggtcctccctggaaggtgttacgtgtggctcgggcacaggaggcgtgtcaccctgtgcagtgcacacactggctcctctgtctttgcgagagcttggtttctattcctggtgcacgtcggatcgtccacgggttagttccagtgccacccatggcagtaggcgtggtgaggcgcacagacacggtgtggggttcaccctgacgtggttcagcagagggtcgtgacatagcgtagaccagggatgcttaggtgaggaggtggaacccacaaaatcccattgcttttcacactgcagggctgccccgttatttcctttgcaggttggtgtgcgtgcgtgtgtgcgtgcgtgcctgatacacatggagccgggctgcttcacacatctggtgaggtcgttagaaggtcagataaagaagagggcggagcttgctaaccaagctgttagaagaaataatgggagagaacattccttcatttcaggaggacacagagcaggctaggtctgccgcgaagactcctatagagagaagagtattcttaaactagattctgatggacgcaacaccagttgcataatggttatgacaatcagtgcccgggtttttgaccaggcatttcatggtcacccccacgctaatggaaagtttctggatcttattttgttatagtgagtgatttgtagttttcagaacggaggccaggccaaacgtattccaaatgaaaagagaataggtgtcaaatgctaaaccttttatcttcgtgttggcactgttgccatccccgccctctcccgacatccccgcccttgaccagcatccctggccttgcccagcattgtctatgtattggcactcttgccatccccgccctttcccagcagagtctcactgtgtcaccccggctggagtgcagtggcgagatcttggctcactgcagactcactgcaacatccacctcccgggttccagtgattctcctgcttcagcctcctgggtagctgggattacaggcacgcgccaccacacctggctaatttttgtatttttagtagtcacagggtttcaccatgttggccaggctggtcttaaactcctgacttcaggtgatccaccctcctcgtcctcccaaagtgctgggattacaggcgtgagccaccatgctcagccctactcttgtatttttttttttttttttttttgagatggagtcagagtctcaccctgttgcccaaggtggagtgtagcggcttgatctcagctcactgcaacctccccctcccaagttcaagcgattctctgcctcagcctcccgaatagctgggattacaggcatccgctgtcatgcctggctaatttttgtatttttagtagagacgggggtttcaccatcttgaccaaactggtcttgaactcttgacctcgtgatccagctgcctcggcctctcagagtgttgggattacaggcgtgagccaccatgcctggcctcttggaatatttaataagctaaaaaattcttatacacaggtagattaattaggtagccaggagtggcccctgaaagtatgtctggcaaaacctagaactgcatcctagccatcactgtaccttctgccctccctgctgtctcctctgccagttacagttaaaaggttgtgggtgaggacgctgggcagagtcccaggcgtctgctgtcagctccccagcccggcctgcctgccgagccatctgggcgtcccacggtggagagtgtggtgcttgtgacgcggtggtgctgggagccatcctggtggcagatgtgggctctcactgcaagtcagtgtaagtccccagggactgtcagcagcacgtcctgctgcccctctctctgcagaagccctggtaacctgcgtttggaaaaatctctaaggatttctgaggagctgtcaggccatgtccttgtccaccctgtgtggggcacggcttcgacatggctctgctcccgtcgtgggctgagaaggagcaggtggggctgtgccttggaaaggaggccctcccgacatgcctttgtgcgaggtccctgtccatgctgtctccatcccggagccttacggcgatgggtggccacagagcctattccaagagtctggtttagggctgggtcttcccatcttcacctctgagtcttaggcgatgcgtgaccacgcagccccttccaggagtctggtttagggctgggtcttcccatcttcacctctgagtcttaggcggtgcatgaccacgcagccccttcccggagtctggtttagggctgcgtgctcaagagtctggtttggggctgggtcttcccatcgccctggaggaggcttttgtctcatctcatgattcacattaaactctgtgccatgaagcttaaaaaaaaa

SEQ ID NO: 297626 - DNA, 655 bp, Homo sapiens
  misc_feature (503)..(503): n is a, c, g, or t
  misc_feature (509)..(509): n is a, c, g, or t
  misc_feature (518)..(518): n is a, c, g, or t
  misc_feature (521)..(521): n is a, c, g, or t
  misc_feature (595)..(595): n is a, c, g, or t
agagccgcgggatttgcggccgccgccatgccgtcgtccccgctgcgggtggcggtggtgtgctcgagcaaccagaaccggagcatggaggcgcacaacatcctcaggtagttgggctccaccctgtccccgcgcgctctgctccggcgaccggccctccctcctccccggttccccctggcccgcgccaggacccctgagaggaagccgggccgggccgcgctcgtgggtcggctggttgggatggcagctggacggcagcgcgcgtagtccacacgcgggtgggcatcacagggaaggcaggttccgggacgaggcgcccgctgtccggtggtccttcgagctctccgaggccgggcccgggggcgagggtagcgtccgccgctccagcgccgcgcagccaccgccgccgccgccgcctctccttagtcgccgccatgacgaccgcgtccacctcgcaggtgcgccagaactaccatcaggactcagaggccgccatcaancgccanatcaactgnagntctacgcctcctacgtttacctgttcatgtcttactactttgaccgcgatgatgtggctgtgaagactttgcanatactttcttcacatctcatgaggagagggacatgctgagaactgatgaagtgcagacca

SEQ ID NO: 297627 - DNA, 2004 bp, Homo sapiens
agagccgcgggatttgcggccgccgccatgccgtcgtccccgctgcgggtggcggtggtgtgctcgagcaaccagaaccggagcatggaggcgcacaacatcctcagcaaacggggattcagcgtccgatcctttggaacagggactcacgtgaagcttccaggaccagctcccgacaagcccaatgtttatgatttcaaaaccacatatgaccagatgtacaatgatcttcttaggaaagacaaagaactgtatcccagcgggttgccctttaaaaaccccccgtgtggtcctccctggaaggtgttacgtgtggctcgggcacaggaggcgtgtcaccctgtgcagtgcacacactggctcctctgtctttgcgagagcttggtttctattcctggtgcacgtcggatcgtccacgggttagttccagtgccacccatggcagtaggcgtggtgaggcgcacagacacggtgtggggttcaccctgacgtggttcagcagagggtcgtgacatagcgtagaccagggatgcttaggtgaggaggtggaacccacaaaatcccattgcttttcacactgcagggctgccccgttatttcctttgcaggttggtgcacgcgccaccacacctggctaatttttgtatttttagtagtcacagggtttcaccatgttggccaggctggtcttaaactcctgacttcaggtgatccaccctcctcgtcctcccaaagtgctgggattacaggcgtgagccaccatgctcagccctactcttgtatttttttttttttttttttttgagatggagtcagagtctcaccctgttgcccaaggtggagtgtagcggcttgatctcagctcactgcaacctccccctcccaagttcaagcgattctctgcctcagcctcccgaatagctgggattacaggcatccgctgtcatgcctggctaatttttgtatttttagtagagacgggggtttcaccatcttgaccaaactggtcttgaactcttgacctcgtgatccagctgcctcggcctctcagagtgttgggattacaggcgtgagccaccatgcctggcctcttggaatatttaataagctaaaaaattcttatacacaggtagattaattaggtagccaggagtggcccctgaaagtatgtctggcaaaacctagaactgcatcctagccatcactgtaccttctgccctccctgctgtctcctctgccagttacagttaaaaggttgtgggtgaggacgctgggcagagtcccaggcgtctgctgtcagctccccagcccggcctgcctgccgagccatctgggcgtcccacggtggagagtgtggtgcttgtgacgcggtggtgctgggagccatcctggtggcagatgtgggctctcactgcaagtcagtgtaagtccccagggactgtcagcagcacgtcctgctgcccctctctctgcagaagccctggtaacctgcgtttggaaaaatctctaaggatttctgaggagctgtcaggccatgtccttgtccaccctgtgtggggcacggcttcgacatggctctgctcccgtcgtgggctgagaaggagcaggtggggctgtgccttggaaaggaggccctcccgacatgcctttgtgcgaggtccctgtccatgctgtctccatcccggagccttacggcgatgggtggccacagagcctattccaagagtctggtttagggctgggtcttcccatcttcacctctgagtcttaggcgatgcgtgaccacgcagccccttccaggagtctggtttagggctgggtcttcccatcttcacctctgagtcttaggcggtgcatgaccacgcagccccttcccggagtctggtttagggctgcgtgctcaagagtctggtttggggctgggtcttcccatcgccctggaggaggcttttgtctcatctcatgattcacattaaactctgtgccatgaagcttaaaaaaaaa

SEQ ID NO: 297628 - DNA, 227 bp, Homo sapiens
gctgtaagatccacaagagtagagacaattgctggccgtgcttatcactgtggacccaaagcctgaagtagcatctggttcattaaacacatgatgaatatatgttgaataactaaatgaatgaaaacaccgttcttcaagctcccactaacaccttaccactctctaccatgtcaacttattttattataacaattgctcatcattaaaccgtatggtcctggaag

SEQ ID NO: 297629 - DNA, 2082 bp, Homo sapiens
  misc_feature (439)..(439): n is a, c, g, or t
  misc_feature (500)..(500): n is a, c, g, or t
  misc_feature (1311)..(1311): n is a, c, g, or t
  misc_feature (1459)..(1459): n is a, c, g, or t
agtctcatattatacaactggaatatgagttcaataaactcatgtttattttaggtgctacaacaggcattcttaatagtattttatatttacttgtgtttatcttgtagctcacgtcccctttaccccaaagtgagtaaagtgctgtagaatctaggatttggtcatatcacaattattgataattttcaacgatacaaatgaacatttccaatacacaatgccaagaacagaagtgttaaagggaagggatggcagagcagtgggtaaggtcacaggcagaagtaagaggcgaggccaaggaaggtttcagctgggacctggggaaagtggggtgggactttgcaagttgagaggacagcagactccaaagctcggaggaaagagggcaggggtctggggaatacgagacagcctgtgtcactgggcagtgcagccnggggtggtcaggaaggggcctgactaggaagttcattctaatgatgacagagacacagcantttgggcagaaatatcccatgttcaatttctgtctaggatgatccttctggtatgaagcacaggttaggggaaataatgggggtatggaaactgtcaagaggctgctgcccctggccagtagaaagagagtcaaggccagcccaggacaggaacaacagggagggaaagaaagtgaagaccctgaggagagagaggtgagaggtcagaggcagtagctgatggatgggggcgagggtgggaggaaggcccagggacagtgttagagaggccaatgtgtgtctgtccagcccctggcccctgggactcaggctacgcaccttcatgccctcccctgcagctgcatgcattgagattggtcaacggatgctcgctgttctcttgggtccctaagctagaatgaagcaaccttggggcaactcatggctgtgtccagctcctccaagggagcagaagaggaaccaacaggcagagaggagaagaccggaaagccagagagtgatcgggagagagaaacgcaggggctatttgtccctgacacagatgctgagttctgccagttcctcatgggtttctctcactggcaaccaaaggagtcttgactaaattaaataccacgctggctctggcgagagcggccagggagatggtggtgctatcatcaaaagaagcatcccaggaggaagaaaaaaagtttggaagcacatcgtgtcaacatatcccagtaaatgcatacagcaggcacttctacctaagcatatgaaccagatttcttattcatttttcatgtattctctgttgggttttgtattnaaatattttccaaaattgtaaaacacaaatcttatttaagaagtgccagaaaactttcaaggatattataatttgttttgcacttctagaaataaattgctttaaaaaaatcaataaattctcagtattactgttactagaactcgcngaatagaattatccagctgaacacaattacgatgcttatctagtcaacagtcagagacctgagcctctggggcaaggctacttggcagtacatgttgctcttataccactccttggggacgccgaggggaaggtggtggcaggagacaggacacatgggcagggccacgccataacagagaacaggagaagttgaggggaggcaagagaggaggcaagtgagcatggtcttcctcactggggaagaaactcgtaggctgcctggagcaaccatcagaggctctctggaagtcctgccgtttggcgccatcatggaaatttctggatgaagaaaggccacatttcaaaacctgctgcagatctggctgtcccctgcatgagctccctctgccagcaaggccttgcagccagtgccaagtctcaaccagagggagccacagtattcactggctcagtgctatgttcaaattcctccatgtgcctacagtggaatttcaatcaaaatcagcttatccttctctttcctttgcaatctgagtgtggtgccagccatctctcaaccccacagcaatggagtatctggagcgcaaggaggggttacagcttcttaatttcttatttctt

SEQ ID NO: 297630 - DNA, 1686 bp, Homo sapiens
  misc_feature (1)..(1): n is a, c, g, or t
  misc_feature (5)..(8): n is a, c, g, or t
ngcannnngctctggttcccttccacgctgtggaagctttgttcttttggtcttcatgataaatcttgctgctgctcactcgttgggtccgtgccacctttaagagctgtaacactcaccgcgaaggtctgcaacttcactcctggggccagcaagaccacgaatgcaccgagaggaatgaacaactctggacacaccatctttaagaaccgtaatactcaccgcaagggtctgcaacttcattcttgaagtcagtgaggccaagaacccatcaattccgtacacattttggtgactttgaagagactgtcacctatcaccaagtggtgagactattgccaagcagtgagactattgccaagtggtgagaccatcaccaagcggtgagactatcacctatcgccaagtggcctgattcagcaggaagcatctcagacaccaaccactatgctgtcagcagttgcccggggctaccagggctggtttcatccctgtgctaggctttctgtgaggatgagcagcaccgggatagacaggaagggcgtcctggctaaccgggtagccgtggtcacggggtccaccagtgggatcggctttgccatcgcccgacgtctggcccgggacggggcccacgtggtcatcagcagccggaagcagcagaacgtggaccgggccatggccaagctgcagggggaggggctgagtgtggcgggcattgtgtgccacgtggggaaggctgaggaccgggagcagctggtggccaaggccctggagcactgtgggggcgtcgacttcctggtgtgcagcgcaggggtcaaccctctggtagggagcactctggggaccagtgagcagatctgggacaagatcctaagtgtgaacgtgaagtccccagccctgctgctgagccagttgctgccctacatggagaacaggaggggtgctgtcatcctggtctcttccattgcagcttataatccagtagtggcgctgggtgtctacaatgtcagcaagacagcgctgctgggtctcactagaacactggcattggagctggcccccaaggacatccgggtaaactgcgtggttccaggaattatcaaaactgacttcagcaaagtgtttcatgggaatgagtctctctggaagaacttcaaggaacatcatcagctgcagaggattggggagtcagaggactgtgcaggaatcgtgtccttcctgtgctctccagatgccagctacgtcaacggggagaacattgcggtggcaggctactccactcggctctgagaggagtgggggcggctgcgtagctgtggtcccaggcccaggagcctgagggggtgtctaggtgatcatttggatctggaggcagagtctgccattctgccagactagcaatttgggggcttactcatgctaggcttgaggaagaagaaaaacgcttcggcattctccttaggacttatctgcttgtagatttggctgatccaattaacatgtggggttcttggtgtgggtctggggagctgaaggattttatggagctggtgctttggaggaatcttaagggaaaggagtagaagctcaggcctttgaaggatttcagctcctcctctctgtaatttgtgctttaagcattttttttcctaaaataaactcaaatttatcctcaaaaaaaaagca

SEQ ID NO: 297631 - DNA, 2865 bp, Homo sapiens
  misc_feature (943)..(943): n is a, c, g, or t
  misc_feature (1065)..(1065): n is a, c, g, or t
  misc_feature (2324)..(2324): n is a, c, g, or t
cttgaacttttggccttgagtaatcctcccaccttggcctcctaaagtgctgagattacaggcatgacccactgcccccagtccccattttctttaaaaggcctgaacatttccttcctcgtgtcagtcctgaacaattcacattttcagggctctgctcacaggcctgtgacttagcctgcctgcctatgaaaccattagcaaattggaaatacctcttgcaccagtcagaagggggattggtttctcttatatgcacatacattgggtctactgcacaaattacagggctccaagtgtcttatgagagcaggacttgggctgaccatgtctctctgccctcacccatgctctgctctgatttcagatcctaagtgtgaacgtgaagtccccagccctgctgctgagccagttgctgccctacatggagaacaggtatggcagggcgggggtggggaccagtcggagttggggacctgaggtgggcacagaaatacagtcggtagcacagccagtagtgggtagaggacagaagaggtctgggatctccacatccctcatcttcttgtcctgcctccccatctgtgtggctgccattcccaattccagtggctgcaggatgagagtagtattccaggggcccaggcatagcctccttggccttgacatcagcaggtttgggacaaggctatgctttaactccttgaccttgtgggctggtcattgtcaccttacctgctctctgttcttaccaacttaaaaccaatgacagggttagccccattcctctccataggaaaaagcctgtcccagacctctcctcatgcctgcgcttggtctccagggaccctgcctgtgttccaggtcctgcagatctgactgtacccctcacagacacacccttaggaactggccaggggctgtcttcagtagaaggaaagtncctgactgtcacttctggtctcccttaccccatctgctccttagaggttgctcattgataggcactcaccatcagccttgggtgcctcttcacaaagcccaccctgccctctccttcaagcncctggcaagagaggaagcagaagataagggttctgagcatggacatcgtatttatgagaaataggcatggaatcctagctctgccgtgtattggctggtactaaacctttctgagcctcagttttctgaactctgagatggggacagtaataggacctgtgttgcttctgtgagggttgcatcatttaatgaactcatgatagtgtcaccatcagtggtaagctcttagcttcagcttctcttatgtttgtcttgtctcaggaggggtgctgtcatcctggtctcttccattgcagcttataatccagtagtggtaagtgcttggtccttgtgctcctgagtggtatagggtgaggggcaactttgttcttttcctcagagccttacagacaaagtgcctgggacagacccccaccatcctcctgctgccctgggctgagcttgtctccatgtgggtgggagggctgctgggcctgtgagatccctgtaggtgagaaatccaactgatgctttcccccactctcccatatcctaatcactctgtcaattcccttcccaggcgctgggtgtctacaatgtcagcaagacagcgctgctgggtctcactagaacactggcattggagctggcccccaaggacatccgggtaaactgcgtggttccaggaattatcaaaactgacttcagcaaagtggtgaggattgggtgtgtcttccatctcccagtctggctcagtgggaacccttcccagtgaataagggatcaaggggtgactgaatccttaggtcagcatgcctatgactgaggtcctcattgttctctgaactcagccatggtgcagtccatccatcctgaaaagatgctccttcttttgagaagggcaaagctgccctaggtgttctgcctggtggccttcccggggccctgcccatcttgttttagtagcactgactccttcatttcttccctttgcccagtttcatgggaatgagtctctctggaagaacttcaaggaacatcatcagctgcagaggcaagtggggtttggagatttggtggtccatgtgtggctaggcaggggcagttgagtctattgcaagagcagacccctccctgtcatctggccattgtttttgctgaaatctggagtccacatggccctggagggtgcaagtagccctgctgcatccaccttgttccccatggagcccactcccacctgtcatccgtgagccccagagcagcagaatcagagtacnagatgcttgacactgtgtccttcttccatccaggattggggagtcagaggactgtgcaggaatcgtgtccttcctgtgctctccagatgccagctacgtcaacggggagaacattgcggtggcaggctactccactcggctctgagaggagtgggggcggctgcgtagctgtggtcccaggcccaggagcctgagggggtgtctaggtgatcatttggatctggaggcagagtctgccattctgccagactagcaatttgggggcttactcatgctaggcttgaggaagaagaaaaacgcttcggcattctccttaggacttatctgcttgtagatttggctgatccaattaacatgtggggttcttggtgtgggtctggggagctgaaggattttatggagctggtgctttggaggaatcttaagggaaaggagtagaagctcaggcctttgaaggatttcagctcctcctctctgtaatttgtgctttaagcattttttttcctaaaataaactcaaatttatcctcaaaaaaaaagca

SEQ ID NO: 297632 - DNA, 1344 bp, Homo sapiens
ctcagctgcagactgcctgacagaagggctgccaaactgcactccagacagacaggtgcacagccaggcctgattcagcaggaagcatctcagacaccaaccactatgctgtcagcagttgcccggggctaccagggctggtttcatccctgtgctaggctttctgtgaggatgagcagcaccgggatagacaggaagggcgtcctggctaaccgggtagccgtggtcacggggtccaccagtgggatcggctttgccatcgcccgacgtctggcccgggacggggcccacgtggtcatcagcagccggaagcagcagaacgtggaccgggccatggccaagctgcagggggaggggctgagtgtggcgggcattgtgtgccacgtggggaaggctgaggaccgggagcagctggtggccaaggccctggagcactgtgggggcgtcgacttcctggtgtgcagcgcaggggtcaaccctctggtagggagcactctggggaccagtgagcagatctgggacaagatcctaagtgtgaacgtgaagtccccagccctgctgctgagccagttgctgccctacatggagaacaggaggggtgctgtcatcctggtctcttccattgcagcttataatccagtagtggcgctgggtgtctacaatgtcagcaagacagcgctgctgggtctcactagaacactggcattggagctggcccccaaggacatccgggtaaactgcgtggttccaggaattatcaaaactgacttcagcaaagtgtttcatgggaatgagtctctctggaagaacttcaaggaacatcatcagctgcagaggattggggagtcagaggactgtgcaggaatcgtgtccttcctgtgctctccagatgccagctacgtcaacggggagaacattgcggtggcaggctactccactcggctctgagaggagtgggggcggctgcgtagctgtggtcccaggcccaggagcctgagggggtgtctaggtgatcatttggatctggaggcagagtctgccattctgccagactagcaatttgggggcttactcatgctaggcttgaggaagaagaaaaacgcttcggcattctccttaggacttatctgcttgtagatttggctgatccaattaacatgtggggttcttggtgtgggtctggggagctgaaggattttatggagctggtgctttggaggaatcttaagggaaaggagtagaagctcaggcctttgaaggatttcagctcctcctctctgtaatttgtgctttaagcattttttttcctaaaataaactcaaatttatcctcaaaaaaaaagca

SEQ ID NO: 297633 - DNA, 1425 bp, Homo sapiens
  misc_feature (1)..(1): n is a, c, g, or t
  misc_feature (5)..(8): n is a, c, g, or t
ngcannnngctctggttcccttccacgctgtggaagctttgttcttttggtcttcatgataaatcttgctgctgctcactcgttgggtccgtgccacctttaagagctgtaacactcaccgcgaaggtctgcaacttcactcctggggccagcaagaccacgaatgcaccgagaggaatgaacaactctggacacaccatctttaagaaccgtaatactcaccgcaagggtctgcaacttcattcttgaagtcagtgaggccaagaacccatcaattccgtacacattttggtgactttgaagagactgtcacctatcaccaagtggtgagactattgccaagcagtgagactattgccaagtggtgagaccatcaccaagcggtgagactatcacctatcgccaagtggcctgattcagcaggaagcatctcagacaccaaccactatgctgtcagcagttgcccggggctaccagggctggtttcatccctgtgctaggctttctgtgaggatgagcagcaccgggatagacaggaagggcgtcctggctaaccgggtagccgtggtcacggggtccaccagtgggatcggctttgccatcgcccgacgtctggcccgggacggggcccacgtggtcatcagcagccggaagcagcagaacgtggaccgggccatggccaagctgcagggggaggggctgagtgtggcgggcattgtgtgccacgtggggaaggctgaggaccgggagcagctggtggccaaggccctggagcactgtgggggcgtcgacttcctggtgtgcagcgcaggggtcaaccctctggtagggagcactctggggaccagtgagcagatctgggacaagatcctaagtgtgaacgtgaagtccccagccctgctgctgagccagttgctgccctacatggagaacaggaggggtgctgtcatcctggtctcttccattgcagcttataatccagtagtggcgctgggtgtctacaatgtcagcaagacagcgctgctgggtctcactagaacactggcattggagctggcccccaaggacatccgggtaaactgcgtggttccaggaattatcaaaactgacttcagcaaagtgtttcatgggaatgagtctctctggaagaacttcaaggaacatcatcagctgcagaggattggggagtcagaggactgtgcaggaatcgtgtccttcctgtgctctccagatgccagctacgtcaacggggagaacattgcggtggcaggaaacactcggtcgtaagactgggcggctgctccttgtccaagcccagacctgagggtgccggagactcgactcggggcagtggcacagcaaaacgatggggcactggctgcagaaaaccggtatacacacacgcggcacgacacaatgtcggcc

SEQ ID NO: 297634 - DNA, 940 bp, Homo sapiens
tgtgcctgtagcggagactgtctctcctagaagggggctcctcactgagtcccacacaaacttgccgacaggaccagatccagccatcagcattccgggggcttagacatcccagcctgctatcctaagtgtgaacgtgaagtccccagccctgctgctgagccagttgctgccctacatggagaacaggaggggtgctgtcatcctggtctcttccattgcagcttataatccagtagtggcgctgggtgtctacaatgtcagcaagacagcgctgctgggtctcactagaacactggcattggagctggcccccaaggacatccgggtaaactgcgtggttccaggaattatcaaaactgacttcagcaaagtgtttcatgggaatgagtctctctggaagaacttcaaggaacatcatcagctgcagaggattggggagtcagaggactgtgcaggaatcgtgtccttcctgtgctctccagatgccagctacgtcaacggggagaacattgcggtggcaggctactccactcggctctgagaggagtgggggcggctgcgtagctgtggtcccaggcccaggagcctgagggggtgtctaggtgatcatttggatctggaggcagagtctgccattctgccagactagcaatttgggggcttactcatgctaggcttgaggaagaagaaaaacgcttcggcattctccttaggacttatctgcttgtagatttggctgatccaattaacatgtggggttcttggtgtgggtctggggagctgaaggattttatggagctggtgctttggaggaatcttaagggaaaggagtagaagctcaggcctttgaaggatttcagctcctcctctctgtaatttgtgctttaagcattttttttcctaaaataaactcaaatttatcctcaaaaaaaaagca

SEQ ID NO: 297635 - DNA, 2653 bp, Homo sapiens
gggtgccgcgcctgtagcactcccggaactggaactaggtgccagacggtccggaggcgggggccacgtcagcggggccacccagggctcgcggggtcccggtgggtgccatgcggaggggcgcgcttctggcgggcgccttggccgcgtacgccgcgtacctggtgctgggcgcgctgttggtggcgcggctggaggggccgcacgaagccaggctccgagccgagctggagacgctgcgggcgcagctgcttcagcgcagcccgtgtgtggctgcccccgccctggacgccttcgtggagcgagtgctggcggccggacggctggggcgggtcgtgcttgctaacgcttcggggtccgccaacgcctcggaccccgcctgggacttcgcctctgctctcttcttcgccagcacgctgatcaccaccgtgggctatgggtacacaacgccactgactgatgcgggcaaggccttctccatcgcctttgcgctcctgggcgtgccgaccaccatgctgctgctgaccgcctcagcccagcgcctgtcactgctgctgactcacgtgcccctgtcttggctgagcatgcgttggggctgggacccccggcgggcggcctgctggcacttggtggccctgttgggggtcgtagtgaccgtctgctttctggtgccggctgtgatctttgcccacctcgaggaggcctggagcttcttggatgccttctacttctgctttatctctctgtccaccatcggcctgggcgactacgtgcccggggaggcccctggccagccctaccgggccctctacaaggtgctggtcacagtctacctcttcctgggcctggtggccatggtgctggtgctgcagaccttccgccacgtgtccgacctccacggcctcacggagctcatcctgctgccccctccgtgccctgccagtttcaatgcggatgaggacgatcgggtggacatcctgggcccccagccggagtcgcaccagcaactctctgccagctcccacaccgactacgcttccatccccaggtagctggggcagcctctgccaggcttgggtgtgcctggcctgggactgaggggtccaggcgaccagagctggctgtacaggaatgtccacgagcacagcaggtgatcttgaggccttgccgtccaccgtctctcctttgtttcccagcatctggctgggatgtgaagggcagcactccctgtccccatgtcccgggctccactgggcaccaacataaccttgttctctgtcctttctctcatcctctttacactgtgtctctctggctctctggcattctcgctgcctctgtctttccctcttgctgtctctgtttctcattctctttcatgttccgtctgtgtctctcaattaaccactcgtcaactgctgattctactgggctgtgggctcagacctcatttcaggcaccagattggtcgctacaccctggacaagtgactgcccgtctctgagccttgatttcctcagctgccaaatgggaagaatagaagaatttgcccctaaacccctcctgtgtgctggccctgtgctagacagtgctggagacatagttgggggtggagaactgcccttatggagcttgcagtccagtgaggtggacagacctgtccccagacagtgatggcccaaaatggtcaggactttaatggaggaggtgaggtgttgaaagcacaggcagagtggtcagggctgaagtcggagaagcatagggactaggcccaatccagcctggaaagtcagggaggacttcctagaggaagggacatcgaactaagacctgaactatgagaaataggcaggaagaagttgtacctgactcatttttctcaggtgtctccagggagcaggacccatggagggacccctggtgtaggcctgggcgatagactcttcctcagcagcctggcaggcaggaaacagacataggaccccagcccagatctgaatggcatgggaggtgctgcccttaaccatgacaccattgtaagagctgtccacatttgtatgttgtgccctggaatcagcctggttgagctcaaatcccaacttagccacgtctggcctgtgtccttgggcagtcacactacctctctgattttgtttccttatctgtaaaatggtgatcatcataatacaacttcaaaaggatttcaggctgagtgtggtggctcacgcctatacacccagcactttggaaggctgaggaaggaggatcgcttgaggccaggagtttgagactagcctaggcaacacagtgaggccttatctcaacaacaaccacaaaatctaaaaattagctgggtgtggtggtgcatgcctgtgatcctggctacttcagaggctgaggtggaaggatcacttgaggccaggagtttgaggctgcagtgagttatgatggcactgctgcactccagcctgcgggacagagtgagaccctgtctgaaagaaagagagaaagaaagaaagaaagagagagaaagaaagaaagaaagaaagggaaagatggaaggaaggaaggaaaaagaaagagaaagagagagagagagaaagaaaaagaaagaaaagtaagaaagaaaaaagaaaaagaaagaaaagtaaga

SEQ ID NO: 297636 - DNA, 2664 bp, Homo sapiens
tatagtagtgggttaaacggcccgcccgggtagtcggaactggaactaggtgccagacggtccggaggcgggggccacgtcagcggggccacccagggctcgcggggtcccggtgggtgccatgcggaggggcgcgcttctggcgggcgccttggccgcgtacgccgcgtacctggtgctgggcgcgctgttggtggcgcggctggaggggccgcacgaagccaggctccgagccgagctggagacgctgcgggcgcagctgcttcagcgcagcccgtgtgtggctgcccccgccctggacgccttcgtggagcgagtgctggcggccggacggctggggcgggtcgtgcttgctaacgcttcggggtccgccaacgcctcggaccccgcctgggacttcgcctctgctctcttcttcgccagcacgctgatcaccaccgtgggctatgggtacacaacgccactgactgatgcgggcaaggccttctccatcgcctttgcgctcctgggcgtgccgaccaccatgctgctgctgaccgcctcagcccagcgcctgtcactgctgctgactcacgtgcccctgtcttggctgagcatgcgttggggctgggacccccggcgggcggcctgctggcacttggtggccctgttgggggtcgtagtgaccgtctgctttctggtgccggctgtgatctttgcccacctcgaggaggcctggagcttcttggatgccttctacttctgctttatctctctgtccaccatcggcctgggcgactacgtgcccggggaggcccctggccagccctaccgggccctctacaaggtgctggtcacagtctacctcttcctgggcctggtggccatggtgctggtgctgcagaccttccgccacgtgtccgacctccacggcctcacggagctcatcctgctgccccctccgtgccctgccagtttcaatgcggatgaggacgatcgggtggacatcctgggcccccagccggagtcgcaccagcaactctctgccagctcccacaccgactacgcttccatccccaggtagctggggcagcctctgccaggcttgggtgtgcctggcctgggactgaggggtccaggcgaccagagctggctgtacaggaatgtccacgagcacagcaggtgatcttgaggccttgccgtccaccgtctctcctttgtttcccagcatctggctgggatgtgaagggcagcactccctgtccccatgtcccgggctccactgggcaccaacataaccttgttctctgtcctttctctcatcctctttacactgtgtctctctggctctctggcattctcgctgcctctgtctttccctcttgctgtctctgtttctcattctctttcatgttccgtctgtgtctctcaattaaccactcgtcaactgctgattctactgggctgtgggctcagacctcatttcaggcaccagattggtcgctacaccctggacaagtgactgcccgtctctgagccttgatttcctcagctgccaaatgggaagaatagaagaatttgcccctaaacccctcctgtgtgctggccctgtgctagacagtgctggagacatagttgggggtggagaactgcccttatggagcttgcagtccagtgaggtggacagacctgtccccagacagtgatggcccaaaatggtcaggactttaatggaggaggtgaggtgttgaaagcacaggcagagtggtcagggctgaagtcggagaagcatagggactaggcccaatccagcctggaaagtcagggaggacttcctagaggaagggacatcgaactaagacctgaactatgagaaataggcaggaagaagttgtacctgactcatttttctcaggtgtctccagggagcaggacccatggagggacccctggtgtaggcctgggcgatagactcttcctcagcagcctggcaggcaggaaacagacataggaccccagcccagatctgaatggcatgggaggtgctgcccttaaccatgacaccattgtaagagctgtccacatttgtatgttgtgccctggaatcagcctggttgagctcaaatcccaacttagccacgtctggcctgtgtccttgggcagtcacactacctctctgattttgtttccttatctgtaaaatggtgatcatcataatacaacttcaaaaggatttcaggctgagtgtggtggctcacgcctatacacccagcactttggaaggctgaggaaggaggatcgcttgaggccaggagtttgagactagcctaggcaacacagtgaggccttatctcaacaacaaccacaaaatctaaaaattagctgggtgtggtggtgcatgcctgtgatcctggctacttcagaggctgaggtggaaggatcacttgaggccaggagtttgaggctgcagtgagttatgatggcactgctgcactccagcctgcgggacagagtgagaccctgtctgaaagaaagagagaaagaaagaaagaaagagagagaaagaaagaaagaaagaaagggaaagatggaaggaaggaaggaaaaagaaagagaaagagagagagagagaaagaaaaagaaagaaaagtaagaaagaaaaaagaaaaagaaagaaaagtaaga

SEQ ID NO: 297637 - DNA, 347 bp, Homo sapiens
ttgggatttgagctcaaccaggctgattccaggcacaacatacaaatgtggactgctcttacaatggtgggatgtgaagggcagcactccctgtccccatgtcccgggctccactgggcaccaacataaccttgttctctgtcctttctctcatcctctttacactgtgtctctctggctctctggcattctcgctgcctctgtctttccctcttgctgtctctgtttctcattctctttcatgttccgtctgtgtctagacacaggctcaagatggagacacaggctcaagatggagacacaggctcaagatggtcatgacacggtcaacacagccaatgtcagga

SEQ ID NO: 297638 - DNA, 1412 bp, Homo sapiens
gggtgccgcgcctgtagcactcccggaactggaactaggtgccagacggtccggaggcgggggccacgtcagcggggccacccagggctcgcggggtcccggtgggtgccatgcggaggggcgcgcttctggcgggcgccttggccgcgtacgccgcgtacctggtgctgggcgcgctgttggtggcgcggctggaggggccgcacgaagccaggctccgagccgagctggagacgctgcgggcgcagctgcttcagcgcagcccgtgtgtggctgcccccgccctggacgccttcgtggagcgagtgctggcggccggacggctggggcgggtcgtgcttgctaacgcttcggggtccgccaacgcctcggaccccgcctgggacttcgcctctgctctcttcttcgccagcacgctgatcaccaccgtgggctatgggtacacaacgccactgactgatgcgggcaaggccttctccatcgcctttgcgctcctgggcgtgccgaccaccatgctgctgctgaccgcctcagcccagcgcctgtcactgctgctgactcacgtgcccctgtcttggctgagcatgcgttggggctgggacccccggcgggcggcctgctggcacttggtggccctgttgggggtcgtagtgaccgtctgctttctggtgccggctgtgatctttgcccacctcgaggaggcctggagcttcttggatgccttctacttctgctttatctctctgtccaccatcggcctgggcgactacgtgcccggggaggcccctggccagccctaccgggccctctacaaggtgctggtcacagtctacctcttcctgggcctggtggccatggtgctggtgctgcagaccttccgccacgtgtccgacctccacggcctcacggagctcatcctgctgccccctccgtgccctgccagtttcaatgcggatgaggacgatcgggtggacatcctgggcccccagccggagtcgcaccagcaactctctgccagctcccacaccgactacgcttccatccccaggtagctggggcagcctctgccaggcttgggtgtgcctggcctgggactgaggggtccaggcgaccagagctggctgtacaggaatgtccacgagcacagcaggtgatcttgaggccttgccgtccaccgtctctcctttgtttcccagcatctggctgggatgtgaagggcagcactccctgtccccatgtcccgggctccactgtgggcagcgctgcccacgaagtggctgccacaatgatccgcctcggactcctgcctcactcatttacaccaaccaccacaactatctataaacctagccatggccatccccttatgagcgggcgcagtataggctttcgctctaagattacatatgcca

SEQ ID NO: 297639 - DNA, 908 bp, Homo sapiens
agccctgtccctgggggagttaaaggctcacagtcccactctgggacttccaaaagggatccaaccccaccctgcagggtccagtagaactgcggccccgcctggaaaatctgagccccaggatgaccaacgccccttctccgcctttacagtctacctcttcctgggcctggtggccatggtgctggtgctgcagaccttccgccacgtgtccgacctccacggcctcacggagctcatcctgctgccccctccgtgccctgccagtttcaatgcggatgaggacgatcgggtggacatcctgggcccccagccggagtcgcaccagcaactctctgccagctcccacaccgactacgcttccatccccaggtagctggggcagcctctgccaggcttgggtgtgcctggcctgggactgaggggtccaggcgaccagagctggctgtacaggaatgtccacgagcacagcaggtgatcttgaggccttgccgtccaccgtctctcctttgtttcccagcatctggctgggatgtgaagggcagcactccctgtccccatgtcccgggctccactgggcaccaacataaccttgttctctgtcctttctctcatcctctttacactgtgtctctctggctctctggcattctcgctgcctctgtctttccctcttgctgtctctgtttctcattctctttcatgttccgtctgtgtctctcaattaaccactcgtcaactgctgattctactgggctgtgggctcagacctcatttcaggcaccagattggtcgctacaccctggacaagtgactgcccgtctctgagccttgatttcctcagctgccaaatgggaagaatagaagaatttgcccctaaacccctcctgtgtgctggccctgtgcta

SEQ ID NO: 297640 - DNA, 2287 bp, Homo sapiens
cgcccacgaagtgatgaaacacgcagaacctcctgctttgctgaactggcagcctatgagaagacggctatgggtacacaacgccactgactgatgcgggcaaggccttctccatcgcctttgcgctcctgggcgtgccgaccaccatgctgctgctgaccgcctcagcccagcgcctgtcactgctgctgactcacgtgcccctgtcttggctgagcatgcgttggggctgggacccccggcgggcggcctgctggcacttggtggccctgttgggggtcgtagtgaccgtctgctttctggtgccggctgtgatctttgcccacctcgaggaggcctggagcttcttggatgccttctacttctgctttatctctctgtccaccatcggcctgggcgactacgtgcccggggaggcccctggccagccctaccgggccctctacaaggtgctggtcacagtctacctcttcctgggcctggtggccatggtgctggtgctgcagaccttccgccacgtgtccgacctccacggcctcacggagctcatcctgctgccccctccgtgccctgccagtttcaatgcggatgaggacgatcgggtggacatcctgggcccccagccggagtcgcaccagcaactctctgccagctcccacaccgactacgcttccatccccaggtagctggggcagcctctgccaggcttgggtgtgcctggcctgggactgaggggtccaggcgaccagagctggctgtacaggaatgtccacgagcacagcaggtgatcttgaggccttgccgtccaccgtctctcctttgtttcccagcatctggctgggatgtgaagggcagcactccctgtccccatgtcccgggctccactgggcaccaacataaccttgttctctgtcctttctctcatcctctttacactgtgtctctctggctctctggcattctcgctgcctctgtctttccctcttgctgtctctgtttctcattctctttcatgttccgtctgtgtctctcaattaaccactcgtcaactgctgattctactgggctgtgggctcagacctcatttcaggcaccagattggtcgctacaccctggacaagtgactgcccgtctctgagccttgatttcctcagctgccaaatgggaagaatagaagaatttgcccctaaacccctcctgtgtgctggccctgtgctagacagtgctggagacatagttgggggtggagaactgcccttatggagcttgcagtccagtgaggtggacagacctgtccccagacagtgatggcccaaaatggtcaggactttaatggaggaggtgaggtgttgaaagcacaggcagagtggtcagggctgaagtcggagaagcatagggactaggcccaatccagcctggaaagtcagggaggacttcctagaggaagggacatcgaactaagacctgaactatgagaaataggcaggaagaagttgtacctgactcatttttctcaggtgtctccagggagcaggacccatggagggacccctggtgtaggcctgggcgatagactcttcctcagcagcctggcaggcaggaaacagacataggaccccagcccagatctgaatggcatgggaggtgctgcccttaaccatgacaccattgtaagagctgtccacatttgtatgttgtgccctggaatcagcctggttgagctcaaatcccaacttagccacgtctggcctgtgtccttgggcagtcacactacctctctgattttgtttccttatctgtaaaatggtgatcatcataatacaacttcaaaaggatttcaggctgagtgtggtggctcacgcctatacacccagcactttggaaggctgaggaaggaggatcgcttgaggccaggagtttgagactagcctaggcaacacagtgaggccttatctcaacaacaaccacaaaatctaaaaattagctgggtgtggtggtgcatgcctgtgatcctggctacttcagaggctgaggtggaaggatcacttgaggccaggagtttgaggctgcagtgagttatgatggcactgctgcactccagcctgcgggacagagtgagaccctgtctgaaagaaagagagaaagaaagaaagaaagagagagaaagaaagaaagaaagaaagggaaagatggaaggaaggaaggaaaaagaaagagaaagagagagagagagaaagaaaaagaaagaaaagtaagaaagaaaaaagaaaaagaaagaaaagtaaga

SEQ ID NO: 297641 - DNA, 525 bp, Homo sapiens
cgcccacgaagtgatgaaacacgcagaacctcctgctttgctgaactggcagcctatgagaagacggctatgggtacacaacgccactgactgatgcgggcaaggccttctccatcgcctttgcgctcctgggcgtgccgaccaccatgctgctgctgaccgcctcagcccagcgcctgtcactgctgctgactcacgtgcccctgtcttggctgagcatgcgttggggctgggacccccggcgggcggcctgctggcacttggtggccctgttgggggtcgtagtgaccgtctgctttctggtgccggctgtgatctttgcccacctcgaggaggcctggagcttcttggatgccttctacttcgtgggcagcgctgcccacgaagtggctgccacaatgatccgcctcggactcctgcctcactcatttacaccaaccaccacaactatctataaacctagccatggccatccccttatgagcgggcgcagtataggctttcgctctaagattacatatgcca

SEQ ID NO: 297642 - DNA, 1118 bp, Homo sapiens
gttaatgttgtggaaggaagggaaacttcaggaaaggcttgctcacctcgctcggggccgcggaggtgcctggccacagtgccaccctcctgaccctgccgaggtactcggcagggcaccaccacgcatcccctcactggctgcagatcacatcagtttttcagtcagacttgttaatgtcaagggtccgtcacggtggtgataccactgtgtgacaggaagcgagagtcaacgcagggagcctgcaccctgcaaacagccacagcccttcactgaacggggagcataaatcccaccctagttagaaccatggcttttgtgcggaccagaagtgccagagccacaatataggggtgagatgtcttaccgttttgcggtgttgagtgtgtggattcccttttaagatagaaagtaggaaaactgccagtaagggagacgactcactaaaagaggattcagtctctggttgacatgttttgctgagtgtggttggttacttcaggtacagtatcacattaataggggccacagtctatatccctgtttagtttgttagttaccactcaagagcagacagatattgtccactttatcccaaatcccagccagactttgttgtatgctgtgcttcattcatggggctgtgaactactgattatattctccctattcctaatgtagaatgctttattctactgccatctttctgtctgcactgtttaattaggcttactgataacaactttaattctgaattttctttctcattcaggttctatttgtaattactaagacttaaagaatagtctggtgaaattactcaaagaattaaggaaggtttgagctaaaatgaactagagaccatctagtactttagtgtaaaatatgtttaatacaagtcgttaagtccttgtaagtgactattccaatgtttattctttgtttttggaagaatgcttggagttaccatgtttttaaatgtgaaatttcatctaaattaaaaaaaaaatctctgtgatgaggctgactcacccatttggtcaagattagtgctagctgatttgctgaacctttgcctacagaattaaagtactttctcaagttttaaaattggtgtc

SEQ ID NO: 297643 - DNA, 5493 bp, Homo sapiens
gtaagggcacccaccaggtgtaattgtgggcgagcggccgcttcggagctgacactaagcatgtgcagatcaagtccagaagcgccggggttcctcgaagcagttttcaggacttaaggctctgggacatccagcacagtgagcggcccctgggcaccaccagaaaacatttgtgggtgaacgtggagtgatgaccatgtggacactgtctttccagggtttcttggagcctctgcagagtctgggggccaggcttcttagtggaaactgcaggatcttccttctgacccctgcttgcctcgccccagcagctccggttgagtccacagatgccagctcagcttccagcttggggaagagtggggttgtcagcaggagagcctgagggctgaggcccagcgtgaacatggcagctaatggggactctcccccatggtccccggccctggctgcagagggacgtggcagctcatgtgagcgttacaggcttcagtgtcatttgaggacgtgactgtggacttcagcaaggaggagtggcagcacttggaccctgcccagagacgcctgtactgggatgtgacactagagaactacagccacctgctctcagtggggtaccaaattcccaagtcagaggctgccttcaagttggagcaaggagaggggccatggatgctggagggggaagccccacatcagagctgttcaggtgaggctattgggaaaatgcagcaacagggaattcctggaggaattttcttccactgtgagagatttgatcaacccataggagaagattcattatgttctattttagaagaactgtggcaagataatgaccagctagagcaacgtcaggaaaaccagaataaccttttaagtcatgtgaaagtattgattaaggagaggggctatgaacataaaaacattgaaaaaataattcatgtgactaccaagcttgttccttcaattaaaagactccataactgtgacacaattttgaagcatactttaaactcacataatcataatagaaacagtgcaacaaagaaccttggcaagatttttggaaatggtaacaatttcccccatagcccttcctctactaagaatgagaatgctaaaacaggagcaaattcctgtgaacatgaccactatgaaaaacatctcagccacaaacaagctcccacccaccatcagaaaattcatcctgaggagaagctttatgtgtgtactgaatgtgtaatgggcttcactcagaagtcacatctgtttgagcatcagagaattcatgctggagaaaagtcccgtgaatgtgacaaaagcaacaaagtcttcccccagaaaccccaggttgatgtacatccaagtgtttatacaggagaaaaaccctatctgtgtactcaatgtgggaaagtctttaccctcaaatcaaacctcattacacatcaaaaaattcataccgggcagaaaccctacaaatgcagtgaatgtggaaaagcctttttccagagatcagacctctttagacatctgagaattcatacaggagaaaaaccttatgaatgcagtgaatgtggaaaaggcttctcccagaactcagacctcagtatacatcagaaaactcataccggagagaaacactatgaatgcaatgaatgtgggaaggctttcacaagaaaatcagcactcaggatgcatcagagaatccacacgggagagaaaccttatgtatgcgctgactgtgggaaggccttcatccagaaatcacatttcaacacacatcagagaattcatactggagaaaagccgtatgaatgcagtgactgtgggaaatccttcactaagaagtcacaactccatgtgcatcaaagaattcacaccggagagaaaccctatatatgtacagaatgtggaaaggtcttcactcacaggacaaacctcaccacacatcagaaaactcatactggggaaaaaccctatatgtgtgctgaatgtggaaaggcttttactgaccagtcaaatctcattaaacaccagaaaactcacactggagagaaaccctataagtgcaatggctgtggaaaagccttcatatggaagtcgcgcctcaaaatacatcagaaatctcatattggagagagacactatgaatgcaaggactgcgggaaagccttcatccagaaatcaacactaagcgtgcatcagagaatccatacaggagagaaaccgtacgtttgtcctgaatgcgggaaggcctttatccagaaatcgcacttcattgcgcatcatagaatccatactggagagaagccttatgaatgcagcgactgtgggaaatgcttcactaagaagtcacaactccgtgtgcatcagaaaatccacacaggtgagaagcccaatatatgtgctgaatgtggaaaggccttcactgaccgatcaaatctcataacacatcagaaaatccacactagggagaaaccctatgaatgtggtgactgcgggaaaaccttcacctggaagtcacgcctcaatatacatcagaagtctcatactggagaaagacactatgaatgtagtaaatgtgggaaagctttcatccagaaagccacactaagtatgcatcagataattcatacaggaaagaaaccttatgcttgtacagaatgtcagaaggcctttactgacagatcgaatctcattaaacaccagaaaatgcatagtggagaaaaacgctataaagccagtgactgagaaagtcttcacctggaaatcacaactgggtatgcatcaggtatctaatagcagggaggaggaaggcctgttgctgcaatcattgtacagggggaaatgggtatgagagactgaggcttgagtgaactgaaggcaaacagagccaagtatccttcagtccactggaaagacaagttcctgcatcaccacagtgtatatgcaattctatgcataggaagagcctttagagaaagcatttgagcgaaagtcatgtttggtgacatgattcatacagacctcttgagctcctggaaatagtagaattaagacctgaggagatgactcgtcatctcttatgcttcactttttggataaagaactttttaaattcagtactgattggttcagcatatcctgggacataaaaatactcactactgggaaaaactttttcaaatttctaggttgaggagaagagttttcattgtccaaacactggcagggcactgacatcaaggcagaaaacctacttgggaatgcagatatctgtttttgtgatcattggcacttaagacatagaaaagatttccatgaaaaacttttttcttttcccttgggaagtcctcatggtatatatattttaagtgcaatggaatttttaaatttaaagatataactttatgaattgagaaattaggcctagctctaggctatgttacagaaatatagtcattgaatgatacagacatataaaggtagtagttgtctcattattaattccctgctgggagagcagatgagtcataccctataagaagtatgcatgccttctaacctatgtccccaaagctgtcatttgcataagctgcaggccatagattcctgattccctcagtaactgaccctacgacaatggaactgatccacggcactctagattttcaggctaacccaccaacacccctgctttccttgggatttcctgaaaaagaatggttgaaaaattgagtttcacttcctaatattttgtttttcttcctatttggttaaggtatattcatttcctacatgcacattaagggtagttttgtgtagactgctatgtgataaagtcatgttgcattgcaattagttattctaagacataattacagtttatcatagttgaataactggaagacttctcaagaaagagcactgctcttttttaacactgatatatagacacgttctcattttcccttaaacattttttacaatactcataaaaaggaactttctttctagcatgcaattgtatttttattttattttaaaatctttttattaaactataatgtatacagaaaatgcatatatcataaacatacagctcagtgcattctcaaaaactgaacatactcagatcaagaaacagaacatgaccagcaccccagaagccttccccactttcccttccaggcaagcccccaagggtatacattatcctggcttctcacagcatagattcattttgcctgttttgtattttatataaattgagtcaattatatatcatataattgagccatatactctttagcatctgtcttctgtcattcacattatgtatgtgagagtcatccatatgttgcatatagttgtagataattcattttcattgtcatgttgtatcccattctgtgaatatgctgcaatataatttatccattctactgtttgtagacatttgggttgtttgcagcttgggctattaggaattgtgttgctgtgtattggtgaacatatgtatgtattcctgttaggtatgtacctaagtgtatccatatgttcagctatatgttataaaaccagttttcaagtggttgtaccaatgtacactcccaccaacccagtatgcgagttctagtgctccacatacttgccaacatttggcattttccatcttttttactatagccattagtggtgggcatatagtgatatgtcagttttagttttcggttttattttcttgtcctccaaaccattgtagtatctccccaggatagatgagtgatggctgagacctgagacctaggcctgttcctcacatgactgcaccattttacattctatcaatgtatgaggtttccggtttctccacatccttaccaactcttattattattagtcttttttattatagctatcctagtacatgtgaagttatattgtgatattaatttacactgccctaatgattaataatattgatcatcttttattgagaatctttgatgaagtgtctgtttaaatcttttgcccattatcagttgggttatttgggtttttttattgttgagcactgatagtttttaaaaatatattctgggtgtaacttcactatcagtccattatccttgcaaaggttttctcccagtctctggattgtcttttcattctcttaagagtgtcttttgaagaacagaactgcttattttgatgaagtccgttctttccatttgttcatttctgggttgtgctttgagtgctgtatctaagaaatccttgcctaaccaaagattacaatgattttttcctgtgttttcttctaaaggtttaagttttacatctagatctagcatgtattttgagttatatggtgtgaaatatggatccaagttcttttatgtttttgttttgttttgttttgtttttgcttatggatattcaaatgtttccacaccatttgtttaaaaatactaccctttctcaata

SEQ ID NO: 297644 - DNA, 5790 bp, Homo sapiens
ggcctgaggccgagggcaccctgagggcggaagaggcaaagcgcctcgcccgccggggcctcggaggtgactaactcctagaggctgcggcggaggggagaagcctggtggtacattccatggcccagtgcctcggccactggaaaatcccacaggggtatatcgagtaggggaccgcgggctccgcggcagaaatgaccgcccttccaagatggcggctcccgtagagacactcccaaggagacagccatgttccttgcctgagagtcactgaaggaaattggaaagcccgcctctccttcgacgcacacgcgcacgcgcacgcacgcaccggcgcgcatccagcacagtgagcggcccctgggcaccaccagaaaacatttgtgggtgaacgtggagtgatgaccatgtggacactgtctttccagggtttcttggagcctctgcagagtctgggggccaggcttcttagtggaaactgcaggatcttccttctgacccctgcttgcctcgccccagcagctccggttgagtccacagatgccagctcagcttccagcttggggaagagtggggttgtcagcaggagagcctgagggctgaggcccagcgtgaacatggcagctaatggggactctcccccatggtccccggccctggctgcagagggacgtggcagctcatgtgaggtgaggagggagaggaccccagaggcaagaattcattcagtgaagagataccctgacctgtccccagggcctaagggcagaagcagcgttacaggcttcagtgtcatttgaggacgtgactgtggacttcagcaaggaggagtggcagcacttggaccctgcccagagacgcctgtactgggatgtgacactagagaactacagccacctgctctcagtggggtaccaaattcccaagtcagaggctgccttcaagttggagcaaggagaggggccatggatgctggagggggaagccccacatcagagctgttcaggtgaggctattgggaaaatgcagcaacagggaattcctggaggaattttcttccactgtgagagatttgatcaacccataggagaagattcattatgttctattttagaagaactgtggcaagataatgaccagctagagcaacgtcaggaaaaccagaataaccttttaagtcatgtgaaagtattgattaaggagaggggctatgaacataaaaacattgaaaaaataattcatgtgactaccaagcttgttccttcaattaaaagactccataactgtgacacaattttgaagcatactttaaactcacataatcataatagaaacagtgcaacaaagaaccttggcaagatttttggaaatggtaacaatttcccccatagcccttcctctactaagaatgagaatgctaaaacaggagcaaattcctgtgaacatgaccactatgaaaaacatctcagccacaaacaagctcccacccaccatcagaaaattcatcctgaggagaagctttatgtgtgtactgaatgtgtaatgggcttcactcagaagtcacatctgtttgagcatcagagaattcatgctggagaaaagtcccgtgaatgtgacaaaagcaacaaagtcttcccccagaaaccccaggttgatgtacatccaagtgtttatacaggagaaaaaccctatctgtgtactcaatgtgggaaagtctttaccctcaaatcaaacctcattacacatcaaaaaattcataccgggcagaaaccctacaaatgcagtgaatgtggaaaagcctttttccagagatcagacctctttagacatctgagaattcatacaggagaaaaaccttatgaatgcagtgaatgtggaaaaggcttctcccagaactcagacctcagtatacatcagaaaactcataccggagagaaacactatgaatgcaatgaatgtgggaaggctttcacaagaaaatcagcactcaggatgcatcagagaatccacacgggagagaaaccttatgtatgcgctgactgtgggaaggccttcatccagaaatcacatttcaacacacatcagagaattcatactggagaaaagccgtatgaatgcagtgactgtgggaaatccttcactaagaagtcacaactccatgtgcatcaaagaattcacaccggagagaaaccctatatatgtacagaatgtggaaaggtcttcactcacaggacaaacctcaccacacatcagaaaactcatactggggaaaaaccctatatgtgtgctgaatgtggaaaggcttttactgaccagtcaaatctcattaaacaccagaaaactcacactggagagaaaccctataagtgcaatggctgtggaaaagccttcatatggaagtcgcgcctcaaaatacatcagaaatctcatattggagagagacactatgaatgcaaggactgcgggaaagccttcatccagaaatcaacactaagcgtgcatcagagaatccatacaggagagaaaccgtacgtttgtcctgaatgcgggaaggcctttatccagaaatcgcacttcattgcgcatcatagaatccatactggagagaagccttatgaatgcagcgactgtgggaaatgcttcactaagaagtcacaactccgtgtgcatcagaaaatccacacaggtgagaagcccaatatatgtgctgaatgtggaaaggccttcactgaccgatcaaatctcataacacatcagaaaatccacactagggagaaaccctatgaatgtggtgactgcgggaaaaccttcacctggaagtcacgcctcaatatacatcagaagtctcatactggagaaagacactatgaatgtagtaaatgtgggaaagctttcatccagaaagccacactaagtatgcatcagataattcatacaggaaagaaaccttatgcttgtacagaatgtcagaaggcctttactgacagatcgaatctcattaaacaccagaaaatgcatagtggagaaaaacgctataaagccagtgactgagaaagtcttcacctggaaatcacaactgggtatgcatcaggtatctaatagcagggaggaggaaggcctgttgctgcaatcattgtacagggggaaatgggtatgagagactgaggcttgagtgaactgaaggcaaacagagccaagtatccttcagtccactggaaagacaagttcctgcatcaccacagtgtatatgcaattctatgcataggaagagcctttagagaaagcatttgagcgaaagtcatgtttggtgacatgattcatacagacctcttgagctcctggaaatagtagaattaagacctgaggagatgactcgtcatctcttatgcttcactttttggataaagaactttttaaattcagtactgattggttcagcatatcctgggacataaaaatactcactactgggaaaaactttttcaaatttctaggttgaggagaagagttttcattgtccaaacactggcagggcactgacatcaaggcagaaaacctacttgggaatgcagatatctgtttttgtgatcattggcacttaagacatagaaaagatttccatgaaaaacttttttcttttcccttgggaagtcctcatggtatatatattttaagtgcaatggaatttttaaatttaaagatataactttatgaattgagaaattaggcctagctctaggctatgttacagaaatatagtcattgaatgatacagacatataaaggtagtagttgtctcattattaattccctgctgggagagcagatgagtcataccctataagaagtatgcatgccttctaacctatgtccccaaagctgtcatttgcataagctgcaggccatagattcctgattccctcagtaactgaccctacgacaatggaactgatccacggcactctagattttcaggctaacccaccaacacccctgctttccttgggatttcctgaaaaagaatggttgaaaaattgagtttcacttcctaatattttgtttttcttcctatttggttaaggtatattcatttcctacatgcacattaagggtagttttgtgtagactgctatgtgataaagtcatgttgcattgcaattagttattctaagacataattacagtttatcatagttgaataactggaagacttctcaagaaagagcactgctcttttttaacactgatatatagacacgttctcattttcccttaaacattttttacaatactcataaaaaggaactttctttctagcatgcaattgtatttttattttattttaaaatctttttattaaactataatgtatacagaaaatgcatatatcataaacatacagctcagtgcattctcaaaaactgaacatactcagatcaagaaacagaacatgaccagcaccccagaagccttccccactttcccttccaggcaagcccccaagggtatacattatcctggcttctcacagcatagattcattttgcctgttttgtattttatataaattgagtcaattatatatcatataattgagccatatactctttagcatctgtcttctgtcattcacattatgtatgtgagagtcatccatatgttgcatatagttgtagataattcattttcattgtcatgttgtatcccattctgtgaatatgctgcaatataatttatccattctactgtttgtagacatttgggttgtttgcagcttgggctattaggaattgtgttgctgtgtattggtgaacatatgtatgtattcctgttaggtatgtacctaagtgtatccatatgttcagctatatgttataaaaccagttttcaagtggttgtaccaatgtacactcccaccaacccagtatgcgagttctagtgctccacatacttgccaacatttggcattttccatcttttttactatagccattagtggtgggcatatagtgatatgtcagttttagttttcggttttattttcttgtcctccaaaccattgtagtatctccccaggatagatgagtgatggctgagacctgagacctaggcctgttcctcacatgactgcaccattttacattctatcaatgtatgaggtttccggtttctccacatccttaccaactcttattattattagtcttttttattatagctatcctagtacatgtgaagttatattgtgatattaatttacactgccctaatgattaataatattgatcatcttttattgagaatctttgatgaagtgtctgtttaaatcttttgcccattatcagttgggttatttgggtttttttattgttgagcactgatagtttttaaaaatatattctgggtgtaacttcactatcagtccattatccttgcaaaggttttctcccagtctctggattgtcttttcattctcttaagagtgtcttttgaagaacagaactgcttattttgatgaagtccgttctttccatttgttcatttctgggttgtgctttgagtgctgtatctaagaaatccttgcctaaccaaagattacaatgattttttcctgtgttttcttctaaaggtttaagttttacatctagatctagcatgtattttgagttatatggtgtgaaatatggatccaagttcttttatgtttttgttttgttttgttttgtttttgcttatggatattcaaatgtttccacaccatttgtttaaaaatactaccctttctcaata

SEQ ID NO: 297645 - DNA, 5385 bp, Homo sapiens
gtaagggcacccaccaggtgtaattgtgggcgagcggccgcttcggagctgacactaagcatgtgcagatcaagtccagaagcgccggggttcctcgaagcagttttcaggacttaaggctctgggacatccagcacagtgagcggcccctgggcaccaccagaaaacatttgtgggtgaacgtggagtgatgaccatgtggacactgtctttccagggtttcttggagcctctgcagagtctgggggccaggcttcttagtggaaactgcaggatcttccttctgacccctgcttgcctcgccccagcagctccggttgagtccacagatgccagctcagcttccagcttggggaagagtggggttgtcagcaggagagcctgagggctgaggcccagcgtgaacatggcagctaatggggactctcccccatggtccccggccctggctgcagagggacgtggcagctcatgtgagcgttacaggcttcagtgtcatttgaggacgtgactgtggacttcagcaaggaggagtggcagcacttggaccctgcccagagacgcctgtactgggatgtgacactagagaactacagccacctgctctcagtggggtaccaaattcccaagtcagaggctgccttcaagttggagcaaggagaggggccatggatgctggagggggaagccccacatcagagctgttcagaagaactgtggcaagataatgaccagctagagcaacgtcaggaaaaccagaataaccttttaagtcatgtgaaagtattgattaaggagaggggctatgaacataaaaacattgaaaaaataattcatgtgactaccaagcttgttccttcaattaaaagactccataactgtgacacaattttgaagcatactttaaactcacataatcataatagaaacagtgcaacaaagaaccttggcaagatttttggaaatggtaacaatttcccccatagcccttcctctactaagaatgagaatgctaaaacaggagcaaattcctgtgaacatgaccactatgaaaaacatctcagccacaaacaagctcccacccaccatcagaaaattcatcctgaggagaagctttatgtgtgtactgaatgtgtaatgggcttcactcagaagtcacatctgtttgagcatcagagaattcatgctggagaaaagtcccgtgaatgtgacaaaagcaacaaagtcttcccccagaaaccccaggttgatgtacatccaagtgtttatacaggagaaaaaccctatctgtgtactcaatgtgggaaagtctttaccctcaaatcaaacctcattacacatcaaaaaattcataccgggcagaaaccctacaaatgcagtgaatgtggaaaagcctttttccagagatcagacctctttagacatctgagaattcatacaggagaaaaaccttatgaatgcagtgaatgtggaaaaggcttctcccagaactcagacctcagtatacatcagaaaactcataccggagagaaacactatgaatgcaatgaatgtgggaaggctttcacaagaaaatcagcactcaggatgcatcagagaatccacacgggagagaaaccttatgtatgcgctgactgtgggaaggccttcatccagaaatcacatttcaacacacatcagagaattcatactggagaaaagccgtatgaatgcagtgactgtgggaaatccttcactaagaagtcacaactccatgtgcatcaaagaattcacaccggagagaaaccctatatatgtacagaatgtggaaaggtcttcactcacaggacaaacctcaccacacatcagaaaactcatactggggaaaaaccctatatgtgtgctgaatgtggaaaggcttttactgaccagtcaaatctcattaaacaccagaaaactcacactggagagaaaccctataagtgcaatggctgtggaaaagccttcatatggaagtcgcgcctcaaaatacatcagaaatctcatattggagagagacactatgaatgcaaggactgcgggaaagccttcatccagaaatcaacactaagcgtgcatcagagaatccatacaggagagaaaccgtacgtttgtcctgaatgcgggaaggcctttatccagaaatcgcacttcattgcgcatcatagaatccatactggagagaagccttatgaatgcagcgactgtgggaaatgcttcactaagaagtcacaactccgtgtgcatcagaaaatccacacaggtgagaagcccaatatatgtgctgaatgtggaaaggccttcactgaccgatcaaatctcataacacatcagaaaatccacactagggagaaaccctatgaatgtggtgactgcgggaaaaccttcacctggaagtcacgcctcaatatacatcagaagtctcatactggagaaagacactatgaatgtagtaaatgtgggaaagctttcatccagaaagccacactaagtatgcatcagataattcatacaggaaagaaaccttatgcttgtacagaatgtcagaaggcctttactgacagatcgaatctcattaaacaccagaaaatgcatagtggagaaaaacgctataaagccagtgactgagaaagtcttcacctggaaatcacaactgggtatgcatcaggtatctaatagcagggaggaggaaggcctgttgctgcaatcattgtacagggggaaatgggtatgagagactgaggcttgagtgaactgaaggcaaacagagccaagtatccttcagtccactggaaagacaagttcctgcatcaccacagtgtatatgcaattctatgcataggaagagcctttagagaaagcatttgagcgaaagtcatgtttggtgacatgattcatacagacctcttgagctcctggaaatagtagaattaagacctgaggagatgactcgtcatctcttatgcttcactttttggataaagaactttttaaattcagtactgattggttcagcatatcctgggacataaaaatactcactactgggaaaaactttttcaaatttctaggttgaggagaagagttttcattgtccaaacactggcagggcactgacatcaaggcagaaaacctacttgggaatgcagatatctgtttttgtgatcattggcacttaagacatagaaaagatttccatgaaaaacttttttcttttcccttgggaagtcctcatggtatatatattttaagtgcaatggaatttttaaatttaaagatataactttatgaattgagaaattaggcctagctctaggctatgttacagaaatatagtcattgaatgatacagacatataaaggtagtagttgtctcattattaattccctgctgggagagcagatgagtcataccctataagaagtatgcatgccttctaacctatgtccccaaagctgtcatttgcataagctgcaggccatagattcctgattccctcagtaactgaccctacgacaatggaactgatccacggcactctagattttcaggctaacccaccaacacccctgctttccttgggatttcctgaaaaagaatggttgaaaaattgagtttcacttcctaatattttgtttttcttcctatttggttaaggtatattcatttcctacatgcacattaagggtagttttgtgtagactgctatgtgataaagtcatgttgcattgcaattagttattctaagacataattacagtttatcatagttgaataactggaagacttctcaagaaagagcactgctcttttttaacactgatatatagacacgttctcattttcccttaaacattttttacaatactcataaaaaggaactttctttctagcatgcaattgtatttttattttattttaaaatctttttattaaactataatgtatacagaaaatgcatatatcataaacatacagctcagtgcattctcaaaaactgaacatactcagatcaagaaacagaacatgaccagcaccccagaagccttccccactttcccttccaggcaagcccccaagggtatacattatcctggcttctcacagcatagattcattttgcctgttttgtattttatataaattgagtcaattatatatcatataattgagccatatactctttagcatctgtcttctgtcattcacattatgtatgtgagagtcatccatatgttgcatatagttgtagataattcattttcattgtcatgttgtatcccattctgtgaatatgctgcaatataatttatccattctactgtttgtagacatttgggttgtttgcagcttgggctattaggaattgtgttgctgtgtattggtgaacatatgtatgtattcctgttaggtatgtacctaagtgtatccatatgttcagctatatgttataaaaccagttttcaagtggttgtaccaatgtacactcccaccaacccagtatgcgagttctagtgctccacatacttgccaacatttggcattttccatcttttttactatagccattagtggtgggcatatagtgatatgtcagttttagttttcggttttattttcttgtcctccaaaccattgtagtatctccccaggatagatgagtgatggctgagacctgagacctaggcctgttcctcacatgactgcaccattttacattctatcaatgtatgaggtttccggtttctccacatccttaccaactcttattattattagtcttttttattatagctatcctagtacatgtgaagttatattgtgatattaatttacactgccctaatgattaataatattgatcatcttttattgagaatctttgatgaagtgtctgtttaaatcttttgcccattatcagttgggttatttgggtttttttattgttgagcactgatagtttttaaaaatatattctgggtgtaacttcactatcagtccattatccttgcaaaggttttctcccagtctctggattgtcttttcattctcttaagagtgtcttttgaagaacagaactgcttattttgatgaagtccgttctttccatttgttcatttctgggttgtgctttgagtgctgtatctaagaaatccttgcctaaccaaagattacaatgattttttcctgtgttttcttctaaaggtttaagttttacatctagatctagcatgtattttgagttatatggtgtgaaatatggatccaagttcttttatgtttttgttttgttttgttttgtttttgcttatggatattcaaatgtttccacaccatttgtttaaaaatactaccctttctcaata

SEQ ID NO: 297646 - DNA, 5822 bp, Homo sapiens
ggcctgaggccgagggcaccctgagggcggaagaggcaaagcgcctcgcccgccggggcctcggaggtgactaactcctagaggctgcggcggaggggagaagcctggtggtacattccatggcccagtgcctcggccactggaaaatcccacaggggtatatcgagtaggggaccgcgggctccgcggcagaaatgaccgcccttccaagatggcggctcccgtagagacactcccaaggagacagccatgttccttgcctgagagtcactgaaggaaattggaaagcccgcctctccttcgacgcacacgcgcacgcgcacgcacgcaccggcgcgcatccagcacagtgagcggcccctgggcaccaccagaaaacatttgtgggtgaacgtggagtgatgaccatgtggacactgtctttccagggtttcttggagcctctgcagagtctgggggccaggcttcttagtggaaactgcaggatcttccttctgacccctgcttgcctcgccccagcagctccggttgagtccacagatgccagctcagcttccagcttggggaagagtggggttgtcagcaggagagcctgagggctgaggcccagcgtgaacatggcagctaatggggactctcccccatggtccccggccctggctgcagagggacgtggcagctcatgtgaggtgaggagggagaggaccccagaggcaagaattcattcagtgaagagataccctgacctgtccccagggcctaagggcagaagcagtgctgaccatgctgccttgaacagcattgtgtcgttacaggcttcagtgtcatttgaggacgtgactgtggacttcagcaaggaggagtggcagcacttggaccctgcccagagacgcctgtactgggatgtgacactagagaactacagccacctgctctcagtggggtaccaaattcccaagtcagaggctgccttcaagttggagcaaggagaggggccatggatgctggagggggaagccccacatcagagctgttcaggtgaggctattgggaaaatgcagcaacagggaattcctggaggaattttcttccactgtgagagatttgatcaacccataggagaagattcattatgttctattttagaagaactgtggcaagataatgaccagctagagcaacgtcaggaaaaccagaataaccttttaagtcatgtgaaagtattgattaaggagaggggctatgaacataaaaacattgaaaaaataattcatgtgactaccaagcttgttccttcaattaaaagactccataactgtgacacaattttgaagcatactttaaactcacataatcataatagaaacagtgcaacaaagaaccttggcaagatttttggaaatggtaacaatttcccccatagcccttcctctactaagaatgagaatgctaaaacaggagcaaattcctgtgaacatgaccactatgaaaaacatctcagccacaaacaagctcccacccaccatcagaaaattcatcctgaggagaagctttatgtgtgtactgaatgtgtaatgggcttcactcagaagtcacatctgtttgagcatcagagaattcatgctggagaaaagtcccgtgaatgtgacaaaagcaacaaagtcttcccccagaaaccccaggttgatgtacatccaagtgtttatacaggagaaaaaccctatctgtgtactcaatgtgggaaagtctttaccctcaaatcaaacctcattacacatcaaaaaattcataccgggcagaaaccctacaaatgcagtgaatgtggaaaagcctttttccagagatcagacctctttagacatctgagaattcatacaggagaaaaaccttatgaatgcagtgaatgtggaaaaggcttctcccagaactcagacctcagtatacatcagaaaactcataccggagagaaacactatgaatgcaatgaatgtgggaaggctttcacaagaaaatcagcactcaggatgcatcagagaatccacacgggagagaaaccttatgtatgcgctgactgtgggaaggccttcatccagaaatcacatttcaacacacatcagagaattcatactggagaaaagccgtatgaatgcagtgactgtgggaaatccttcactaagaagtcacaactccatgtgcatcaaagaattcacaccggagagaaaccctatatatgtacagaatgtggaaaggtcttcactcacaggacaaacctcaccacacatcagaaaactcatactggggaaaaaccctatatgtgtgctgaatgtggaaaggcttttactgaccagtcaaatctcattaaacaccagaaaactcacactggagagaaaccctataagtgcaatggctgtggaaaagccttcatatggaagtcgcgcctcaaaatacatcagaaatctcatattggagagagacactatgaatgcaaggactgcgggaaagccttcatccagaaatcaacactaagcgtgcatcagagaatccatacaggagagaaaccgtacgtttgtcctgaatgcgggaaggcctttatccagaaatcgcacttcattgcgcatcatagaatccatactggagagaagccttatgaatgcagcgactgtgggaaatgcttcactaagaagtcacaactccgtgtgcatcagaaaatccacacaggtgagaagcccaatatatgtgctgaatgtggaaaggccttcactgaccgatcaaatctcataacacatcagaaaatccacactagggagaaaccctatgaatgtggtgactgcgggaaaaccttcacctggaagtcacgcctcaatatacatcagaagtctcatactggagaaagacactatgaatgtagtaaatgtgggaaagctttcatccagaaagccacactaagtatgcatcagataattcatacaggaaagaaaccttatgcttgtacagaatgtcagaaggcctttactgacagatcgaatctcattaaacaccagaaaatgcatagtggagaaaaacgctataaagccagtgactgagaaagtcttcacctggaaatcacaactgggtatgcatcaggtatctaatagcagggaggaggaaggcctgttgctgcaatcattgtacagggggaaatgggtatgagagactgaggcttgagtgaactgaaggcaaacagagccaagtatccttcagtccactggaaagacaagttcctgcatcaccacagtgtatatgcaattctatgcataggaagagcctttagagaaagcatttgagcgaaagtcatgtttggtgacatgattcatacagacctcttgagctcctggaaatagtagaattaagacctgaggagatgactcgtcatctcttatgcttcactttttggataaagaactttttaaattcagtactgattggttcagcatatcctgggacataaaaatactcactactgggaaaaactttttcaaatttctaggttgaggagaagagttttcattgtccaaacactggcagggcactgacatcaaggcagaaaacctacttgggaatgcagatatctgtttttgtgatcattggcacttaagacatagaaaagatttccatgaaaaacttttttcttttcccttgggaagtcctcatggtatatatattttaagtgcaatggaatttttaaatttaaagatataactttatgaattgagaaattaggcctagctctaggctatgttacagaaatatagtcattgaatgatacagacatataaaggtagtagttgtctcattattaattccctgctgggagagcagatgagtcataccctataagaagtatgcatgccttctaacctatgtccccaaagctgtcatttgcataagctgcaggccatagattcctgattccctcagtaactgaccctacgacaatggaactgatccacggcactctagattttcaggctaacccaccaacacccctgctttccttgggatttcctgaaaaagaatggttgaaaaattgagtttcacttcctaatattttgtttttcttcctatttggttaaggtatattcatttcctacatgcacattaagggtagttttgtgtagactgctatgtgataaagtcatgttgcattgcaattagttattctaagacataattacagtttatcatagttgaataactggaagacttctcaagaaagagcactgctcttttttaacactgatatatagacacgttctcattttcccttaaacattttttacaatactcataaaaaggaactttctttctagcatgcaattgtatttttattttattttaaaatctttttattaaactataatgtatacagaaaatgcatatatcataaacatacagctcagtgcattctcaaaaactgaacatactcagatcaagaaacagaacatgaccagcaccccagaagccttccccactttcccttccaggcaagcccccaagggtatacattatcctggcttctcacagcatagattcattttgcctgttttgtattttatataaattgagtcaattatatatcatataattgagccatatactctttagcatctgtcttctgtcattcacattatgtatgtgagagtcatccatatgttgcatatagttgtagataattcattttcattgtcatgttgtatcccattctgtgaatatgctgcaatataatttatccattctactgtttgtagacatttgggttgtttgcagcttgggctattaggaattgtgttgctgtgtattggtgaacatatgtatgtattcctgttaggtatgtacctaagtgtatccatatgttcagctatatgttataaaaccagttttcaagtggttgtaccaatgtacactcccaccaacccagtatgcgagttctagtgctccacatacttgccaacatttggcattttccatcttttttactatagccattagtggtgggcatatagtgatatgtcagttttagttttcggttttattttcttgtcctccaaaccattgtagtatctccccaggatagatgagtgatggctgagacctgagacctaggcctgttcctcacatgactgcaccattttacattctatcaatgtatgaggtttccggtttctccacatccttaccaactcttattattattagtcttttttattatagctatcctagtacatgtgaagttatattgtgatattaatttacactgccctaatgattaataatattgatcatcttttattgagaatctttgatgaagtgtctgtttaaatcttttgcccattatcagttgggttatttgggtttttttattgttgagcactgatagtttttaaaaatatattctgggtgtaacttcactatcagtccattatccttgcaaaggttttctcccagtctctggattgtcttttcattctcttaagagtgtcttttgaagaacagaactgcttattttgatgaagtccgttctttccatttgttcatttctgggttgtgctttgagtgctgtatctaagaaatccttgcctaaccaaagattacaatgattttttcctgtgttttcttctaaaggtttaagttttacatctagatctagcatgtattttgagttatatggtgtgaaatatggatccaagttcttttatgtttttgttttgttttgttttgtttttgcttatggatattcaaatgtttccacaccatttgtttaaaaatactaccctttctcaata

SEQ ID NO: 297647 - DNA, 5736 bp, Homo sapiens
ggcctgaggccgagggcaccctgagggcggaagaggcaaagcgcctcgcccgccggggcctcggaggtgactaactcctagaggctgcggcggaggggagaagcctggtggtacattccatggcccagtgcctcggccactggaaaatcccacaggggtatatcgagtaggggaccgcgggctccgcggcagaaatgaccgcccttccaagatggcggctcccgtagagacactcccaaggagacagccatgttccttgcctgagagtcactgaaggaaattggaaagcccgcctctccttcgacgcacacgcgcacgcgcacgcacgcaccggcgcgcatccagcacagtgagcggcccctgggcaccaccagaaaacatttgtgggtgaacgtggagtgatgaccatgtggacactgtctttccagggtttcttggagcctctgcagagtctgggggccaggcttcttagtggaaactgcaggatcttccttctgacccctgcttgcctcgccccagcagctccggttgagtccacagatgccagctcagcttccagcttggggaagagtggggttgtcagcaggagagcctgagggctgaggcccagcgtgaacatggcagctaatggggactctcccccatggtccccggccctggctgcagagggacgtggcagctcatgtgagtgctgaccatgctgccttgaacagcattgtgtcgttacaggcttcagtgtcatttgaggacgtgactgtggacttcagcaaggaggagtggcagcacttggaccctgcccagagacgcctgtactgggatgtgacactagagaactacagccacctgctctcagtggggtaccaaattcccaagtcagaggctgccttcaagttggagcaaggagaggggccatggatgctggagggggaagccccacatcagagctgttcaggtgaggctattgggaaaatgcagcaacagggaattcctggaggaattttcttccactgtgagagatttgatcaacccataggagaagattcattatgttctattttagaagaactgtggcaagataatgaccagctagagcaacgtcaggaaaaccagaataaccttttaagtcatgtgaaagtattgattaaggagaggggctatgaacataaaaacattgaaaaaataattcatgtgactaccaagcttgttccttcaattaaaagactccataactgtgacacaattttgaagcatactttaaactcacataatcataatagaaacagtgcaacaaagaaccttggcaagatttttggaaatggtaacaatttcccccatagcccttcctctactaagaatgagaatgctaaaacaggagcaaattcctgtgaacatgaccactatgaaaaacatctcagccacaaacaagctcccacccaccatcagaaaattcatcctgaggagaagctttatgtgtgtactgaatgtgtaatgggcttcactcagaagtcacatctgtttgagcatcagagaattcatgctggagaaaagtcccgtgaatgtgacaaaagcaacaaagtcttcccccagaaaccccaggttgatgtacatccaagtgtttatacaggagaaaaaccctatctgtgtactcaatgtgggaaagtctttaccctcaaatcaaacctcattacacatcaaaaaattcataccgggcagaaaccctacaaatgcagtgaatgtggaaaagcctttttccagagatcagacctctttagacatctgagaattcatacaggagaaaaaccttatgaatgcagtgaatgtggaaaaggcttctcccagaactcagacctcagtatacatcagaaaactcataccggagagaaacactatgaatgcaatgaatgtgggaaggctttcacaagaaaatcagcactcaggatgcatcagagaatccacacgggagagaaaccttatgtatgcgctgactgtgggaaggccttcatccagaaatcacatttcaacacacatcagagaattcatactggagaaaagccgtatgaatgcagtgactgtgggaaatccttcactaagaagtcacaactccatgtgcatcaaagaattcacaccggagagaaaccctatatatgtacagaatgtggaaaggtcttcactcacaggacaaacctcaccacacatcagaaaactcatactggggaaaaaccctatatgtgtgctgaatgtggaaaggcttttactgaccagtcaaatctcattaaacaccagaaaactcacactggagagaaaccctataagtgcaatggctgtggaaaagccttcatatggaagtcgcgcctcaaaatacatcagaaatctcatattggagagagacactatgaatgcaaggactgcgggaaagccttcatccagaaatcaacactaagcgtgcatcagagaatccatacaggagagaaaccgtacgtttgtcctgaatgcgggaaggcctttatccagaaatcgcacttcattgcgcatcatagaatccatactggagagaagccttatgaatgcagcgactgtgggaaatgcttcactaagaagtcacaactccgtgtgcatcagaaaatccacacaggtgagaagcccaatatatgtgctgaatgtggaaaggccttcactgaccgatcaaatctcataacacatcagaaaatccacactagggagaaaccctatgaatgtggtgactgcgggaaaaccttcacctggaagtcacgcctcaatatacatcagaagtctcatactggagaaagacactatgaatgtagtaaatgtgggaaagctttcatccagaaagccacactaagtatgcatcagataattcatacaggaaagaaaccttatgcttgtacagaatgtcagaaggcctttactgacagatcgaatctcattaaacaccagaaaatgcatagtggagaaaaacgctataaagccagtgactgagaaagtcttcacctggaaatcacaactgggtatgcatcaggtatctaatagcagggaggaggaaggcctgttgctgcaatcattgtacagggggaaatgggtatgagagactgaggcttgagtgaactgaaggcaaacagagccaagtatccttcagtccactggaaagacaagttcctgcatcaccacagtgtatatgcaattctatgcataggaagagcctttagagaaagcatttgagcgaaagtcatgtttggtgacatgattcatacagacctcttgagctcctggaaatagtagaattaagacctgaggagatgactcgtcatctcttatgcttcactttttggataaagaactttttaaattcagtactgattggttcagcatatcctgggacataaaaatactcactactgggaaaaactttttcaaatttctaggttgaggagaagagttttcattgtccaaacactggcagggcactgacatcaaggcagaaaacctacttgggaatgcagatatctgtttttgtgatcattggcacttaagacatagaaaagatttccatgaaaaacttttttcttttcccttgggaagtcctcatggtatatatattttaagtgcaatggaatttttaaatttaaagatataactttatgaattgagaaattaggcctagctctaggctatgttacagaaatatagtcattgaatgatacagacatataaaggtagtagttgtctcattattaattccctgctgggagagcagatgagtcataccctataagaagtatgcatgccttctaacctatgtccccaaagctgtcatttgcataagctgcaggccatagattcctgattccctcagtaactgaccctacgacaatggaactgatccacggcactctagattttcaggctaacccaccaacacccctgctttccttgggatttcctgaaaaagaatggttgaaaaattgagtttcacttcctaatattttgtttttcttcctatttggttaaggtatattcatttcctacatgcacattaagggtagttttgtgtagactgctatgtgataaagtcatgttgcattgcaattagttattctaagacataattacagtttatcatagttgaataactggaagacttctcaagaaagagcactgctcttttttaacactgatatatagacacgttctcattttcccttaaacattttttacaatactcataaaaaggaactttctttctagcatgcaattgtatttttattttattttaaaatctttttattaaactataatgtatacagaaaatgcatatatcataaacatacagctcagtgcattctcaaaaactgaacatactcagatcaagaaacagaacatgaccagcaccccagaagccttccccactttcccttccaggcaagcccccaagggtatacattatcctggcttctcacagcatagattcattttgcctgttttgtattttatataaattgagtcaattatatatcatataattgagccatatactctttagcatctgtcttctgtcattcacattatgtatgtgagagtcatccatatgttgcatatagttgtagataattcattttcattgtcatgttgtatcccattctgtgaatatgctgcaatataatttatccattctactgtttgtagacatttgggttgtttgcagcttgggctattaggaattgtgttgctgtgtattggtgaacatatgtatgtattcctgttaggtatgtacctaagtgtatccatatgttcagctatatgttataaaaccagttttcaagtggttgtaccaatgtacactcccaccaacccagtatgcgagttctagtgctccacatacttgccaacatttggcattttccatcttttttactatagccattagtggtgggcatatagtgatatgtcagttttagttttcggttttattttcttgtcctccaaaccattgtagtatctccccaggatagatgagtgatggctgagacctgagacctaggcctgttcctcacatgactgcaccattttacattctatcaatgtatgaggtttccggtttctccacatccttaccaactcttattattattagtcttttttattatagctatcctagtacatgtgaagttatattgtgatattaatttacactgccctaatgattaataatattgatcatcttttattgagaatctttgatgaagtgtctgtttaaatcttttgcccattatcagttgggttatttgggtttttttattgttgagcactgatagtttttaaaaatatattctgggtgtaacttcactatcagtccattatccttgcaaaggttttctcccagtctctggattgtcttttcattctcttaagagtgtcttttgaagaacagaactgcttattttgatgaagtccgttctttccatttgttcatttctgggttgtgctttgagtgctgtatctaagaaatccttgcctaaccaaagattacaatgattttttcctgtgttttcttctaaaggtttaagttttacatctagatctagcatgtattttgagttatatggtgtgaaatatggatccaagttcttttatgtttttgttttgttttgttttgtttttgcttatggatattcaaatgtttccacaccatttgtttaaaaatactaccctttctcaata

SEQ ID NO: 297648 - DNA, 2043 bp, Homo sapiens
ctaaaaaagaaaaagcaaaaagaagatacttctcactaatgtaaagatggtaaagaagaaccatcatttactgagaacctagctgataatcggcacaaggctagatgttataaatatattaactccaaaacatatataatctgaggaaactccaaagcctccaagttttctatagcatcttcctgagaatacttcaaacttcacacttaaaaaaattcctccttcacaatgtccaaataatttaacattctgatctttatgacttcaaatgtgatactgaaatggtattcttggaaaatgattaagaatgagggaagactgggcatggtggcacatggctgtaatctcagctactcaggaggctgaggcaggagaattgcttgaacctgggggcgtaggttacagtgagccgagatggcgtcactgcactccagcctgggagacagagcaagactgtctcggggggaaaaaaatacaaaaagtagccaggtgtggtagcgcatgctgtaatcccagctacttggatggctgaggcataagaatcacaagtatgaaattgcgttgcaagaaagcagtgggcaagtcagaaagaagggagctgactgtgaggagacaaaggcttgctgtggattttataggatggtgttcgtgctgttttctggagagagctatgtgcagtactgataatgccaaggttgcagtgagctaatttgcatttttctatcagccgagggtctgatgatagctgggcgcaggaagattgtgacttatttacgcaggaggattatgtgtcctggaccatgaagaaaggcagacttacagcttatgtgctttctctttgcttttccttggtcccaccagcctgactccttttccctaattaggactccacatttaaaaatatattgttgattataatacagtgagtaattgtacctgtatttgtctggtgctcaccttgttcagaattgttttcctatgccatcttgttttatgggcaccatccagcagaggaaccagttttgttgctagaaattagtgattgatctggagcaaaacttgggttctgcccacgaggtttgccctatctattctaggcatggatggactgtccagggagtgccatattctgaggtaggtcagcagaaaaacaaaggtgtgacttcccctagtcggtaattacttatgtgctgaacacccaggtctgctaaatcagaatctccaggttttagcagaaaagctcctaagataattctgctgggcagttagaaaaaaaagaaggaaatgaaaaaggaaaagtgagaagacaaggaaagttaaccctgcattgtcttctgtggctagatggtcagcaagacagatggcctccagaatgagcaatgggccatcagcagacctgccggaagtagggttcagccacatgccatttatggcatggctgccctggtgttggtcaggggcttgattctttctgccagacaacaaaccagcccgtccactggctaacttagtgagaaggagctgtggacaccctggaccctgagggtggcgatcaggtcacccctgccctggagagatgtctatgtggggaagtgcccagaggagggaaggtgagcagctgctgcaggtggcccctaggcagtgtctgacaccacaccctgggggcttaaggaccttggctatttcctgtgttctgactgtattctgaataccaagagaatatttaccttttaaaaattgcttccatggctgggcgcggtggttcacgtctgtaatcccagcactttgggaggctgaggcgggtggatcacgaggtcaggagatcgagaccatcctggctaacatggtgaaaccccgtctctactaaaaaatacaaaaaaattagccgggcgtggtcgtgggcgcctgtagtcccagctactcgggaggctgaagcaggagaatggcgtgaacccaggaggcagagcttgcagtgagtcgagatcacgccactgcactccagcctgggcaacagagcgagactctgtctcaaaaaaaaaaaaa

SEQ ID NO: 297649 - DNA, 1748 bp, Homo sapiens
  misc_feature (1)..(1): n is a, c, g, or t
nctcttctccctgacatcttctcccctacaaaaaataaaataaagctgggtatgatggttcacacctatctataatcccagcactttgggaggccaatgtgggaggatccctttattccaggagtttgagagtggcctggacaacatagcaagatgtcatctctccaaaaataataataataaaaagtagccaggtgtggtagcgcatgctgtaatcccagctacttggatggctgaggcataagaatcacaagtatgaaattgcgttgcaagaaagcagtgggcaagtcagaaagaagggagctgactgtgaggagacaaaggcttgctgtggattttataggatggtgttcgtgctgttttctggagagagctatgtgcagtactgataatgccaaggttgcagtgagctaatttgcatttttctatcagccgagggtctgatgatagctgggcgcaggaagattgtgacttatttacgcaggaggattatgtgtcctggaccatgaagaaaggcagacttacagcttatgtgctttctctttgcttttccttggtcccaccagcctgactccttttccctaattaggactccacatttaaaaatatattgttgattataatacagtgagtaattgtacctgtatttgtctggtgctcaccttgttcagaattgttttcctatgccatcttgttttatgggcaccatccagcagaggaaccagttttgttgctagaaattagtgattgatctggagcaaaacttgggttctgcccacgaggtttgccctatctattctaggcatggatggactgtccagggagtgccatattctgaggtaggtcagcagaaaaacaaaggtgtgacttcccctagtcggtaattacttatgtgctgaacacccaggtctgctaaatcagaatctccaggttttagcagaaaagctcctaagataattctgctgggcagttagaaaaaaaagaaggaaatgaaaaaggaaaagtgagaagacaaggaaagttaaccctgcattgtcttctgtggctagatggtcagcaagacagatggcctccagaatgagcaatgggccatcagcagacctgccggaagtagggttcagccacatgccatttatggcatggctgccctggtgttggtcaggggcttgattctttctgccagacaacaaaccagcccgtccactggctaacttagtgagaaggagctgtggacaccctggaccctgagggtggcgatcaggtcacccctgccctggagagatgtctatgtggggaagtgcccagaggagggaaggtgagcagctgctgcaggtggcccctaggcagtgtctgacaccacaccctgggggcttaaggaccttggctatttcctgtgttctgactgtattctgaataccaagagaatatttaccttttaaaaattgcttccatggctgggcgcggtggttcacgtctgtaatcccagcactttgggaggctgaggcgggtggatcacgaggtcaggagatcgagaccatcctggctaacatggtgaaaccccgtctctactaaaaaatacaaaaaaattagccgggcgtggtcgtgggcgcctgtagtcccagctactcgggaggctgaagcaggagaatggcgtgaacccaggaggcagagcttgcagtgagtcgagatcacgccactgcactccagcctgggcaacagagcgagactctgtctcaaaaaaaaaaaaa

SEQ ID NO: 297650 - DNA, 1542 bp, Homo sapiens
agcggacttccggcgggtgacgcgcccgggttcggctacaaaagaggacggctgcggcgcgccgggcggaactttccagaacgctcggtgagaggcggaggagcggtaactaccccggctgcgcacagctcggcgctccttcccgctccctcacacaccggcctcagcccgcaccggcagtagaagatggtgaaagaaacaacttactacgatgttttgggggtcaaacccaatgctactcaggaagaattgaaaaaggcttataggaaactggctttgaagtaccatcctgataagaacccaaatgaaggagagaagtttaaacagatttctcaagcttacgaagttctctctgatgcaaagaaaagggaattatatgacaaaggaggagaacaggcaattaaagagggtggagcaggtggcggttttggctcccccatggacatctttgatatgttttttggaggaggaggaaggatgcagagagaaaggagaggtaaaaatgttgtacatcagctctcagtaaccctagaagacttatataatggtgcaacaagaaaactggctctgcaaaagaatgtgatttgtgacaaatgtgaaggtagaggaggtaagaaaggagcagtagagtgctgtcccaattgccgaggtactggaatgcaaataagaattcatcagataggacctggaatggttcagcaaattcagtctgtgtgcatggagtgccagggccatggggagcggatcagtcctaaagatagatgtaaaagctgcaacggaaggaagatagttcgagagaagaaaattttagaagttcatattgacaaaggcatgaaagatggccagaagataacattccatggtgaaggagaccaagaaccaggactggagccaggcgatattatcattgtgttagatcagaaggaccatgctgtttttactcgacgaggagaagaccttttcatgtgtatggacatacagctcgttgaagcactgtgtggcttccagaagccaatatctactcttgacaaccgaaccatcgtcatcacctctcatccaggtcagattgtcaagcatggagatatcaagtgtgtactaaatgaaggcatgccaatttatcgtagaccatatgaaaagggtcgcctaatcatcgaatttaaggtaaactttcctgagaatggctttctctctcctgataaactgtctttgctggaaaaactcctacccgagaggaaggaagtggaagagactgatgagatggaccaagtagaactggtggactttgatccaaatcaggaaagacggcgccactacaatggagaagcatatgaggatgatgaacatcatcccagaggtggtgttcagtgtcagacctcttaatgggccagtgaataacactcactgctggcatttaatgtgcagtagtgaatgagtgaaggactgtaatcataatatgctcactacttgctcttgtttttgttttaataaactatagtagtgttttaaaaagttaaatgaagaataaacgcaaatataaaagct

SEQ ID NO: 297651 - DNA, 645 bp, Homo sapiens
agcggacttccggcgggtgacgcgcccgggttcggctacaaaagaggacggctgcggcgcgccgggcggaactttccagaacgctcggtgagaggcggaggagcggtaactaccccggctgcgcacagctcggcgctccttcccgctccctcacacaccggcctcagcccgcaccggcagtagaagatggtgaaagaaacaacttactacgatgttttgggggtcaaacccaatgctactcaggaagaattgaaaaaggcttataggaaactggctttgaagtaccatcctgataagaacccaaatgaaggagagaagtttaaacagatttctcaagcttacgaagttctctctgatgcaaagaaaagggaattatatgacaaaggaggagaacaggcaattaaagagggtggagcaggtggcggttttggctcccccatggacatctttgatatgttttttggaggaggaggaaggatgcagagagaaaggagaggtaagaagaatctagtctttgtgcagctaactaaagttagctgttggtcagagcagatctttgagaaatcacccattttaaatgcttgtttacatgttggtataatgttgcaaactgaccacaaattgcctctgatttatggtgtcgtg

SEQ ID NO: 297652 - DNA, 560 bp, Homo sapiens
gaactctagttcagagtgtgctatgcactgtgcctttttagagcctgttctaacctgagattggcagattcacctaaatattacgtgtttacatgtgtttttctggggaaaatgggtccatgatactctaagggagctaatgatgaaatcagattgaacagtgaaagtttcttttgaaggtaaactttcctgagaatggctttctctctcctgataaactgtctttgctggaaaaactcctacccgagaggaaggaagtggaagagactgatgagatggaccaagtagaactggtggactttgatccaaatcaggaaagacggcgccactacaatggagaagcatatgaggatgatgaacatcatcccagaggtggtgttcagtgtcagacctcttaatgggccagtgaataacactcactgctggcatttaatgtgcagtagtgaatgagtgaaggactgtaatcataatatgctcactacttgctcttgtttttgttttaataaactatagtagtgttttaaaaagttaaatgaagaataaacgcaaatataaaagct

SEQ ID NO: 297653 - DNA, 455 bp, Homo sapiens
aaaacccataagtgaaaggtaacaggattgctttgccacgtaagttttactcctgccaatgagctaggacagtgctctgttctttatattccctgcctcataaaaatgtgaccatacttaaggaagaacttggcttcaatgtttttaggtcagattgtcaagcatggagatatcaagtgtgtactaaatgaaggcatgccaatttatcgtagaccatatgaaaagggtcgcctaatcatcgaatttaaggtaagctgtaatgtactttaagaatacttgagaacaattggcttactaaaatctgataaaaaagtaaaatttcagccaggtgcaagtagctcatgcctgtaatccccgcattttgagaggctgaggcaggaggatcccttgagccctggagttttgagaacagcctgggcaacatagtgaaaccctgtctctttaaaaaaaaaaaa

SEQ ID NO: 297654 - DNA, 2724 bp, Homo sapiens
  misc_feature (2384)..(2384): n is a, c, g, or t
agcggacttccggcgggtgacgcgcccgggttcggctacaaaagaggacggctgcggcgcgccgggcggaactttccagaacgctcggtgagaggcggaggagcggtaactaccccggctgcgcacagctcggcgctccttcccgctccctcacacaccggcctcagcccgcaccggcagtagaagatggtgaaagaaacaacttactacgatgttttgggggtcaaacccaatgctactcaggaagaattgaaaaaggcttataggaaactggctttgaagtaccatcctgataagaacccaaatgaaggagagaagtttaaacagatttctcaagcttacgaagttctctctgatgcaaagaaaagggaattatatgacaaaggaggagaacaggcaattaaagagggtggagcaggtggcggttttggctcccccatggacatctttgatatgttttttggaggaggaggaaggatgcagagagaaaggagaggtaaaaatgttgtacatcagctctcagtaaccctagaagacttatataatggtgcaacaagaaaactggctctgcaaaagaatgtgatttgtgacaaatgtgaaggtagaggaggtaagaaaggagcagtagagtgctgtcccaattgccgaggtactggaatgcaaataagaattcatcagataggacctggaatggttcagcaaattcagtctgtgtgcatggagtgccagggccatggggagcggatcagtcctaaagatagatgtaaaagctgcaacggaaggaagatagttcgagagaagaaaattttagaagttcatattgacaaaggcatgaaagatggccagaagataacattccatggtgaaggagaccaagaaccaggactggagccaggcgatattatcattgtgttagatcagaaggaccatgctgtttttactcgacgaggagaagaccttttcatgtgtatggacatacagctcgttgaagcactgtgtggcttccagaagccaatatctactcttgacaaccgaaccatcgtcatcacctctcatccaggtcagattgtcaagcatggagatatcaagtgtgtactaaatgaaggcatgccaatttatcgtagaccatatgaaaagggtcgcctaatcatcgaatttaaggtaaactttcctgagaatggctttctctctcctgataaactgtctttgctggaaaaactcctacccgagaggaaggaagtggaagagactgatgagatggaccaagtagaactggtggactttgatccaaatcaggaaagacggcgccactacaatggagaagcatatgaggatgatgaacatcatcccagaggtggtgttcagtgtcagacctcttaatgggccagtgaataacactcactgctggcatttaatgtgcagtagtgaatgagtgaaggactgtaatcataatatgctcactacttgctcttgtttttgttttaataaactatagtagtgttttaaaaagttaaatgaagaataaacgcaaatataaaagctctgattttgccctgtatgtatgatgacttcagtgtgcaagatgaagtttaatacctgtaaaaactacaaagaagttcccctagcatttctaggccaaaccttgtaattgacttcagctatgtacgtggacaagcttagactgaaatgctaggtatatgtattggcttcagtgtatgacccttcattgttaagctatgaaagtaaaactctgtatttaactggcaatgaggaaaaaaaaattttgtagagaagtgttggtctgtatagttctttatattaagtgggattcattgtaatgcctctgcatttattctgttgcctcagctgttacttgaagatggcgtaatatataatttatcctgtggtatcagtgataaaaatgatacctttctgtaggaggggtttatcataatatgctgcttcttgaaggcttgcacttccagaattgtgtttccttctgctgtgccattcatatatatatacatatatatatataatcttgaccagtcctggtcatttgctcccctccttgtctgtggaccatgataagcccaagtagtgacttcagagctgggtaacagaaattaaagtgaaaagacctttacgtggagaatttgcatgcgtaatataggaaggtgttctttaggtatgttacaggattactttaaaccatttgactttcgctccaaagttatgttggtagtatagcaaattatgatgaatagctttaattgtatgtttaaaagtctcatatgttcacatgcttaaatctgggtatcagaatttaagcaattcttgaaatgtattgtctccttaatatactaattacaaagcatctccanaaaaaaaaaaacaaaaataaccaatacacactaaaaaaaccggggggggacccgcctacaacataaccccgggagggcgcaccccgaagctagagcgacgagccagatggtcctctgaccaaacggccccactgagtcgagctgaataacataccgagcacggccaactgtacaccagagctgcacggacaaacgtgacccggaccactgtggaacgaacaccaatcggcggagccaccatgaggccacgtacaccagccatttaccccacacgcaactaaacactgcagcgatcggtccacacggcagacgccactaacccgcccacctgcagaataca

SEQ ID NO: 297655 - DNA, 1921 bp, Homo sapiens
agcggacttccggcgggtgacgcgcccgggttcggctacaaaagaggacggctgcggcgcgccgggcggaactttccagaacgctcggtgagaggcggaggagcggtaactaccccggctgcgcacagctcggcgctccttcccgctccctcacacaccggcctcagcccgcaccggcagtagaagatggtgaaagaaacaacttactacgatgttttgggggtcaaacccaatgctactcaggaagaattgaaaaaggcttataggaaactggctttgaagtaccatcctgataagaacccaaatgaaggagagaagtttaaacagatttctcaagcttacgaagttctctctgatgcaaagaaaagggaattatatgacaaaggaggagaacaggcaattaaagagggtggagcaggtggcggttttggctcccccatggacatctttgatatgttttttggaggaggaggaaggatgcagagagaaaggagaggtaaaaatgttgtacatcagctctcagtaaccctagaagacttatataatggtgcaacaagaaaactggctctgcaaaagaatgtgatttgtgacaaatgtgaaggtagaggaggtaagaaaggagcagtagagtgctgtcccaattgccgaggtactggaatgcaaataagaattcatcagataggacctggaatggttcagcaaattcagtctgtgtgcatggagtgccagggccatggggagcggatcagtcctaaagatagatgtaaaagctgcaacggaaggaagatagttcgagagaagaaaattttagaagttcatattgacaaaggcatgaaagatggccagaagataacattccatggtgaaggagaccaagaaccaggactggagccaggcgatattatcattgtgttagatcagaaggaccatgctgtttttactcgacgaggagaagaccttttcatgtgtatggacatacagctcgttgaagcactgtgtggcttccagaagccaatatctactcttgacaaccgaaccatcgtcatcacctctcatccaggtcagattgtcaagcatggagatatcaagtgtgtactaaatgaaggcatgccaatttatcgtagaccatatgaaaagggtcgcctaatcatcgaatttaaggtaaactttcctgagaatggctttctctctcctgataaactgtctttgctggaaaaactcctacccgagaggaaggaagtggaagagactgatgagatggaccaagtagaactggtggactttgatccaaatcaggaaagacggcgccactacaatggagaagcatatgaggatgatgaacatcatcccagaggtggtgttcagtgtcagacctcttaatgggccagtgaataacactcactgctggcatttaatgtgcagtagtgaatgagtgaaggactgtaatcataatatgctcactacttgctcttgtttttgttttaataaactatagtagtgttttaaaaagttaaatgaagaataaacgcaaatataaaagctctgattttgccctgtatgtatgatgacttcagtgtgcaagatgaagtttaatacctgtaaaaactacaaagaagttcccctagcatttctaggccaaaccttgtaattgacttcagctatgtacgtggacaagcttagactgaaatgctaggtatatgtattggcttcagtgtatgacccttcattgttaagctatgaaagtaaaactctgtatttaactggcaatgaggaaaaaaaaattttgtagagaagtgttgggcgataacattgatgttatccccacactgatttatcccccacggcgagaagtcgaattcagtcatccttttaatctccgaaatgctgtatgtatatacatagtgttgggcgataactaagg

SEQ ID NO: 297656 - DNA, 2666 bp, Homo sapiens
  misc_feature (2326)..(2326): n is a, c, g, or t
agcggacttccggcgggtgacgcgcccgggttcggctacaaaagaggacggctgcggcgcgccgggcggaactttccagaacgctcggtgagaggcggaggagcggtaactaccccggctgcgcacagctcggcgctccttcccgctccctcacacaccggcctcagcccgcaccggcagtagaagatggtgaaagaaacaacttactacgatgttttgggggtcaaacccaatgctactcaggaagaattgaaaaaggcttataggaaactggctttgaagtaccatcctgataagaacccaaatgaaggagagaagtttaaacagatttctcaagcttacgaagttctctctgatgcaaagaaaagggaattatatgacaaaggaggagaacaggcaattaaagagggtggagcaggtggcggttttggctcccccatggacatctttgatatgttttttggaggaggaggaaggatgcagagagaaaggagaggtaaaaatgttgtacatcagctctcagtaaccctagaagacttatataatggtgcaacaagaaaactggctctgcaaaagaatgtgatttgtgacaaatgtgaaggtagaggaggtaagaaaggagcagtagagtgctgtcccaattgccgaggtactggaatgcaaataagaattcatcagataggacctggaatggttcagcaaattcagtctgtgtgcatggagtgccagggccatggggagcggatcagtcctaaagatagatgtaaaagctgcaacggaaggaagatagttcgagagaagaaaattttagaagttcatattgacaaaggcatgaaagatggccagaagataacattccatggtgaaggagaccaagaaccaggactggagccaggcgatattatcattgtgttagatcagaaggaccatgctgtttttactcgacgaggagaagaccttttcatgtgtatggacatacagctcgttgaagcactgtgtggcttccagaagccaatatctactcttgacaaccgaaccatcgtcatcacctctcatccaggtcagattgtcaagcatggagatatcaagtgtgtactaaatgaaggcatgccaatttatcgtagaccatatgaaaagggtcgcctaatcatcgaatttaaggtaaactttcctgagaatggctttctctctcctgataaactgtctttgctggaaaaactcctacccgagaggaaggaagtggaagagactgatgagatggaccaagtagaactggtggactttgatccaaatcaggaaagacggcgccactacaatggagaagcatatgaggatgatgaacatcatcccagaggtggtgttcagtgtcagacctcttaatgggccagtgaataacactcactgctggcatttaatgtgcagtttaataaactatagtagtgttttaaaaagttaaatgaagaataaacgcaaatataaaagctctgattttgccctgtatgtatgatgacttcagtgtgcaagatgaagtttaatacctgtaaaaactacaaagaagttcccctagcatttctaggccaaaccttgtaattgacttcagctatgtacgtggacaagcttagactgaaatgctaggtatatgtattggcttcagtgtatgacccttcattgttaagctatgaaagtaaaactctgtatttaactggcaatgaggaaaaaaaaattttgtagagaagtgttggtctgtatagttctttatattaagtgggattcattgtaatgcctctgcatttattctgttgcctcagctgttacttgaagatggcgtaatatataatttatcctgtggtatcagtgataaaaatgatacctttctgtaggaggggtttatcataatatgctgcttcttgaaggcttgcacttccagaattgtgtttccttctgctgtgccattcatatatatatacatatatatatataatcttgaccagtcctggtcatttgctcccctccttgtctgtggaccatgataagcccaagtagtgacttcagagctgggtaacagaaattaaagtgaaaagacctttacgtggagaatttgcatgcgtaatataggaaggtgttctttaggtatgttacaggattactttaaaccatttgactttcgctccaaagttatgttggtagtatagcaaattatgatgaatagctttaattgtatgtttaaaagtctcatatgttcacatgcttaaatctgggtatcagaatttaagcaattcttgaaatgtattgtctccttaatatactaattacaaagcatctccanaaaaaaaaaaacaaaaataaccaatacacactaaaaaaaccggggggggacccgcctacaacataaccccgggagggcgcaccccgaagctagagcgacgagccagatggtcctctgaccaaacggccccactgagtcgagctgaataacataccgagcacggccaactgtacaccagagctgcacggacaaacgtgacccggaccactgtggaacgaacaccaatcggcggagccaccatgaggccacgtacaccagccatttaccccacacgcaactaaacactgcagcgatcggtccacacggcagacgccactaacccgcccacctgcagaataca

SEQ ID NO: 297657 - DNA, 2722 bp, Homo sapiens
  misc_feature (997)..(998): n is a, c, g, or t
  misc_feature (1002)..(1005): n is a, c, g, or t
  misc_feature (1009)..(1010): n is a, c, g, or t
  misc_feature (1013)..(1013): n is a, c, g, or t
  misc_feature (1015)..(1015): n is a, c, g, or t
  misc_feature (1052)..(1052): n is a, c, g, or t
  misc_feature (2382)..(2382): n is a, c, g, or t
agcggacttccggcgggtgacgcgcccgggttcggctacaaaagaggacggctgcggcgcgccgggcggaactttccagaacgctcggtgagaggcggaggagcggtaactaccccggctgcgcacagctcggcgctccttcccgctccctcacacaccggcctcagcccgcaccggcagtagaagatggtgaaagaaacaacttactacgatgttttgggggtcaaacccaatgctactcaggaagaattgaaaaaggcttataggaaactggctttgaagtaccatcctgataagaacccaaatgaaggagagaagtttaaacagatttctcaagcttacgaagttctctctgatgcaaagaaaagggaattatatgacaaaggaggagaacaggcaattaaagagggtggagcaggtggcggttttggctcccccatggacatctttgatatgttttttggaggaggaggaaggatgcagagagaaaggagaggtaaaaatgttgtacatcagctctcagtaaccctagaagacttatataatggtgcaacaagaaaactggctctgcaaaagaatgtgatttgtgacaaatgtgaaggtagaggaggtaagaaaggagcagtagagtgctgtcccaattgccgaggtactggaatgcaaataagaattcatcagataggacctggaatggttcagcaaattcagtctgtgtgcatggagtgccagggccatggggagcggatcagtcctaaagatagatgtaaaagctgcaacggaaggaagatagttcgagagaagaaaattttagaagttcatattgacaaaggcatgaaagatggccagaagataacattccatggtgaaggagaccaagaaccaggactggagccaggcgatattatcattgtgttagatcagaaggaccatgctgtttttactcgatgattaggcgacccttttcatatggtctacgataaattggcatgccttcatnnagtnnnnactnnatntntccatgcttgacaatctgacctggatgagaggtgatnacgatggtcagattgtcaagcatggagatatcaagtgtgtactaaatgaaggcatgccaatttatcgtagaccatatgaaaagggtcgcctaatcatcgaatttaaggtaaactttcctgagaatggctttctctctcctgataaactgtctttgctggaaaaactcctacccgagaggaaggaagtggaagagactgatgagatggaccaagtagaactggtggactttgatccaaatcaggaaagacggcgccactacaatggagaagcatatgaggatgatgaacatcatcccagaggtggtgttcagtgtcagacctcttaatgggccagtgaataacactcactgctggcatttaatgtgcagtagtgaatgagtgaaggactgtaatcataatatgctcactacttgctcttgtttttgttttaataaactatagtagtgttttaaaaagttaaatgaagaataaacgcaaatataaaagctctgattttgccctgtatgtatgatgacttcagtgtgcaagatgaagtttaatacctgtaaaaactacaaagaagttcccctagcatttctaggccaaaccttgtaattgacttcagctatgtacgtggacaagcttagactgaaatgctaggtatatgtattggcttcagtgtatgacccttcattgttaagctatgaaagtaaaactctgtatttaactggcaatgaggaaaaaaaaattttgtagagaagtgttggtctgtatagttctttatattaagtgggattcattgtaatgcctctgcatttattctgttgcctcagctgttacttgaagatggcgtaatatataatttatcctgtggtatcagtgataaaaatgatacctttctgtaggaggggtttatcataatatgctgcttcttgaaggcttgcacttccagaattgtgtttccttctgctgtgccattcatatatatatacatatatatatataatcttgaccagtcctggtcatttgctcccctccttgtctgtggaccatgataagcccaagtagtgacttcagagctgggtaacagaaattaaagtgaaaagacctttacgtggagaatttgcatgcgtaatataggaaggtgttctttaggtatgttacaggattactttaaaccatttgactttcgctccaaagttatgttggtagtatagcaaattatgatgaatagctttaattgtatgtttaaaagtctcatatgttcacatgcttaaatctgggtatcagaatttaagcaattcttgaaatgtattgtctccttaatatactaattacaaagcatctccanaaaaaaaaaaacaaaaataaccaatacacactaaaaaaaccggggggggacccgcctacaacataaccccgggagggcgcaccccgaagctagagcgacgagccagatggtcctctgaccaaacggccccactgagtcgagctgaataacataccgagcacggccaactgtacaccagagctgcacggacaaacgtgacccggaccactgtggaacgaacaccaatcggcggagccaccatgaggccacgtacaccagccatttaccccacacgcaactaaacactgcagcgatcggtccacacggcagacgccactaacccgcccacctgcagaataca

SEQ ID NO: 297658 - DNA, 2743 bp, Homo sapiens
  misc_feature (2403)..(2403): n is a, c, g, or t
agcggacttccggcgggtgacgcgcccgggttcggctacaaaagaggacggctgcggcgcgccgggcggaactttccagaacgctcggtgagaggcggaggagcggtaactaccccggctgcgcacagctcggcgctccttcccgctccctcacacaccggcctcagcccgcaccgttgcattttcttatttcaggcagtagaagatggtgaaagaaacaacttactacgatgttttgggggtcaaacccaatgctactcaggaagaattgaaaaaggcttataggaaactggctttgaagtaccatcctgataagaacccaaatgaaggagagaagtttaaacagatttctcaagcttacgaagttctctctgatgcaaagaaaagggaattatatgacaaaggaggagaacaggcaattaaagagggtggagcaggtggcggttttggctcccccatggacatctttgatatgttttttggaggaggaggaaggatgcagagagaaaggagaggtaaaaatgttgtacatcagctctcagtaaccctagaagacttatataatggtgcaacaagaaaactggctctgcaaaagaatgtgatttgtgacaaatgtgaaggtagaggaggtaagaaaggagcagtagagtgctgtcccaattgccgaggtactggaatgcaaataagaattcatcagataggacctggaatggttcagcaaattcagtctgtgtgcatggagtgccagggccatggggagcggatcagtcctaaagatagatgtaaaagctgcaacggaaggaagatagttcgagagaagaaaattttagaagttcatattgacaaaggcatgaaagatggccagaagataacattccatggtgaaggagaccaagaaccaggactggagccaggcgatattatcattgtgttagatcagaaggaccatgctgtttttactcgacgaggagaagaccttttcatgtgtatggacatacagctcgttgaagcactgtgtggcttccagaagccaatatctactcttgacaaccgaaccatcgtcatcacctctcatccaggtcagattgtcaagcatggagatatcaagtgtgtactaaatgaaggcatgccaatttatcgtagaccatatgaaaagggtcgcctaatcatcgaatttaaggtaaactttcctgagaatggctttctctctcctgataaactgtctttgctggaaaaactcctacccgagaggaaggaagtggaagagactgatgagatggaccaagtagaactggtggactttgatccaaatcaggaaagacggcgccactacaatggagaagcatatgaggatgatgaacatcatcccagaggtggtgttcagtgtcagacctcttaatgggccagtgaataacactcactgctggcatttaatgtgcagtagtgaatgagtgaaggactgtaatcataatatgctcactacttgctcttgtttttgttttaataaactatagtagtgttttaaaaagttaaatgaagaataaacgcaaatataaaagctctgattttgccctgtatgtatgatgacttcagtgtgcaagatgaagtttaatacctgtaaaaactacaaagaagttcccctagcatttctaggccaaaccttgtaattgacttcagctatgtacgtggacaagcttagactgaaatgctaggtatatgtattggcttcagtgtatgacccttcattgttaagctatgaaagtaaaactctgtatttaactggcaatgaggaaaaaaaaattttgtagagaagtgttggtctgtatagttctttatattaagtgggattcattgtaatgcctctgcatttattctgttgcctcagctgttacttgaagatggcgtaatatataatttatcctgtggtatcagtgataaaaatgatacctttctgtaggaggggtttatcataatatgctgcttcttgaaggcttgcacttccagaattgtgtttccttctgctgtgccattcatatatatatacatatatatatataatcttgaccagtcctggtcatttgctcccctccttgtctgtggaccatgataagcccaagtagtgacttcagagctgggtaacagaaattaaagtgaaaagacctttacgtggagaatttgcatgcgtaatataggaaggtgttctttaggtatgttacaggattactttaaaccatttgactttcgctccaaagttatgttggtagtatagcaaattatgatgaatagctttaattgtatgtttaaaagtctcatatgttcacatgcttaaatctgggtatcagaatttaagcaattcttgaaatgtattgtctccttaatatactaattacaaagcatctccanaaaaaaaaaaacaaaaataaccaatacacactaaaaaaaccggggggggacccgcctacaacataaccccgggagggcgcaccccgaagctagagcgacgagccagatggtcctctgaccaaacggccccactgagtcgagctgaataacataccgagcacggccaactgtacaccagagctgcacggacaaacgtgacccggaccactgtggaacgaacaccaatcggcggagccaccatgaggccacgtacaccagccatttaccccacacgcaactaaacactgcagcgatcggtccacacggcagacgccactaacccgcccacctgcagaataca

SEQ ID NO: 297659 - DNA, 2825 bp, Homo sapiens
  misc_feature (2485)..(2485): n is a, c, g, or t
ctttacgccaggtaccagataatcagtccatgaaattcaaaaacacacattcttctctaattcccacatgagagatcactgaactgggtaaaagcaacaaaacaggaattctatgggtggggttgaaacaatccctaggaaaaaatgcaaatctttcagactgatccatgattcctttatcatcatatacggctagttttatccagtgggagaaagcagatgcggtaaaagcttaagcttttaccgctccctcacacaccggcctcagcccgcaccggcagtagaagatggtgaaagaaacaacttactacgatgttttgggggtcaaacccaatgctactcaggaagaattgaaaaaggcttataggaaactggctttgaagtaccatcctgataagaacccaaatgaaggagagaagtttaaacagatttctcaagcttacgaagttctctctgatgcaaagaaaagggaattatatgacaaaggaggagaacaggcaattaaagagggtggagcaggtggcggttttggctcccccatggacatctttgatatgttttttggaggaggaggaaggatgcagagagaaaggagaggtaaaaatgttgtacatcagctctcagtaaccctagaagacttatataatggtgcaacaagaaaactggctctgcaaaagaatgtgatttgtgacaaatgtgaaggtagaggaggtaagaaaggagcagtagagtgctgtcccaattgccgaggtactggaatgcaaataagaattcatcagataggacctggaatggttcagcaaattcagtctgtgtgcatggagtgccagggccatggggagcggatcagtcctaaagatagatgtaaaagctgcaacggaaggaagatagttcgagagaagaaaattttagaagttcatattgacaaaggcatgaaagatggccagaagataacattccatggtgaaggagaccaagaaccaggactggagccaggcgatattatcattgtgttagatcagaaggaccatgctgtttttactcgacgaggagaagaccttttcatgtgtatggacatacagctcgttgaagcactgtgtggcttccagaagccaatatctactcttgacaaccgaaccatcgtcatcacctctcatccaggtcagattgtcaagcatggagatatcaagtgtgtactaaatgaaggcatgccaatttatcgtagaccatatgaaaagggtcgcctaatcatcgaatttaaggtaaactttcctgagaatggctttctctctcctgataaactgtctttgctggaaaaactcctacccgagaggaaggaagtggaagagactgatgagatggaccaagtagaactggtggactttgatccaaatcaggaaagacggcgccactacaatggagaagcatatgaggatgatgaacatcatcccagaggtggtgttcagtgtcagacctcttaatgggccagtgaataacactcactgctggcatttaatgtgcagtagtgaatgagtgaaggactgtaatcataatatgctcactacttgctcttgtttttgttttaataaactatagtagtgttttaaaaagttaaatgaagaataaacgcaaatataaaagctctgattttgccctgtatgtatgatgacttcagtgtgcaagatgaagtttaatacctgtaaaaactacaaagaagttcccctagcatttctaggccaaaccttgtaattgacttcagctatgtacgtggacaagcttagactgaaatgctaggtatatgtattggcttcagtgtatgacccttcattgttaagctatgaaagtaaaactctgtatttaactggcaatgaggaaaaaaaaattttgtagagaagtgttggtctgtatagttctttatattaagtgggattcattgtaatgcctctgcatttattctgttgcctcagctgttacttgaagatggcgtaatatataatttatcctgtggtatcagtgataaaaatgatacctttctgtaggaggggtttatcataatatgctgcttcttgaaggcttgcacttccagaattgtgtttccttctgctgtgccattcatatatatatacatatatatatataatcttgaccagtcctggtcatttgctcccctccttgtctgtggaccatgataagcccaagtagtgacttcagagctgggtaacagaaattaaagtgaaaagacctttacgtggagaatttgcatgcgtaatataggaaggtgttctttaggtatgttacaggattactttaaaccatttgactttcgctccaaagttatgttggtagtatagcaaattatgatgaatagctttaattgtatgtttaaaagtctcatatgttcacatgcttaaatctgggtatcagaatttaagcaattcttgaaatgtattgtctccttaatatactaattacaaagcatctccanaaaaaaaaaaacaaaaataaccaatacacactaaaaaaaccggggggggacccgcctacaacataaccccgggagggcgcaccccgaagctagagcgacgagccagatggtcctctgaccaaacggccccactgagtcgagctgaataacataccgagcacggccaactgtacaccagagctgcacggacaaacgtgacccggaccactgtggaacgaacaccaatcggcggagccaccatgaggccacgtacaccagccatttaccccacacgcaactaaacactgcagcgatcggtccacacggcagacgccactaacccgcccacctgcagaataca

SEQ ID NO: 297660 - DNA, 1578 bp, Homo sapiens
agcggacttccggcgggtgacgcgcccgggttcggctacaaaagaggacggctgcggcgcgccgggcggaactttccagaacgctcggtgagaggcggaggagcggtaactaccccggctgcgcacagctcggcgctccttcccgctccctcacacaccggcctcagcccgcaccggcagtagaagatggtgaaagaaacaacttactacgatgttttgggggtcaaacccaatgctactcaggaagaattgaaaaaggcttataggaaactggctttgaagtaccatcctgataagaacccaaatgaaggagagaagtttaaacagatttctcaagcttacgaagttctctctgatgcaaagaaaagggaattatatgacaaaggaggagaacaggcaattaaagagggtggagcaggtggcggttttggctcccccatggacatctttgatatgttttttggaggaggaggaaggatgcagagagaaaggagaggtaaaaatgttgtacatcagctctcagtaaccctagaagacttatataatggtgcaacaagaaaactggctctgcaaaagaatgtgatttgtgacaaatgtgaaggtagaggaggtaagaaaggagcagtagagtgctgtcccaattgccgaggtactggaatgcaaataagaattcatcagataggacctggaatggttcagcaaattcagtctgtgtgcatggagtgccagggccatggggagcggatcagtcctaaagatagatgtaaaagctgcaacggaaggaagatagttcgagagaagaaaattttagaagttcatattgacaaaggcatgaaagatggccagaagataacattccatggtgaaggagaccaagaaccaggactggagccaggcgatattatcattgtgttagatcagaaggaccatgctgtttttactcgacgaggagaagaccttttcatgtgtatggacatacagctcgttgaagcactgtgtggcttccagaagccaatatctactcttgacaaccgaaccatcgtcatcacctctcatccaggtcagattgtcaagcatggagatatcaagtgtgtactaaatgaaggcatgccaatttatcgtagaccatatgaaaagggtcgcctaatcatcgaatttaaggtaaactttcctgagaatggctttctctctcctgataaactgtctttgctggaaaaactcctacccgagaggaaggaagtggaagagactgatgagatggaccaagtagaactggtggactttgatccaaatcaggaaagacggcgccactacaatggagaagcatatgaggatgatgaacatcatcccagaggtggtgttcagtgtcagacctcttaatgggccagtgaataacactcactgctggcatttaatgtgcagtagtgaatgagtgaaggactgtaatcataatatgctcactacttgctcttgtttttgttttaataaactatagtagtgttttaaaaagttaaatgaagaataaacgcaaatataaaagctaaaaaaaaaaaaccccccttccccgccatttttggg

SEQ ID NO: 297661 - DNA, 1740 bp, Homo sapiens
agcggacttccggcgggtgacgcgcccgggttcggctacaaaagaggacggctgcggcgcgccgggcggaactttccagaacgctcggtgagaggcggaggagcggtaactaccccggctgcgcacagctcggcgctccttcccgctccctcacacaccggcctcagcccgcaccggcagtagaagatggtgaaagaaacaacttactacgatgttttgggggtcaaacccaatgctactcaggaagaattgaaaaaggcttataggaaactggctttgaagtaccatcctgataagaacccaaatgaaggagagaagtttaaacagatttctcaagcttacgaagttctctctgatgcaaagaaaagggaattatatgacaaaggaggagaacaggcaattaaagagggtggagcaggtggcggttttggctcccccatggacatctttgatatgttttttggaggaggaggaaggatgcagagagaaaggagaggtaaaaatgttgtacatcagctctcagtaaccctagaagacttatataatggtgcaacaagaaaactggctctgcaaaagaatgtgatttgtgacaaatgtgaaggtagaggaggtaagaaaggagcagtagagtgctgtcccaattgccgaggtactggaatgcaaataagaattcatcagataggacctggaatggttcagcaaattcagtctgtgtgcatggagtgccagggccatggggagcggatcagtcctaaagatagatgtaaaagctgcaacggaaggaagatagttcgagagaagaaaattttagaagttcatattgacaaaggcatgaaagatggccagaagataacattccatggtgaaggagaccaagaaccaggactggagccaggcgatattatcattgtgttagatcagaaggaccatgctgtttttactcgacgaggagaagaccttttcatgtgtatggacatacagctcgttgaagcactgtgtggcttccagaagccaatatctactcttgacaaccgaaccatcgtcatcacctctcatccaggtcagattgtcaagcatggagatatcaagtgtgtactaaatgaaggcatgccaatttatcgtagaccatatgaaaagggtcgcctaatcatcgaatttaaggtaaactttcctgagaatggctttctctctcctgataaactgtctttgctggaaaaactcctacccgagaggaaggaagtggaagagactgatgagatggaccaagtagaactggtggactttgatccaaatcaggaaagacggcgccactacaatggagaagcatatgaggatgatgaacatcatcccagaggtggtgttcagtgtcagacctcttaatgggccagtgaataacactcactgctggcatttaatgtgcagtagtgaatgagtgaaggactgtaatcataatatgctcactacttgctcttgtttttgttttaataaactatagtagtgttttaaaaagttaaatgaagaataaacgcaaatataaaagctaaaaaaaaaaaaaaaaaaaaaaaaaaaaaaaaacgcgggggctttttgtgtggggggggggaaaagggggtttgaaaggggcgcctggggccttagtgttgttccctggccccagtttttttggcccacagggggaaatccgggcggggcccccctaaaaagggggccggttaaattcggaaaccggggtacccggta

SEQ ID NO: 297662 - DNA, 2529 bp, Homo sapiens
  misc_feature (2189)..(2189): n is a, c, g, or t
gtttttctcaagtgactttgaaggtaatgcttttgcttaccatatttccaagatggccacgtctgtgcccttaagcaaatatttaatctctgacctgattttccctcatctgtgattacatcacagtttgaggatcatctgtgataacgtgaacattctgtgtatatagtaggtagtcaacagatgtaccctgtgaggctcatcttttattattctttgccacattctttatagtgcctttagcacaaataagatccagcatcttaaacagatttgcaatgaggaaatattttgttttagggtaaaaatgttgtacatcagctctcagtaaccctagaagacttatataatggtgcaacaagaaaactggctctgcaaaagaatgtgatttgtgacaaatgtgaaggtagaggaggtaagaaaggagcagtagagtgctgtcccaattgccgaggtactggaatgcaaataagaattcatcagataggacctggaatggttcagcaaattcagtctgtgtgcatggagtgccagggccatggggagcggatcagtcctaaagatagatgtaaaagctgcaacggaaggaagatagttcgagagaagaaaattttagaagttcatattgacaaaggcatgaaagatggccagaagataacattccatggtgaaggagaccaagaaccaggactggagccaggcgatattatcattgtgttagatcagaaggaccatgctgtttttactcgacgaggagaagaccttttcatgtgtatggacatacagctcgttgaagcactgtgtggcttccagaagccaatatctactcttgacaaccgaaccatcgtcatcacctctcatccaggtcagattgtcaagcatggagatatcaagtgtgtactaaatgaaggcatgccaatttatcgtagaccatatgaaaagggtcgcctaatcatcgaatttaaggtaaactttcctgagaatggctttctctctcctgataaactgtctttgctggaaaaactcctacccgagaggaaggaagtggaagagactgatgagatggaccaagtagaactggtggactttgatccaaatcaggaaagacggcgccactacaatggagaagcatatgaggatgatgaacatcatcccagaggtggtgttcagtgtcagacctcttaatgggccagtgaataacactcactgctggcatttaatgtgcagtagtgaatgagtgaaggactgtaatcataatatgctcactacttgctcttgtttttgttttaataaactatagtagtgttttaaaaagttaaatgaagaataaacgcaaatataaaagctctgattttgccctgtatgtatgatgacttcagtgtgcaagatgaagtttaatacctgtaaaaactacaaagaagttcccctagcatttctaggccaaaccttgtaattgacttcagctatgtacgtggacaagcttagactgaaatgctaggtatatgtattggcttcagtgtatgacccttcattgttaagctatgaaagtaaaactctgtatttaactggcaatgaggaaaaaaaaattttgtagagaagtgttggtctgtatagttctttatattaagtgggattcattgtaatgcctctgcatttattctgttgcctcagctgttacttgaagatggcgtaatatataatttatcctgtggtatcagtgataaaaatgatacctttctgtaggaggggtttatcataatatgctgcttcttgaaggcttgcacttccagaattgtgtttccttctgctgtgccattcatatatatatacatatatatatataatcttgaccagtcctggtcatttgctcccctccttgtctgtggaccatgataagcccaagtagtgacttcagagctgggtaacagaaattaaagtgaaaagacctttacgtggagaatttgcatgcgtaatataggaaggtgttctttaggtatgttacaggattactttaaaccatttgactttcgctccaaagttatgttggtagtatagcaaattatgatgaatagctttaattgtatgtttaaaagtctcatatgttcacatgcttaaatctgggtatcagaatttaagcaattcttgaaatgtattgtctccttaatatactaattacaaagcatctccanaaaaaaaaaaacaaaaataaccaatacacactaaaaaaaccggggggggacccgcctacaacataaccccgggagggcgcaccccgaagctagagcgacgagccagatggtcctctgaccaaacggccccactgagtcgagctgaataacataccgagcacggccaactgtacaccagagctgcacggacaaacgtgacccggaccactgtggaacgaacaccaatcggcggagccaccatgaggccacgtacaccagccatttaccccacacgcaactaaacactgcagcgatcggtccacacggcagacgccactaacccgcccacctgcagaataca

SEQ ID NO: 297663 - DNA, 2535 bp, Homo sapiens
  misc_feature (2195)..(2195): n is a, c, g, or t
ggttgaaagcccgaggggctactcgaggaagaatcgagaccgggcttagtaggaacacgggtgttggaatgtactcgagtgctcgtgattagaaaacctcgacagatgaatggaggtagcaggaatgggtttaaacagatttctcaagcttacgaagttctctctgatgcaaagaaaagggaattatatgacaaaggaggagaacaggcaattaaagagggtggagcaggtggcggttttggctcccccatggacatctttgatatgttttttggaggaggaggaaggatgcagagagaaaggagaggtaaaaatgttgtacatcagctctcagtaaccctagaagacttatataatggtgcaacaagaaaactggctctgcaaaagaatgtgatttgtgacaaatgtgaaggtagaggaggtaagaaaggagcagtagagtgctgtcccaattgccgaggtactggaatgcaaataagaattcatcagataggacctggaatggttcagcaaattcagtctgtgtgcatggagtgccagggccatggggagcggatcagtcctaaagatagatgtaaaagctgcaacggaaggaagatagttcgagagaagaaaattttagaagttcatattgacaaaggcatgaaagatggccagaagataacattccatggtgaaggagaccaagaaccaggactggagccaggcgatattatcattgtgttagatcagaaggaccatgctgtttttactcgacgaggagaagaccttttcatgtgtatggacatacagctcgttgaagcactgtgtggcttccagaagccaatatctactcttgacaaccgaaccatcgtcatcacctctcatccaggtcagattgtcaagcatggagatatcaagtgtgtactaaatgaaggcatgccaatttatcgtagaccatatgaaaagggtcgcctaatcatcgaatttaaggtaaactttcctgagaatggctttctctctcctgataaactgtctttgctggaaaaactcctacccgagaggaaggaagtggaagagactgatgagatggaccaagtagaactggtggactttgatccaaatcaggaaagacggcgccactacaatggagaagcatatgaggatgatgaacatcatcccagaggtggtgttcagtgtcagacctcttaatgggccagtgaataacactcactgctggcatttaatgtgcagtagtgaatgagtgaaggactgtaatcataatatgctcactacttgctcttgtttttgttttaataaactatagtagtgttttaaaaagttaaatgaagaataaacgcaaatataaaagctctgattttgccctgtatgtatgatgacttcagtgtgcaagatgaagtttaatacctgtaaaaactacaaagaagttcccctagcatttctaggccaaaccttgtaattgacttcagctatgtacgtggacaagcttagactgaaatgctaggtatatgtattggcttcagtgtatgacccttcattgttaagctatgaaagtaaaactctgtatttaactggcaatgaggaaaaaaaaattttgtagagaagtgttggtctgtatagttctttatattaagtgggattcattgtaatgcctctgcatttattctgttgcctcagctgttacttgaagatggcgtaatatataatttatcctgtggtatcagtgataaaaatgatacctttctgtaggaggggtttatcataatatgctgcttcttgaaggcttgcacttccagaattgtgtttccttctgctgtgccattcatatatatatacatatatatatataatcttgaccagtcctggtcatttgctcccctccttgtctgtggaccatgataagcccaagtagtgacttcagagctgggtaacagaaattaaagtgaaaagacctttacgtggagaatttgcatgcgtaatataggaaggtgttctttaggtatgttacaggattactttaaaccatttgactttcgctccaaagttatgttggtagtatagcaaattatgatgaatagctttaattgtatgtttaaaagtctcatatgttcacatgcttaaatctgggtatcagaatttaagcaattcttgaaatgtattgtctccttaatatactaattacaaagcatctccanaaaaaaaaaaacaaaaataaccaatacacactaaaaaaaccggggggggacccgcctacaacataaccccgggagggcgcaccccgaagctagagcgacgagccagatggtcctctgaccaaacggccccactgagtcgagctgaataacataccgagcacggccaactgtacaccagagctgcacggacaaacgtgacccggaccactgtggaacgaacaccaatcggcggagccaccatgaggccacgtacaccagccatttaccccacacgcaactaaacactgcagcgatcggtccacacggcagacgccactaacccgcccacctgcagaataca

SEQ ID NO: 297664 - DNA, 2798 bp, Homo sapiens
  misc_feature (2458)..(2458): n is a, c, g, or t
ggtactaccggtgcgacagtgggctcttccgctcctcacacacggctcagccgacgcagtagaagatggtgaaagaaacaacttactacgatgttttgggggtcaaacccaatgctactcaggaagaattgaaaaaggcttataggaaactggctttgaagtaccatcctgataagaacccaaatgaaggagagaaggtgaatagtatctactcttaaacgtatctgaatagttctttgccagacgtatagtatttctattatggcctgaaatcgagtatctaatatagtaactatgatcacttctcggcctttttagctaagatcaagtgtaatgtagctaggtaacacttgttttttaaaaaatgaaattcactcctcttttctcaaacatttaaacagatttctcaagcttacgaagttctctctgatgcaaagaaaagggaattatatgacaaaggaggagaacaggcaattaaagagggtggagcaggtggcggttttggctcccccatggacatctttgatatgttttttggaggaggaggaaggatgcagagagaaaggagaggtaaaaatgttgtacatcagctctcagtaaccctagaagacttatataatggtgcaacaagaaaactggctctgcaaaagaatgtgatttgtgacaaatgtgaaggtagaggaggtaagaaaggagcagtagagtgctgtcccaattgccgaggtactggaatgcaaataagaattcatcagataggacctggaatggttcagcaaattcagtctgtgtgcatggagtgccagggccatggggagcggatcagtcctaaagatagatgtaaaagctgcaacggaaggaagatagttcgagagaagaaaattttagaagttcatattgacaaaggcatgaaagatggccagaagataacattccatggtgaaggagaccaagaaccaggactggagccaggcgatattatcattgtgttagatcagaaggaccatgctgtttttactcgacgaggagaagaccttttcatgtgtatggacatacagctcgttgaagcactgtgtggcttccagaagccaatatctactcttgacaaccgaaccatcgtcatcacctctcatccaggtcagattgtcaagcatggagatatcaagtgtgtactaaatgaaggcatgccaatttatcgtagaccatatgaaaagggtcgcctaatcatcgaatttaaggtaaactttcctgagaatggctttctctctcctgataaactgtctttgctggaaaaactcctacccgagaggaaggaagtggaagagactgatgagatggaccaagtagaactggtggactttgatccaaatcaggaaagacggcgccactacaatggagaagcatatgaggatgatgaacatcatcccagaggtggtgttcagtgtcagacctcttaatgggccagtgaataacactcactgctggcatttaatgtgcagtagtgaatgagtgaaggactgtaatcataatatgctcactacttgctcttgtttttgttttaataaactatagtagtgttttaaaaagttaaatgaagaataaacgcaaatataaaagctctgattttgccctgtatgtatgatgacttcagtgtgcaagatgaagtttaatacctgtaaaaactacaaagaagttcccctagcatttctaggccaaaccttgtaattgacttcagctatgtacgtggacaagcttagactgaaatgctaggtatatgtattggcttcagtgtatgacccttcattgttaagctatgaaagtaaaactctgtatttaactggcaatgaggaaaaaaaaattttgtagagaagtgttggtctgtatagttctttatattaagtgggattcattgtaatgcctctgcatttattctgttgcctcagctgttacttgaagatggcgtaatatataatttatcctgtggtatcagtgataaaaatgatacctttctgtaggaggggtttatcataatatgctgcttcttgaaggcttgcacttccagaattgtgtttccttctgctgtgccattcatatatatatacatatatatatataatcttgaccagtcctggtcatttgctcccctccttgtctgtggaccatgataagcccaagtagtgacttcagagctgggtaacagaaattaaagtgaaaagacctttacgtggagaatttgcatgcgtaatataggaaggtgttctttaggtatgttacaggattactttaaaccatttgactttcgctccaaagttatgttggtagtatagcaaattatgatgaatagctttaattgtatgtttaaaagtctcatatgttcacatgcttaaatctgggtatcagaatttaagcaattcttgaaatgtattgtctccttaatatactaattacaaagcatctccanaaaaaaaaaaacaaaaataaccaatacacactaaaaaaaccggggggggacccgcctacaacataaccccgggagggcgcaccccgaagctagagcgacgagccagatggtcctctgaccaaacggccccactgagtcgagctgaataacataccgagcacggccaactgtacaccagagctgcacggacaaacgtgacccggaccactgtggaacgaacaccaatcggcggagccaccatgaggccacgtacaccagccatttaccccacacgcaactaaacactgcagcgatcggtccacacggcagacgccactaacccgcccacctgcagaataca

SEQ ID NO: 297665 - DNA, 2473 bp, Homo sapiens
  misc_feature (2133)..(2133): n is a, c, g, or t
cggccgccccaacatcagaatggtacttcaaggccagtttcctataagaacccaaatgaaggagagatttaaacagatttctcaagcttacgaagttctctctgatgcaaagaaaagggaattatatgacaaaggaggagaacaggcaattaaagagggtggagcaggtggcggttttggctcccccatggacatctttgatatgttttttggaggaggaggaaggatgcagagagaaaggagaggtaaaaatgttgtacatcagctctcagtaaccctagaagacttatataatggtgcaacaagaaaactggctctgcaaaagaatgtgatttgtgacaaatgtgaaggtagaggaggtaagaaaggagcagtagagtgctgtcccaattgccgaggtactggaatgcaaataagaattcatcagataggacctggaatggttcagcaaattcagtctgtgtgcatggagtgccagggccatggggagcggatcagtcctaaagatagatgtaaaagctgcaacggaaggaagatagttcgagagaagaaaattttagaagttcatattgacaaaggcatgaaagatggccagaagataacattccatggtgaaggagaccaagaaccaggactggagccaggcgatattatcattgtgttagatcagaaggaccatgctgtttttactcgacgaggagaagaccttttcatgtgtatggacatacagctcgttgaagcactgtgtggcttccagaagccaatatctactcttgacaaccgaaccatcgtcatcacctctcatccaggtcagattgtcaagcatggagatatcaagtgtgtactaaatgaaggcatgccaatttatcgtagaccatatgaaaagggtcgcctaatcatcgaatttaaggtaaactttcctgagaatggctttctctctcctgataaactgtctttgctggaaaaactcctacccgagaggaaggaagtggaagagactgatgagatggaccaagtagaactggtggactttgatccaaatcaggaaagacggcgccactacaatggagaagcatatgaggatgatgaacatcatcccagaggtggtgttcagtgtcagacctcttaatgggccagtgaataacactcactgctggcatttaatgtgcagtagtgaatgagtgaaggactgtaatcataatatgctcactacttgctcttgtttttgttttaataaactatagtagtgttttaaaaagttaaatgaagaataaacgcaaatataaaagctctgattttgccctgtatgtatgatgacttcagtgtgcaagatgaagtttaatacctgtaaaaactacaaagaagttcccctagcatttctaggccaaaccttgtaattgacttcagctatgtacgtggacaagcttagactgaaatgctaggtatatgtattggcttcagtgtatgacccttcattgttaagctatgaaagtaaaactctgtatttaactggcaatgaggaaaaaaaaattttgtagagaagtgttggtctgtatagttctttatattaagtgggattcattgtaatgcctctgcatttattctgttgcctcagctgttacttgaagatggcgtaatatataatttatcctgtggtatcagtgataaaaatgatacctttctgtaggaggggtttatcataatatgctgcttcttgaaggcttgcacttccagaattgtgtttccttctgctgtgccattcatatatatatacatatatatatataatcttgaccagtcctggtcatttgctcccctccttgtctgtggaccatgataagcccaagtagtgacttcagagctgggtaacagaaattaaagtgaaaagacctttacgtggagaatttgcatgcgtaatataggaaggtgttctttaggtatgttacaggattactttaaaccatttgactttcgctccaaagttatgttggtagtatagcaaattatgatgaatagctttaattgtatgtttaaaagtctcatatgttcacatgcttaaatctgggtatcagaatttaagcaattcttgaaatgtattgtctccttaatatactaattacaaagcatctccanaaaaaaaaaaacaaaaataaccaatacacactaaaaaaaccggggggggacccgcctacaacataaccccgggagggcgcaccccgaagctagagcgacgagccagatggtcctctgaccaaacggccccactgagtcgagctgaataacataccgagcacggccaactgtacaccagagctgcacggacaaacgtgacccggaccactgtggaacgaacaccaatcggcggagccaccatgaggccacgtacaccagccatttaccccacacgcaactaaacactgcagcgatcggtccacacggcagacgccactaacccgcccacctgcagaataca

SEQ ID NO: 297666 - DNA, 2670 bp, Homo sapiens
  misc_feature (2330)..(2330): n is a, c, g, or t
agcggacttccggcgggtgacgcgcccgggttcggctacaaaagaggacggctgcggcgcgccgggcggaactttccagaacgctcggtgagaggcggaggagcggtaactaccccggctgcgcacagctcggcgctccttcccgctccctcacacaccggcctcagcccgcaccggcagtagaagatggtgaaagaaacaacttactacgatgttttgggggtcaaacccaatgctactcaggaagaattgaaaaaggcttataggaaactggctttgaagtaccatcctgataagaacccaaatgaaggagagaagtttaaacagatttctcaagcttacgaagttctctctgatgcaaagagtggcggttttggctcccccatggacatctttgatatgttttttggaggaggaggaaggatgcagagagaaaggagaggtaaaaatgttgtacatcagctctcagtaaccctagaagacttatataatggtgcaacaagaaaactggctctgcaaaagaatgtgatttgtgacaaatgtgaaggtagaggaggtaagaaaggagcagtagagtgctgtcccaattgccgaggtactggaatgcaaataagaattcatcagataggacctggaatggttcagcaaattcagtctgtgtgcatggagtgccagggccatggggagcggatcagtcctaaagatagatgtaaaagctgcaacggaaggaagatagttcgagagaagaaaattttagaagttcatattgacaaaggcatgaaagatggccagaagataacattccatggtgaaggagaccaagaaccaggactggagccaggcgatattatcattgtgttagatcagaaggaccatgctgtttttactcgacgaggagaagaccttttcatgtgtatggacatacagctcgttgaagcactgtgtggcttccagaagccaatatctactcttgacaaccgaaccatcgtcatcacctctcatccaggtcagattgtcaagcatggagatatcaagtgtgtactaaatgaaggcatgccaatttatcgtagaccatatgaaaagggtcgcctaatcatcgaatttaaggtaaactttcctgagaatggctttctctctcctgataaactgtctttgctggaaaaactcctacccgagaggaaggaagtggaagagactgatgagatggaccaagtagaactggtggactttgatccaaatcaggaaagacggcgccactacaatggagaagcatatgaggatgatgaacatcatcccagaggtggtgttcagtgtcagacctcttaatgggccagtgaataacactcactgctggcatttaatgtgcagtagtgaatgagtgaaggactgtaatcataatatgctcactacttgctcttgtttttgttttaataaactatagtagtgttttaaaaagttaaatgaagaataaacgcaaatataaaagctctgattttgccctgtatgtatgatgacttcagtgtgcaagatgaagtttaatacctgtaaaaactacaaagaagttcccctagcatttctaggccaaaccttgtaattgacttcagctatgtacgtggacaagcttagactgaaatgctaggtatatgtattggcttcagtgtatgacccttcattgttaagctatgaaagtaaaactctgtatttaactggcaatgaggaaaaaaaaattttgtagagaagtgttggtctgtatagttctttatattaagtgggattcattgtaatgcctctgcatttattctgttgcctcagctgttacttgaagatggcgtaatatataatttatcctgtggtatcagtgataaaaatgatacctttctgtaggaggggtttatcataatatgctgcttcttgaaggcttgcacttccagaattgtgtttccttctgctgtgccattcatatatatatacatatatatatataatcttgaccagtcctggtcatttgctcccctccttgtctgtggaccatgataagcccaagtagtgacttcagagctgggtaacagaaattaaagtgaaaagacctttacgtggagaatttgcatgcgtaatataggaaggtgttctttaggtatgttacaggattactttaaaccatttgactttcgctccaaagttatgttggtagtatagcaaattatgatgaatagctttaattgtatgtttaaaagtctcatatgttcacatgcttaaatctgggtatcagaatttaagcaattcttgaaatgtattgtctccttaatatactaattacaaagcatctccanaaaaaaaaaaacaaaaataaccaatacacactaaaaaaaccggggggggacccgcctacaacataaccccgggagggcgcaccccgaagctagagcgacgagccagatggtcctctgaccaaacggccccactgagtcgagctgaataacataccgagcacggccaactgtacaccagagctgcacggacaaacgtgacccggaccactgtggaacgaacaccaatcggcggagccaccatgaggccacgtacaccagccatttaccccacacgcaactaaacactgcagcgatcggtccacacggcagacgccactaacccgcccacctgcagaataca

SEQ ID NO: 297667 - DNA, 2546 bp, Homo sapiens
  misc_feature (2206)..(2206): n is a, c, g, or t
agcggacttccggcgggtgacgcgcccgggttcggctacaaaagaggacggctgcggcgcgccgggcggaactttccagaacgctcggtgagaggcggaggagcggtaactaccccggctgcgcacagctcggcgctccttcccgctccctcacacaccggcctcagcccgcaccggcagtagaagatggtgaaagaaacaacttactacgatgttttgggggtcaaacccaatgctactcaggaagaattgaaaaaggcttataggaaactggctttgaagtaccatcctgataagaacccaaatgaaggagagaaggtaaaaatgttgtacatcagctctcagtaaccctagaagacttatataatggtgcaacaagaaaactggctctgcaaaagaatgtgatttgtgacaaatgtgaaggtagaggaggtaagaaaggagcagtagagtgctgtcccaattgccgaggtactggaatgcaaataagaattcatcagataggacctggaatggttcagcaaattcagtctgtgtgcatggagtgccagggccatggggagcggatcagtcctaaagatagatgtaaaagctgcaacggaaggaagatagttcgagagaagaaaattttagaagttcatattgacaaaggcatgaaagatggccagaagataacattccatggtgaaggagaccaagaaccaggactggagccaggcgatattatcattgtgttagatcagaaggaccatgctgtttttactcgacgaggagaagaccttttcatgtgtatggacatacagctcgttgaagcactgtgtggcttccagaagccaatatctactcttgacaaccgaaccatcgtcatcacctctcatccaggtcagattgtcaagcatggagatatcaagtgtgtactaaatgaaggcatgccaatttatcgtagaccatatgaaaagggtcgcctaatcatcgaatttaaggtaaactttcctgagaatggctttctctctcctgataaactgtctttgctggaaaaactcctacccgagaggaaggaagtggaagagactgatgagatggaccaagtagaactggtggactttgatccaaatcaggaaagacggcgccactacaatggagaagcatatgaggatgatgaacatcatcccagaggtggtgttcagtgtcagacctcttaatgggccagtgaataacactcactgctggcatttaatgtgcagtagtgaatgagtgaaggactgtaatcataatatgctcactacttgctcttgtttttgttttaataaactatagtagtgttttaaaaagttaaatgaagaataaacgcaaatataaaagctctgattttgccctgtatgtatgatgacttcagtgtgcaagatgaagtttaatacctgtaaaaactacaaagaagttcccctagcatttctaggccaaaccttgtaattgacttcagctatgtacgtggacaagcttagactgaaatgctaggtatatgtattggcttcagtgtatgacccttcattgttaagctatgaaagtaaaactctgtatttaactggcaatgaggaaaaaaaaattttgtagagaagtgttggtctgtatagttctttatattaagtgggattcattgtaatgcctctgcatttattctgttgcctcagctgttacttgaagatggcgtaatatataatttatcctgtggtatcagtgataaaaatgatacctttctgtaggaggggtttatcataatatgctgcttcttgaaggcttgcacttccagaattgtgtttccttctgctgtgccattcatatatatatacatatatatatataatcttgaccagtcctggtcatttgctcccctccttgtctgtggaccatgataagcccaagtagtgacttcagagctgggtaacagaaattaaagtgaaaagacctttacgtggagaatttgcatgcgtaatataggaaggtgttctttaggtatgttacaggattactttaaaccatttgactttcgctccaaagttatgttggtagtatagcaaattatgatgaatagctttaattgtatgtttaaaagtctcatatgttcacatgcttaaatctgggtatcagaatttaagcaattcttgaaatgtattgtctccttaatatactaattacaaagcatctccanaaaaaaaaaaacaaaaataaccaatacacactaaaaaaaccggggggggacccgcctacaacataaccccgggagggcgcaccccgaagctagagcgacgagccagatggtcctctgaccaaacggccccactgagtcgagctgaataacataccgagcacggccaactgtacaccagagctgcacggacaaacgtgacccggaccactgtggaacgaacaccaatcggcggagccaccatgaggccacgtacaccagccatttaccccacacgcaactaaacactgcagcgatcggtccacacggcagacgccactaacccgcccacctgcagaataca

SEQ ID NO: 297668 - DNA, 1786 bp, Homo sapiens
agcggacttccggcgggtgacgcgcccgggttcggctacaaaagaggacggctgcggcgcgccgggcggaactttccagaacgctcggtgagaggcggaggagcggtaactaccccggctgcgcacagctcggcgctccttcccgctccctcacacaccggcctcagcccgcaccggcagtagaagatggtgaaagaaacaacttactacgatgttttgggggtcaaacccaatgctactcaggaagaattgaaaaaggcttataggaaactggctttgaagtaccatcctgataagaacccaaatgaaggagagaagtttaaacagatttctcaagcttacgaagttctctctgatgcaaagaaaagggaattatatgacaaaggaggagaacaggcaattaaagagggtggagcaggtggcggttttggctcccccatggacatctttgatatgttttttggaggaggaggaaggatgcagagagaaaggagaggtaaaaatgttgtacatcagctctcagtaaccctagaagacttatataatggtgcaacaagaaaactggctctgcaaaagaatgtgatttgtgacaaatgtgaaggtagaggaggtaagaaaggagcagtagagtgctgtcccaattgccgaggtactggaatgcaaataagaattcatcagataggacctggaatggttcagcaaattcagtctgtgtgcatggagtgccagggccatggggagcggatcagtcctaaagatagatgtaaaagctgcaacggaaggaagatagttcgagagaagaaaattttagaagttcatattgacaaaggcatgaaagatggccagaagataacattccatggtgaaggagaccaagaaccaggactggagccaggcgatattatcattgtgttagatcagaaggaccatgctgtttttactcgacgaggagaagaccttttcatgtgtatggacatacagctcgttgaagcactgtgtggcttccagaagccaatatctactcttgacaaccgaaccatcgtcatcacctctcatccaggtcagattgtcaagcatggagatatcaagtgtgtactaaatgaaggcatgccaatttatcgtagaccatatgaaaagggtcgcctaatcatcgaatttaaggtaaactttcctgagaatggctttctctctcctgataaactgtctttgctggaaaaactcctacccgagaggaaggaagtggaagagactgatgagatggaccaagtagaactggtggactttgatccaaatcaggaaagacggcgccactacaatggagaagcatatgaggatgatgaacatcatcccagaggtggtgttcagtgtcagacctcttaatgggccagtgaataacactcactgctggcatttaatgtgcagtagtgaatgagtgaaggactgtaatcataatatgacgtcacgaattactcgtacacacgagatgtgctaggattcaagagatgtttacaagctctccaggaccaagtagtggattggatggggactgcgctaaagacaatcaaggtgttgagagatgacttcatggcattatgccttccagaaccagatgggcgatgatcctctgtactaagaaacaaatggctgggggacacccagtttaaaagggaaggttctggatctctgggggataggttcaggcatgcccaagcctgaaccatgtcaccatcagcgcaaagccacagctatgagggggagatggtggtgataaaacagacagagtgat

SEQ ID NO: 297669 - DNA, 1484 bp, Homo sapiens
agcggacttccggcgggtgacgcgcccgggttcggctacaaaagaggacggctgcggcgcgccgggcggaactttccagaacgctcggtgagaggcggaggagcggtaactaccccggctgcgcacagctcggcgctccttcccgctccctcacacaccggcctcagcccgcaccggcagtagaagatggtgaaagaaacaacttactacgatgttttgggggtcaaacccaatgctactcaggaagaattgaaaaaggcttataggaaactggctttgaagtaccatcctgataagaacccaaatgaaggagagaagtttaaacagatttctcaagcttacgaagttctctctgatgcaaagaaaagggaattatatgacaaaggaggagaacaggcaattaaagagggtggagcaggtggcggttttggctcccccatggacatctttgatatgttttttggaggaggaggaaggatgcagagagaaaggagaggtaaaaatgttgtacatcagctctcagtaaccctagaagacttatataatggtgcaacaagaaaactggctctgcaaaagaatgtgatttgtgacaaatgtgaaggtagaggaggtaagaaaggagcagtagagtgctgtcccaattgccgaggtactggaatgcaaataagaattcatcagataggacctggaatggttcagcaaattcagtctgtgtgcatggagtgccagggccatggggagcggatcagtcctaaagatagatgtaaaagctgcaacggaaggaagatagttcgagagaagaaaattttagaagttcatattgacaaaggcatgaaagatggccagaagataacattccatggtgaaggagaccaagaaccaggactggagccaggcgatattatcattgtgttagatcagaaggaccatgctgtttttactcgacgaggagaagaccttttcatgtgtatggacatacagctcgttgaagcactgtgtggcttccagaagccaatatctactcttgacaaccgaaccatcgtcatcacctctcatccaggtcagattgtcaagcatggagatatcaagtgtgtactaaatgaaggcatgccaatttatcgtagaccatatgaaaagggtcgcctaatcatcgaatttaaggtaaactttcctgagaatggctttctctctcctgataaactgtctttgctggaaaaactcctacccgagaggaaggaagtggaagagactgatgagatggaccaagtagaactggtggactttgatccaaatcaggaaagacggcgccactacaatggagaagcatatgaggatgatgaacatcatcccagaggtggtgttcagtgtcagacctcttaatgggccagtgaataacactcactgctggcatttaatgtgcagtttaataaactatagtagtgttttaaaaagttaaatgaagaataaacgcaaatataaaagct

SEQ ID NO: 297670 - DNA, 1954 bp, Homo sapiens
  misc_feature (1614)..(1614): n is a, c, g, or t
actctagaggaccactaaatggtgtaggtgccagacaccgttcactgtgcaaggaaatggcatgaaagatggccagaagataacattccatggtgaaggagaccaagaaccaggactggagccaggcgatattatcattgtgttagatcagaaggaccatgctgtttttactcgacgaggagaagaccttttcatgtgtatggacatacagctcgttgaagcactgtgtggcttccagaagccaatatctactcttgacaaccgaaccatcgtcatcacctctcatccaggtcagattgtcaagcatggagatatcaagtgtgtactaaatgaaggcatgccaatttatcgtagaccatatgaaaagggtcgcctaatcatcgaatttaaggtaaactttcctgagaatggctttctctctcctgataaactgtctttgctggaaaaactcctacccgagaggaaggaagtggaagagactgatgagatggaccaagtagaactggtggactttgatccaaatcaggaaagacggcgccactacaatggagaagcatatgaggatgatgaacatcatcccagaggtggtgttcagtgtcagacctcttaatgggccagtgaataacactcactgctggcatttaatgtgcagtagtgaatgagtgaaggactgtaatcataatatgctcactacttgctcttgtttttgttttaataaactatagtagtgttttaaaaagttaaatgaagaataaacgcaaatataaaagctctgattttgccctgtatgtatgatgacttcagtgtgcaagatgaagtttaatacctgtaaaaactacaaagaagttcccctagcatttctaggccaaaccttgtaattgacttcagctatgtacgtggacaagcttagactgaaatgctaggtatatgtattggcttcagtgtatgacccttcattgttaagctatgaaagtaaaactctgtatttaactggcaatgaggaaaaaaaaattttgtagagaagtgttggtctgtatagttctttatattaagtgggattcattgtaatgcctctgcatttattctgttgcctcagctgttacttgaagatggcgtaatatataatttatcctgtggtatcagtgataaaaatgatacctttctgtaggaggggtttatcataatatgctgcttcttgaaggcttgcacttccagaattgtgtttccttctgctgtgccattcatatatatatacatatatatatataatcttgaccagtcctggtcatttgctcccctccttgtctgtggaccatgataagcccaagtagtgacttcagagctgggtaacagaaattaaagtgaaaagacctttacgtggagaatttgcatgcgtaatataggaaggtgttctttaggtatgttacaggattactttaaaccatttgactttcgctccaaagttatgttggtagtatagcaaattatgatgaatagctttaattgtatgtttaaaagtctcatatgttcacatgcttaaatctgggtatcagaatttaagcaattcttgaaatgtattgtctccttaatatactaattacaaagcatctccanaaaaaaaaaaacaaaaataaccaatacacactaaaaaaaccggggggggacccgcctacaacataaccccgggagggcgcaccccgaagctagagcgacgagccagatggtcctctgaccaaacggccccactgagtcgagctgaataacataccgagcacggccaactgtacaccagagctgcacggacaaacgtgacccggaccactgtggaacgaacaccaatcggcggagccaccatgaggccacgtacaccagccatttaccccacacgcaactaaacactgcagcgatcggtccacacggcagacgccactaacccgcccacctgcagaataca

SEQ ID NO: 297671 - DNA, 1367 bp, Homo sapiens
agcggacttccggcgggtgacgcgcccgggttcggctacaaaagaggacggctgcggcgcgccgggcggaactttccagaacgctcggtgagaggcggaggagcggtaactaccccggctgcgcacagctcggcgctccttcccgctccctcacacaccggcctcagcccgcaccggcagtagaagatggtgaaagaaacaacttactacgatgttttgggggtcaaacccaatgctactcaggaagaattgaaaaaggcttataggaaactggctttgaagtaccatcctgataagaacccaaatgaaggagagaagtttaaacagatttctcaagcttacgaagttctctctgatgcaaagaaaagggaattatatgacaaaggaggagaacaggcaattaaagagggtggagcaggtggcggttttggctcccccatggacatctttgatatgttttttggaggaggaggaaggatgcagagagaaaggagaggtaaaaatgttgtacatcagctctcagtaaccctagaagacttatataatggtgcaacaagaaaactggctctgcaaaagaatgtgatttgtgacaaatgtgaaggtagaggaggtaagaaaggagcagtagagtgctgtcccaattgccgaggtactggaatgcaaataagaattcatcagataggacctggaatggttcagcaaattcagtctgtgtgcatggagtgccagggccatggggagcggatcagtcctaaagatagatgtaaaagctgcaacggaaggaagatagttcgagagaagaaaattttagaagttcatattgacaaaggcatgaaagatggccagaagataacattccatggtgaaggagaccaagaaccaggactggagccaggcgatattatcattgtgttagatcagaaggaccatgctgtttttactcgacgaggagaagaccttttcatgtgtatggacatacagctcgttgaagcactgtgtggcttccagaagccaatatctactcttgacaaccgaaccatcgtcatcacctctcatccaggtcagattgtcaagcatggagatatcaagtgtgtactaaatgaaggcatgccaatttatcgtagaccatatgaaaagggtcgcctaatcatcgaatttaaggtaagctgtaatgtactttaagaatacttgagaacaattggcttactaaaatctgataaaaaagtaaaatttcagccaggtgcaagtagctcatgcctgtaatccccgcattttgagaggctgaggcaggaggatcccttgagccctggagttttgagaacagcctgggcaacatagtgaaaccctgtctctttaaaaaaaaaaaa

SEQ ID NO: 297672 - DNA, 1540 bp, Homo sapiens
  misc_feature (997)..(998): n is a, c, g, or t
  misc_feature (1002)..(1005): n is a, c, g, or t
  misc_feature (1009)..(1010): n is a, c, g, or t
  misc_feature (1013)..(1013): n is a, c, g, or t
  misc_feature (1015)..(1015): n is a, c, g, or t
  misc_feature (1052)..(1052): n is a, c, g, or t
agcggacttccggcgggtgacgcgcccgggttcggctacaaaagaggacggctgcggcgcgccgggcggaactttccagaacgctcggtgagaggcggaggagcggtaactaccccggctgcgcacagctcggcgctccttcccgctccctcacacaccggcctcagcccgcaccggcagtagaagatggtgaaagaaacaacttactacgatgttttgggggtcaaacccaatgctactcaggaagaattgaaaaaggcttataggaaactggctttgaagtaccatcctgataagaacccaaatgaaggagagaagtttaaacagatttctcaagcttacgaagttctctctgatgcaaagaaaagggaattatatgacaaaggaggagaacaggcaattaaagagggtggagcaggtggcggttttggctcccccatggacatctttgatatgttttttggaggaggaggaaggatgcagagagaaaggagaggtaaaaatgttgtacatcagctctcagtaaccctagaagacttatataatggtgcaacaagaaaactggctctgcaaaagaatgtgatttgtgacaaatgtgaaggtagaggaggtaagaaaggagcagtagagtgctgtcccaattgccgaggtactggaatgcaaataagaattcatcagataggacctggaatggttcagcaaattcagtctgtgtgcatggagtgccagggccatggggagcggatcagtcctaaagatagatgtaaaagctgcaacggaaggaagatagttcgagagaagaaaattttagaagttcatattgacaaaggcatgaaagatggccagaagataacattccatggtgaaggagaccaagaaccaggactggagccaggcgatattatcattgtgttagatcagaaggaccatgctgtttttactcgatgattaggcgacccttttcatatggtctacgataaattggcatgccttcatnnagtnnnnactnnatntntccatgcttgacaatctgacctggatgagaggtgatnacgatggtcagattgtcaagcatggagatatcaagtgtgtactaaatgaaggcatgccaatttatcgtagaccatatgaaaagggtcgcctaatcatcgaatttaaggtaaactttcctgagaatggctttctctctcctgataaactgtctttgctggaaaaactcctacccgagaggaaggaagtggaagagactgatgagatggaccaagtagaactggtggactttgatccaaatcaggaaagacggcgccactacaatggagaagcatatgaggatgatgaacatcatcccagaggtggtgttcagtgtcagacctcttaatgggccagtgaataacactcactgctggcatttaatgtgcagtagtgaatgagtgaaggactgtaatcataatatgctcactacttgctcttgtttttgttttaataaactatagtagtgttttaaaaagttaaatgaagaataaacgcaaatataaaagct

SEQ ID NO: 297673 - DNA, 1742 bp, Homo sapiens
  misc_feature (1402)..(1402): n is a, c, g, or t
gaactctagttcagagtgtgctatgcactgtgcctttttagagcctgttctaacctgagattggcagattcacctaaatattacgtgtttacatgtgtttttctggggaaaatgggtccatgatactctaagggagctaatgatgaaatcagattgaacagtgaaagtttcttttgaaggtaaactttcctgagaatggctttctctctcctgataaactgtctttgctggaaaaactcctacccgagaggaaggaagtggaagagactgatgagatggaccaagtagaactggtggactttgatccaaatcaggaaagacggcgccactacaatggagaagcatatgaggatgatgaacatcatcccagaggtggtgttcagtgtcagacctcttaatgggccagtgaataacactcactgctggcatttaatgtgcagtagtgaatgagtgaaggactgtaatcataatatgctcactacttgctcttgtttttgttttaataaactatagtagtgttttaaaaagttaaatgaagaataaacgcaaatataaaagctctgattttgccctgtatgtatgatgacttcagtgtgcaagatgaagtttaatacctgtaaaaactacaaagaagttcccctagcatttctaggccaaaccttgtaattgacttcagctatgtacgtggacaagcttagactgaaatgctaggtatatgtattggcttcagtgtatgacccttcattgttaagctatgaaagtaaaactctgtatttaactggcaatgaggaaaaaaaaattttgtagagaagtgttggtctgtatagttctttatattaagtgggattcattgtaatgcctctgcatttattctgttgcctcagctgttacttgaagatggcgtaatatataatttatcctgtggtatcagtgataaaaatgatacctttctgtaggaggggtttatcataatatgctgcttcttgaaggcttgcacttccagaattgtgtttccttctgctgtgccattcatatatatatacatatatatatataatcttgaccagtcctggtcatttgctcccctccttgtctgtggaccatgataagcccaagtagtgacttcagagctgggtaacagaaattaaagtgaaaagacctttacgtggagaatttgcatgcgtaatataggaaggtgttctttaggtatgttacaggattactttaaaccatttgactttcgctccaaagttatgttggtagtatagcaaattatgatgaatagctttaattgtatgtttaaaagtctcatatgttcacatgcttaaatctgggtatcagaatttaagcaattcttgaaatgtattgtctccttaatatactaattacaaagcatctccanaaaaaaaaaaacaaaaataaccaatacacactaaaaaaaccggggggggacccgcctacaacataaccccgggagggcgcaccccgaagctagagcgacgagccagatggtcctctgaccaaacggccccactgagtcgagctgaataacataccgagcacggccaactgtacaccagagctgcacggacaaacgtgacccggaccactgtggaacgaacaccaatcggcggagccaccatgaggccacgtacaccagccatttaccccacacgcaactaaacactgcagcgatcggtccacacggcagacgccactaacccgcccacctgcagaataca

SEQ ID NO: 297674 - DNA, 241 bp, Homo sapiens
attcgtgatttgaaaaatataaatatgtgtcatattttatgcagacgaggagaagaccttttcatgtgtatggacatacagctcgttgaagcactgtgtggcttccagaagccaatatctactcttgacaaccgaaccatcgtcatcacctctcatccaggtatgggaactaggcaagcttaaacttctcttttctattctagtattttccttgtctcctgttaacaaagtgtagtatagg

SEQ ID NO: 297675 - DNA, 998 bp, Homo sapiens
tcaattggaggaacaggcctggaaaagaataatgagattgaagagggtcagtttgaggactcaggttggggcaggtttggattaagttaggaaaaggatctgggagggactctgttcagtgtaggtcaactgagcattatgtagcccaaagataaatttaaaccctgcttcaagcttacaatctagtggggaggcagacccatacctaattaactgattcaaggcatgatgagtaaactttaagatgattacagaaagaggggagattaagtccatttgaaagcatccagggagcctctgaggagacagcatttgaacttgctctaatgaatgggttcactaggtggaggtggatggaaaggttccataggcgaataacacgtcttgagcgagcctgacaagtcagaaaatgcagtatgttctgggaaaggagcgtcctgagggagaagaagcacaggtgtgagggaacatgtgatgaagaaaggaccacagaaagtcaaggtcagagattggactgcatcctgtgggcagtggtccaggtgacgatgaaaaagagggagaacaggtgagtgctgcagtacagacaaggagtaagaaaacggccatcatcttgtgaattaatacctactgtgtgttaaccagcccttttcctaacaccacaaatcctctcaacgtctgtccaaaaggtgggtggtggtggccaggcacctcactcctgtaatcacagcactttgggaggccaaggtgggagcactttgggaggatcacttgaggccaggagttcgagaccagcctggccaacatggtgaaaccccgtctctactaaaaatataaaaactagctgggtgtggtcttgggcacctgtaatcccagctactcaggtgtctgaggcacaagaatcacttgaacccgggaggcagaggttgcagtgagctgagatcatgcctctgctcttcaagtctgggtgacagagcaggactctggttccaaaaaaaaaa

SEQ ID NO: 297676 - DNA, 2775 bp, Homo sapiens
atccggaagtggattgcgagccaggaggaggaagccggcggtggccccgtcagcagccggctgctgagaggccggtaggcggcggcggtcccgaggggcggcggccgcgctgctccctgagaacgggtcccgcagctgggcaggcgggcggcctgagggcgcggagccatgaagctgtacagcctcagcgtcctctacaaaggcgaggccaaggtggtgctgctcaaagccgcatacgatgtgtcttccttcagctttttccagagatccagcgttcaggaattcatgaccttcacgagtcaactgattgtggagcgctcatcgaaaggcactagagcttctgtcaaagaacaagactatctgtgccacgtctacgtccggaatgatagtcttgcaggtgtggtcattgctgacaatgaatacccatcccgggtggcctttaccttgctggagaaggtactagatgaattctccaagcaagtcgacaggatagactggccagtaggatcccctgctacaatccattacccagccctggatggtcacctcagtagataccagaacccacgagaagctgatcccatgactaaagtgcaggccgaactagatgagaccaaaatcattctgcacaacaccatggagtctctgttagagcgaggtgagaagctagatgacttggtgtccaaatccgaggtgctgggaacacagtctaaagccttctataaaactgcccggaaacaaaactcatgctgtgccatcatgtgatgcagcctgccagaggcccaatgctggaatggcaccatcattcacatcagaactgcagcccctggaaaagaagagacagccatagacgaggagccagagtgggggcagactggccatttttattttgaagttcctgcgagaaatggatggtggaagggtggcgaatgttcaaattcatatgtgtggtagtgattcttggaaagaatttgaggtccccaaaggtgtatttttgggcaaatgaaaccataaactccgactggcttctgtagatgccaaagggctctttttcagctaaccctgggaaggctctgtgggagggaggtcggagccagctgtttctcgatctttggtatatctttggatcttatttgtacattaatgatattaacactccagtggggggtggggagtccctgatgctagggctggggtgggtggagtttgaagactcttgggaaagcctctcctggggccactgttgggggtgggagtgagcccaccacagaggccacaggcaggcccccacttcaggcccaaggcctggggcggggggaacagtcactgggtctcagattctgagactgttgtttagcttacctttctgctaggattggcttcccgcagagggcagggcccatcctaagcagcttccaagtcccacaaaggtggcttgtgggaggatttggaaggagctgcattgtgggcggggagtgtgtgggttgggttcgtaccagcaagtagactaggaactgagcccaggaaagggggatgttttcctggtgtttggatggtcagctgggagtgtccatcatcaggggaagatcaaacacaggtgcactcagctgcccagggcctctgggacacttgccttgacttgcaacttgccttgaacatcacgatcaaagcagcaggtgctgtggtctctcaaaattgatttttatttgactctgtggctctaagactgccttgaaccgcctgaggcctatgcatctgaacaagtgggtctctcccttgagcaccaggagtgggtgccagccggccccgaggattcccagcaccccacctatggtcttgccagcataggcttgctagttccttcttggtcagaggtagctgcagaggggggaggccaagggtttggtctaagctgtgccctgccacctggcaggaggcccactcactgcccaagtcatggcaacaggctggagcagcccaggagatgggcctaaaatgttctggatcccttgggtcctagtgttatgttccagtctgcccacctgtgctcaggatgcagccctgggatccagcacccatggaagcttctgctgggatggtgtcacctatgggttttgaaccagtgtggtatggtccttgggagctctgctctgagcttgccacactgctgagagcacccactgtcctgaccagagtctcagtggtcctgacccccaatgtgggcaggggctgggcaggagggtggggtctgctgtgggttcagaggactccacctcctggctggtttacctgctgctgcccattttctctgggtactgctggccagaggactttagcctacccctgaagagcctgtccatgtcattttcctactgccatagataccctaagcccagggccccttgaggcccagactcagcctgcccactggtgccggagacggagtggagtgggcctggatccgagggatgctacctctccctttcccacttgaggaccctggggagagatgggggcggggaaaatggaggtatgaatttggggtaagaggaagtgagatctccgcttgcaggtcagcccctgccttgcagggcgggctggcttgactcaggccctgtgagatagagggcccagcccagccccacccacagatcccctgctcctgttgtgttctgttgtaaatcatttggcgagactgtattttagtaactgctgcctaacttccctgtgttctatttgagaggcgcctgtctggataaagttgtcttgaaattt

SEQ ID NO: 297677 - DNA, 903 bp, Homo sapiens
atccggaagtggattgcgagccaggaggaggaagccggcggtggccccgtcagcagccggctgctgagaggccggtaggcggcggcggtcccgaggggcggcggccgcgctgctccctgagaacgggtcccgcagctgggcaggcgggcggcctgagggcgcggagccatgaagctgtacagcctcagcgtcctctacaaaggcgaggccaaggtggtgctgctcaaagccgcatacgatgtgtcttccttcagctttttccagagatccagcgttcaggaattcatgaccttcacgagtcaactgattgtggagcgctcatcgaaaggcactagagcttctgtcaaagaacaagactatctgtgccacgtctacgtccggaatgatagtcttgcaggtgtggtcattgctgacaatgaatacccatcccgggtggcctttaccttgctggagaaggtactagatgaattctccaagcaagtcgacaggatagactggccagtaggatcccctgctacaatccattacccagccctggatggtcacctcagtagataccagaacccacgagaagctgatcccatgactaaagtgcaggccgaactagatgagaccaaaatcattctggcccggaaacaaaactcatgctgtgccatcatgtgatgcagcctgccagaggcccaatgctggaatggcaccatcattcacatcagaactgcagcccctggaaaagaagagacagccatagacgaggagccagagtgggggcagactggccatttttattttgaagttcctgcgagaatgtggggaagggggccatgtccattctattggtggcgctctgggcaaattgggcccaggtttttgggcatgaactaccaggttgatcaaggtttatac

SEQ ID NO: 297678 - DNA, 802 bp, Homo sapiens
atccggaagtggattgcgagccaggaggaggaagccggcggtggccccgtcagcagccggctgctgagaggccggtaggcggcggcggtcccgaggggcggcggccgcgctgctccctgagaacgggtcccgcagctgggcaggcgggcggcctgagggcgcggagccatgaagctgtacagcctcagcgtcctctacaaaggcgaggccaaggtggtgctgctcaaagccgcatacgatgtgtcttccttcagctttttccagagatccagcgttcaggaattcatgaccttcacgagtcaactgattgtggagcgctcatcgaaaggcactagagcttctgtcaaagaacaagactatctgtgccacgtctacgtccggaatgatagtcttgcaggtgtggtcattgctgacaatgaatacccatcccgggtggcctttaccttgctggagaaggtgagttttttatttgcctctcctggacttggatgatgaatgggcacatttatggactgggacaggggttgatggcagtccctgagacataagggatgaaatgatgtgtccaaagtcaacacatttttcagcccccttccctgcaacccaagagacaatttggcatccctgtatgggtttcctccccggtgctgtccctcatgtgagctgggtctaggccactgagtcatagcatctattctctgggatgggaccctcggagacagctgtgccttgtgttctcgccccctgtgcttctgctcaaggagtctccctcttgaatgccttcactctccccattgcctcc

SEQ ID NO: 297679 - DNA, 447 bp, Homo sapiens
cactctagaggatctcggcggatggggtctgtagaacgtgcctggcaattgcggggatcacccgcctcatcctcccaaaatgctgggattacaggcgtgagccactgtgcccggcccaggctgtggtttttaacctgtgaaagtttgtccagcttcctcagttttaggttttgtttgcaggtagccactccagtcctgactttattatttttcactctttcctagaacccacgagaagctgatcccatgactaaagtgcaggccgaactagatgagaccaaaatcattctggtaagcaggaagatggagagcaagcccaagaactgaggcgggggtgcgatttccactggccaggcatgcacagatccatcctcgttttaatataatagtaaccacggcactctccagcaagtgggattgcccaccccttcccccaccccgggcatc

SEQ ID NO: 297680 - DNA, 232 bp, Homo sapiens
tctggggatgttaatttctgggatgcggttggggttggggggtgcggtgtgggtcactctccaacccagtacaatcatatagtgcccagctactcttttttccaaagctccatgcacacgcacatgtgcgtgcacacacacacacacacacaaatgtatatataaatgtgtgtgtatatatatatatgagttttcctggagtgctggttatctaagcctgtgctggggacag

SEQ ID NO: 297681 - DNA, 3067 bp, Homo sapiens
atccggaagtggattgcgagccaggaggaggaagccggcggtggccccgtcagcagccggctgctgagaggccggtaggcggcggcggtcccgaggggcggcggccgcgctgctccctgagaacgggtcccgcagctgggcaggcgggcggcctgagggcgcggagccatgaagctgtacagcctcagcgtcctctacaaaggcgaggccaaggtggtgctgctcaaagccgcatacgatgtgtcttccttcagctttttccagagatccagcgttcaggaattcatgaccttcacgagtcaactgattgtggagcgctcatcgaaaggcactagagcttctgtcaaagaacaagactatctgtgccacgtctacgtccggaatgatagtcttgcaggtgtggtcattgctgacaatgaatacccatcccgggtggcctttaccttgctggagaaggtactagatgaattctccaagcaagtcgacaggatagactggccagtaggatcccctgctacaatccattacccagccctggatggtcacctcagtagataccagaacccacgagaagctgatcccatgactaaagtgcaggccgaactagatgagaccaaaatcattctgcacaacaccatggagtctctgttagagcgaggtgagaagctagatgacttggtgtccaaatccgaggtgctgggaacacagtctaaagccttctataaaactgcccggaaacaaaactcatgctgtgccatcatgtgatgcagcctgccagaggcccaatgctggaatggcaccatcattcacatcagaactgcagcccctggaaaagaagagacagccatagacgaggagccagagtgggggcagactggccatttttattttgaagttcctgcgagaaatggatggtggaagggtggcgaatgttcaaattcatatgtgtggtagtgattcttggaaagaatttgaggtccccaaaggtgtatttttgggcaaatgaaaccataaactccgactggcttctgtagatgccaaagggctctttttcagctaaccctgggaaggctctgtgggagggaggtcggagccagctgtttctcgatctttggtatatctttggatcttatttgtacattaatgatattaacactccagtggggggtggggagtccctgatgctagggctggggtgggtggagtttgaagactcttgggaaagcctctcctggggccactgttgggggtgggagtgagcccaccacagaggccacaggcaggcccccacttcaggcccaaggcctggggcggggggaacagtcactgggtctcagattctgagactgttgtttagcttacctttctgctaggattggcttcccgcagagggcagggcccatcctaagcagcttccaagtcccacaaaggtggcttgtgggaggatttggaaggagctgcattgtgggcggggagtgtgtgggttgggttcgtaccagcaagtagactaggaactgagcccaggaaagggggatgttttcctggtgtttggatggtcagctgggagtgtccatcatcaggggaagatcaaacacaggtgcactcagctgcccagggcctctgggacacttgccttgacttgcaacttgccttgaacatcacgatcaaagcagcaggtgctgtggtctctcaaaattgatttttatttgactctgtggctctaagactgccttgaaccgcctgaggcctatgcatctgaacaagtgggtctctcccttgagcaccaggagtgggtgccagccggccccgaggattcccagcaccccacctatggtcttgccagcataggcttgctagttccttcttggtcagaggtagctgcagaggggggaggccaagggtttggtctaagctgtgccctgccacctggcaggaggcccactcactgcccaagtcatggcaacaggctggagcagcccaggagatgggcctaaaatgttctggatcccttgggtcctagtgttatgttccagtctgcccacctgtgctcaggatgcagccctgggatccagcacccatggaagcttctgctgggatggtgtcacctatgggttttgaaccagtgtggtatggtccttgggagctctgctctgagcttgccacactgctgagagcacccactgtcctgaccagagtctcagtggtcctgacccccaatgtgggcaggggctgggcaggagggtggggtctgctgtgggttcagaggactccacctcctggctggtttacctgctgctgcccattttctctgggtactgctggccagaggactttagcctacccctgaagagcctgtccatgtcattttcctactgccatagataccctaagcccagggccccttgaggcccagactcagcctgcccactggtgccggagacggagtggagtgggcctggatccgagggatgctacctctccctttcccacttgaggaccctggggagagatgggggcggggaaaatggaggtatgaatttggggtaagaggaagtgagatctccgcttgcaggtcagcccctgccttgcagggcgggctggcttgactcaggccctgtgagatagagggcccagcccagccccacccacagatcccctgctcctgttgtgttctgttgtaaatcatttggcgagactgtattttagtaactgctgcctaacttccctgtgttctatttgagaggcgcctgtctggataaagttgtcttgaaatttacaaaaaaaaaaaaaaaaaaaaaaaaaaaaaaaaaaaaaaaaaaaaaaaacagcgggggattattatatgggggggggaaaaaaggggttataaagggggccaagtgggtccaataggggttttaccataggaccccatatttttttctgcgcaccaaggggagtaatatcgcgagggttccccaatataaggggcgcagcgacataaattgacgataaccacggggtaccgcgcgatttatgtccgcagaaaactgtagatacacaatacaaaggacacgacacagggaga

SEQ ID NO: 297682 - DNA, 3120 bp, Homo sapiens
atccggaagtggattgcgagccaggaggaggaagccggcggtggccccgtcagcagccggctgctgagaggccggtaggcggcggcggtcccgaggggcggcggccgcgctgctccctgagaacgggtcccgcagctgggcaggcgggcggcctgagggcgcggagccatgaagctgtacagcctcagcgtcctctacaaaggcgaggccaaggtggtgctgctcaaagccgcatacgatgtgtcttccttcagctttttccagagatccagcgttcaggaattcatgaccttcacgagtcaactgattgtggagcgctcatcgaaaggcactagagcttctgtcaaagaacaagactatctgtgccacgtctacgtccggaatgatagtcttgcaggtgtggtcattgctgacaatgaatacccatcccgggtggcctttaccttgctggagaaggtactagatgaattctccaagcaagtcgacaggatagactggccagtaggatcccctgctacaatccattacccagccctggatggtcacctcagtagataccagaacccacgagaagctgatcccatgactaaagtgcaggccgaactagatgagaccaaaatcattctgcacaacaccatggagtctctgttagagcgaggtgagaagctagatgacttggtgtccaaatccgaggtgctgggaacacagtctaaagccttctataaaactgcccggaaacaaaactcatgctgtgccatcatgtgatgcagcctgccagaggcccaatgctggaatggcaccatcattcacatcagaactgcagcccctggaaaagaagagacagccatagacgaggagccagagtgggggcagactggccatttttattttgaagttcctgcgagaaatggatggtggaagggtggcgaatgttcaaattcatatgtgtggtagtgattcttggaaagaatttgaggtccccaaaggtgtatttttgggcaaatgaaaccataaactccgactggcttctgtagatgccaaagggctctttttcagctaaccctgggaaggctctgtgggagggaggtcggagccagctgtttctcgatctttggtatatctttggatcttatttgtacattaatgatattaacactccagtggggggtggggagtccctgatgctagggctggggtgggtggagtttgaagactcttgggaaagcctctcctggggccactgttgggggtgggagtgagcccaccacagaggccacaggcaggcccccacttcaggcccaaggcctggggcggggggaacagtcactgggtctcagattctgagactgttgtttagcttacctttctgctaggattggcttcccgcagagggcagggcccatcctaagcagcttccaagtcccacaaaggtggcttgtgggaggatttggaaggagctgcattgtgggcggggagtgtgtgggttgggttcgtaccagcaagtagactaggaactgagcccaggaaagggggatgttttcctggtgtttggatggtcagctgggagtgtccatcatcaggggaagatcaaacacaggtgcactcagctgcccagggcctctgggacacttgccttgacttgcaacttgccttgaacatcacgatcaaagcagcaggtgctgtggtctctcaaaattgatttttatttgactctgtggctctaagactgccttgaaccgcctgaggcctatgcatctgaacaagtgggtctctcccttgagcaccaggagtgggtgccagccggccccgaggattcccagcaccccacctatggtcttgccagcataggcttgctagttccttcttggtcagaggtagctgcagaggggggaggccaagggtttggtctaagctgtgccctgccacctggcaggaggcccactcactgcccaagtcatggcaacaggctggagcagcccaggagatgggcctaaaatgttctggatcccttgggtcctagtgttatgttccagtctgcccacctgtgctcaggatgcagccctgggatccagcacccatggaagcttctgctgggatggtgtcacctatgggttttgaaccagtgtggtatggtccttgggagctctgctctgagcttgccacactgctgagagcacccactgtcctgaccagagtctcagtggtcctgacccccaatgtgggcaggggctgggcaggagggtggggtctgctgtgggttcagaggactccacctcctggctggtttacctgctgctgcccattttctctgggtactgctggccagaggactttagcctacccctgaagagcctgtccatgtcattttcctactgccatagataccctaagcccagggccccttgaggcccagactcagcctgcccactggtgccggagacggagtggagtgggcctggatccgagggatgctacctctccctttcccacttgaggaccctggggagagatgggggcggggaaaatggaggtatgaatttggggtaagaggaagtgagatctccgcttgcaggtcagcccctgccttgcagggcgggctggcttgactcaggccctgtgagatagagggcccagcccagccccacccacagatcccctgctcctgttgtgttctgttgtaaatcatttggcgagactgtattttagtaactgctgcctaacttccctgtgttctatttgagaggcgcctgtctggataaagttgtcttgaaatttgaacacaagaaaggacaaaaagagaacaaaaaaaacaaagttgggggggggcttgggcccccgcgaaaaaaacgtgttcgcagaacaagtcggctgtggggggcggcgggccccaacgagaggcaaagggtcgaccactgtggcccacaggcgggcgccccaaagaggaaaccccgtggcgaaccaggaacacaagggccggggggaataccagaccacaaattaaaaacaccgccggggcggcaccacgaccgcgtccggaaagcacccaagaaggaaggcagaggggcagacaacgggacacaccacacaggaggccaaggcggagcgtcagaaacaatagcg

SEQ ID NO: 297683 - DNA, 3036 bp, Homo sapiens
atccggaagtggattgcgagccaggaggaggaagccggcggtggccccgtcagcagccggctgctgagaggccggtaggcggcggcggtcccgaggggcggcggccgcgctgctccctgagaacgggtcccgcagctgggcaggcgggcggcctgagggcgcggagccatgaagctgtacagcctcagcgtcctctacaaaggcgaggccaaggtggtgctgctcaaagccgcatacgatgtgtcttccttcagctttttccagagatccagcgttcaggaattcatgaccttcacgagtcaactgattgtggagcgctcatcgaaaggcactagagcttctgtcaaagaacaagactatctgtgccacgtctacgtccggaatgatagtcttgcaggtgtggtcattgctgacaatgaatacccatcccgggtggcctttaccttgctggagaaggtactagatgaattctccaagcaagtcgacaggatagactggccagtaggatcccctgctacaatccattacccagccctggatggtcacctcagtagataccagaacccacgagaagctgatcccatgactaaagtgcaggccgaactagatgagaccaaaatcattctgcacaacaccatggagtctctgttagagcgaggtgagaagctagatgacttggtgtccaaatccgaggtgctgggaacacagtctaaagccttctataaaactgcccggaaacaaaactcatgctgtgccatcatgtgatgcagcctgccagaggcccaatgctggaatggcaccatcattcacatcagaactgcagcccctggaaaagaagagacagccatagacgaggagccagagtgggggcagactggccatttttattttgaagttcctgcgagaaatggatggtggaagggtggcgaatgttcaaattcatatgtgtggtagtgattcttggaaagaatttgaggtccccaaaggtgtatttttgggcaaatgaaaccataaactccgactggcttctgtagatgccaaagggctctttttcagctaaccctgggaaggctctgtgggagggaggtcggagccagctgtttctcgatctttggtatatctttggatcttatttgtacattaatgatattaacactccagtggggggtggggagtccctgatgctagggctggggtgggtggagtttgaagactcttgggaaagcctctcctggggccactgttgggggtgggagtgagcccaccacagaggccacaggcaggcccccacttcaggcccaaggcctggggcggggggaacagtcactgggtctcagattctgagactgttgtttagcttacctttctgctaggattggcttcccgcagagggcagggcccatcctaagcagcttccaagtcccacaaaggtggcttgtgggaggatttggaaggagctgcattgtgggcggggagtgtgtgggttgggttcgtaccagcaagtagactaggaactgagcccaggaaagggggatgttttcctggtgtttggatggtcagctgggagtgtccatcatcaggggaagatcaaacacaggtgcactcagctgcccagggcctctgggacacttgccttgacttgcaacttgccttgaacatcacgatcaaagcagcaggtgctgtggtctctcaaaattgatttttatttgactctgtggctctaagactgccttgaaccgcctgaggcctatgcatctgaacaagtgggtctctcccttgagcaccaggagtgggtgccagccggccccgaggattcccagcaccccacctatggtcttgccagcataggcttgctagttccttcttggtcagaggtagctgcagaggggggaggccaagggtttggtctaagctgtgccctgccacctggcaggaggcccactcactgcccaagtcatggcaacaggctggagcagcccaggagatgggcctaaaatgttctggatcccttgggtcctagtgttatgttccagtctgcccacctgtgctcaggatgcagccctgggatccagcacccatggaagcttctgctgggatggtgtcacctatgggttttgaaccagtgtggtatggtccttgggagctctgctctgagcttgccacactgctgagagcacccactgtcctgaccagagtctcagtggtcctgacccccaatgtgggcaggggctgggcaggagggtggggtctgctgtgggttcagaggactccacctcctggctggtttacctgctgctgcccattttctctgggtactgctggccagaggactttagcctacccctgaagagcctgtccatgtcattttcctactgccatagataccctaagcccagggccccttgaggcccagactcagcctgcccactggtgccggagacggagtggagtgggcctggatccgagggatgctacctctccctttcccacttgaggaccctggggagagatgggggcggggaaaatggaggtatgaatttggggtaagaggaagtgagatctccgcttgcaggtcagcccctgccttgcagggcgggctggcttgactcaggccctgtgagatagagggcccagcccagccccacccacagatcccctgctcctgttgtgttctgttgtaaatcatttggcgagactgtattttagtaactgctgcctaacttccctgtgttctatttgagaggcgcctgtctggataaagttgtcttgaaatttaaaaaaaaaaaaaaaaaaacagcgggggattattatatgggggggggaaaaaaggggttataaagggggccaagtgggtccaataggggttttaccataggaccccatatttttttctgcgcaccaaggggagtaatatcgcgagggttccccaatataaggggcgcagcgacataaattgacgataaccacggggtaccgcgcgatttatgtccgcagaaaactgtagatacacaatacaaaggacacgacacagggaga

SEQ ID NO: 297684 - DNA, 3118 bp, Homo sapiens
atccggaagtggattgcgagccaggaggaggaagccggcggtggccccgtcagcagccggctgctgagaggccggtaggcggcggcggtcccgaggggcggcggccgcgctgctccctgagaacgggtcccgcagctgggcaggcgggcggcctgagggcgcggagccatgaagctgtacagcctcagcgtcctctacaaaggcgaggccaaggtggtgctgctcaaagccgcatacgatgtgtcttccttcagctttttccagagatccagcgttcaggaattcatgaccttcacgagtcaactgattgtggagcgctcatcgaaaggcactagagcttctgtcaaagaacaagactatctgtgccacgtctacgtccggaatgatagtcttgcaggtgtggtcattgctgacaatgaatacccatcccgggtggcctttaccttgctggagaaggtactagatgaattctccaagcaagtcgacaggatagactggccagtaggatcccctgctacaatccattacccagccctggatggtcacctcagtagataccagaacccacgagaagctgatcccatgactaaagtgcaggccgaactagatgagaccaaaatcattctgcacaacaccatggagtctctgttagagcgaggtgagaagctagatgacttggtgtccaaatccgaggtgctgggaacacagtctaaagccttctataaaactaaaatatttaattgacaaggatgggtgctgctgactgccgctttctctcaggcccggaaacaaaactcatgctgtgccatcatgtgatgcagcctgccagaggcccaatgctggaatggcaccatcattcacatcagaactgcagcccctggaaaagaagagacagccatagacgaggagccagagtgggggcagactggccatttttattttgaagttcctgcgagaaatggatggtggaagggtggcgaatgttcaaattcatatgtgtggtagtgattcttggaaagaatttgaggtccccaaaggtgtatttttgggcaaatgaaaccataaactccgactggcttctgtagatgccaaagggctctttttcagctaaccctgggaaggctctgtgggagggaggtcggagccagctgtttctcgatctttggtatatctttggatcttatttgtacattaatgatattaacactccagtggggggtggggagtccctgatgctagggctggggtgggtggagtttgaagactcttgggaaagcctctcctggggccactgttgggggtgggagtgagcccaccacagaggccacaggcaggcccccacttcaggcccaaggcctggggcggggggaacagtcactgggtctcagattctgagactgttgtttagcttacctttctgctaggattggcttcccgcagagggcagggcccatcctaagcagcttccaagtcccacaaaggtggcttgtgggaggatttggaaggagctgcattgtgggcggggagtgtgtgggttgggttcgtaccagcaagtagactaggaactgagcccaggaaagggggatgttttcctggtgtttggatggtcagctgggagtgtccatcatcaggggaagatcaaacacaggtgcactcagctgcccagggcctctgggacacttgccttgacttgcaacttgccttgaacatcacgatcaaagcagcaggtgctgtggtctctcaaaattgatttttatttgactctgtggctctaagactgccttgaaccgcctgaggcctatgcatctgaacaagtgggtctctcccttgagcaccaggagtgggtgccagccggccccgaggattcccagcaccccacctatggtcttgccagcataggcttgctagttccttcttggtcagaggtagctgcagaggggggaggccaagggtttggtctaagctgtgccctgccacctggcaggaggcccactcactgcccaagtcatggcaacaggctggagcagcccaggagatgggcctaaaatgttctggatcccttgggtcctagtgttatgttccagtctgcccacctgtgctcaggatgcagccctgggatccagcacccatggaagcttctgctgggatggtgtcacctatgggttttgaaccagtgtggtatggtccttgggagctctgctctgagcttgccacactgctgagagcacccactgtcctgaccagagtctcagtggtcctgacccccaatgtgggcaggggctgggcaggagggtggggtctgctgtgggttcagaggactccacctcctggctggtttacctgctgctgcccattttctctgggtactgctggccagaggactttagcctacccctgaagagcctgtccatgtcattttcctactgccatagataccctaagcccagggccccttgaggcccagactcagcctgcccactggtgccggagacggagtggagtgggcctggatccgagggatgctacctctccctttcccacttgaggaccctggggagagatgggggcggggaaaatggaggtatgaatttggggtaagaggaagtgagatctccgcttgcaggtcagcccctgccttgcagggcgggctggcttgactcaggccctgtgagatagagggcccagcccagccccacccacagatcccctgctcctgttgtgttctgttgtaaatcatttggcgagactgtattttagtaactgctgcctaacttccctgtgttctatttgagaggcgcctgtctggataaagttgtcttgaaatttacaaaaaaaaaaaaaaaaaaaaaaaaaaaaaaaaaaaaaaaaaaaaaaaacagcgggggattattatatgggggggggaaaaaaggggttataaagggggccaagtgggtccaataggggttttaccataggaccccatatttttttctgcgcaccaaggggagtaatatcgcgagggttccccaatataaggggcgcagcgacataaattgacgataaccacggggtaccgcgcgatttatgtccgcagaaaactgtagatacacaatacaaaggacacgacacagggaga

SEQ ID NO: 297685 - DNA, 2609 bp, Homo sapiens
atccggaagtggattgcgagccaggaggaggaagccggcggtggccccgtcagcagccggctgctgagaggccggtaggcggcggcggtcccgaggggcggcggccgcgctgctccctgagaacgggtcccgcagctgggcaggcgggcggcctgagggcgcggagccatgaagctgtacagcctcagcgtcctctacaaaggcgaggccaaggtggtgctgctcaaagccgcatacgatgtgtcttccttcagctttttccagagatccagcgttcaggaattcatgaccttcacgagtcaactgattgtggagcgctcatcgaaaggcactagagcttctgtcaaagaacaagactatctgtgccacgtctacgtccggaatgatagtcttgcaggtgtggtcattgctgacaatgaatacccatcccgggtggcctttaccttgctggagaaggtactagatgaattctccaagcaagtcgacaggatagactggccagtaggatcccctgctacaatccattacccagccctggatggtcacctcagtagataccagaacccacgagaagctgatcccatgactaaagtgcaggccgaactagatgagaccaaaatcattctgcacaacaccatggagtctctgttagagcgaggtgagaagctagatgacttggtgtccaaatccgaggtgctgggaacacagtctaaagccttctataaaactgcccggaaacaaaactcatgctgtgccatcatgtgatgcagcctgccagaggcccaatgctggaatggcaccatcattcacatcagaactgcagcccctggaaaagaagagacagccatagacgaggagccagagtgggggcagactggccatttttattttgaagttcctgcgagaaatggatggtggaagggtggcgaatgttcaaattcatatgtgtggtagtgattcttggaaagaatttgaggtccccaaaggtgtatttttgggcaaatgaaaccataaactccgactggcttctgtagatgccaaagggctctttttcagctaaccctgggaaggctctgtgggagggaggtcggagccagctgtttctcgatctttggtatatctttggatcttatttgtacattaatgatattaacactccagtggggggtggggagtccctgatgctagggctggggtgggtggagtttgaagactcttgggaaagcctctcctggggccactgttgggggtgggagtgagcccaccacagaggccacaggcaggcccccacttcaggcccaaggcctggggcggggggaacagtcactgggtctcagattctgagactgttgtttagcttacctttctgctaggattggcttcccgcagagggcagggcccatcctaagcagcttccaagtcccacaaaggtggcttgtgggaggatttggaaggagctgcattgtgggcggggagtgtgtgggttgggttcgtaccagcaagtagactaggaactgagcccaggaaagggggatgttttcctggtgtttggatggtcagctgggagtgtccatcatcaggggaagatcaaacacaggtgcactcagctgcccagggcctctgggacacttgccttgacttgcaacttgccttgaacatcacgatcaaagcagcaggtgctgtggtctctcaaaattgatttttatttgactctgtggctctaagactgccttgaaccgcctgaggcctatgcatctgaacaagtgggtctctcccttgagcaccaggagtgggtgccagccggccccgaggattcccagcaccccacctatggtcttgccagcataggcttgctagttccttcttggtcagaggtagctgcagaggggggaggccaagggtttggtctaagctgtgccctgccacctggcaggaggcccactcactgcccaagtcatggcaacaggctggagcagcccaggagatgggcctaaaatgttctggatcccttgggtcctagtgttatgttccagtctgcccacctgtgctcaggatgcagccctgggatccagcacccatggaagcttctgctgggatggtgtcacctatgggttttgaaccagtgtggtatggtccttgggagctctgctctgagcttgccacactgctgagagcacccactgtcctgaccagagtctcagtggtcctgacccccaatgtgggcaggggctgggcaggagggtggggtctgctgtgggttcagaggactccacctcctggctggtttacctgctgctgcccattttctctgggtactgctggccagaggactttagcctacccctgaagagcctgtccatgtcattttcctactgccatagataccctaagccaggccttgaggcgatcagctgccctgtgcgacgggtgatgggctgtcgaggtgctactccccttcctgggctggggattgggcggaatgcgttaattgggaaaggagtgattcgttgggtccgctgggggtgttttcgcgtttggcggccccctctcccttttttgtttgggtttggccctcttgggtttgttacattcggggttcttttctcttg

SEQ ID NO: 297686 - DNA, 2514 bp, Homo sapiens
atccggaagtggattgcgagccaggaggaggaagccggcggtggccccgtcagcagccggctgctgagaggccggtaggcggcggcggtcccgaggggcggcggccgcgctgctccctgagaacgggtcccgcagctgggcaggcgggcggcctgagggcgcggagccatgaagctgtacagcctcagcgtcctctacaaaggcgaggccaaggtggtgctgctcaaagccgcatacgatgtgtcttccttcagctttttccagagatccagcgttcaggaattcatgaccttcacgagtcaactgattgtggagcgctcatcgaaaggcactagagcttctgtcaaagaacaagactatctgtgccacgtctacgtccggaatgatagtcttgcaggtgtggtcattgctgacaatgaatacccatcccgggtggcctttaccttgctggagaaggtactagatgaattctccaagcaagtcgacaggatagactggccagtaggatcccctgctacaatccattacccagccctggatggtcacctcagtagataccagaacccacgagaagctgatcccatgactaaagtgcaggccgaactagatgagaccaaaatcattctgcacaacaccatggagtctctgttagagcgaggtgagaagctagatgacttggtgtccaaatccgaggtgctgggaacacagtctaaagccttctataaaactgcccggaaacaaaactcatgctgtgccatcatgtgatgcagcctgccagaggcccaatgctggaatggcaccatcattcacatcagaactgcagcccctggaaaagaagagacagccatagacgaggagccagagtgggggcagactggccatttttattttgaagttcctgcgagaaatggatggtggaagggtggcgaatgttcaaattcatatgtgtggtagtgattcttggaaagaatttgaggtccccaaaggtgtatttttgggcaaatgaaaccataaactccgactggcttctgtagatgccaaagggctctttttcagctaaccctgggaaggctctgtgggagggaggtcggagccagctgtttctcgatctttggtatatctttggatcttatttgtacattaatgatattaacactccagtggggggtggggagtccctgatgctagggctggggtgggtggagtttgaagactcttgggaaagcctctcctggggccactgttgggggtgggagtgagcccaccacagaggccacaggcaggcccccacttcaggcccaaggcctggggcggggggaacagtcactgggtctcagattctgagactgttgtttagcttacctttctgctaggattggcttcccgcagagggcagggcccatcctaagcagcttccaagtcccacaaaggtggcttgtgggaggatttggaaggagctgcattgtgggcggggagtgtgtgggttgggttcgtaccagcaagtagactaggaactgagcccaggaaagggggatgttttcctggtgtttggatggtcagctgggagtgtccatcatcaggggaagatcaaacacaggtgcactcagctgcccagggcctctgggacacttgccttgacttgcaacttgccttgaacatcacgatcaaagcagcaggtgctgtggtctctcaaaattgatttttatttgactctgtggctctaagactgccttgaaccgcctgaggcctatgcatctgaacaagtgggtctctcccttgagcaccaggagtgggtgccagccggccccgaggattcccagcaccccacctatggtcttgccagcataggcttgctagttccttcttggtcagaggtagctgcagaggggggaggccaagggtttggtctaagctgtgccctgccacctggcaggaggcccactcactgcccaagtcatggcaacaggctggagcagcccaggagatgggcctaaaatgttctggatcccttgggtcctagtgttatgttccagtctgcccacctgtgctcaggatgcagccctgggatccagcacccatggaagcttctgctgggatggtgtcacctatgggttttgaaccagtgtggtatggtccttgggagctctgctctgagcttgccacactgctgagagcacccactgtcctgaccagagtctcagtggtcctgacccccaatgtgggcaggggctgggcaggagggtggggtctgctgtgggttcagaggactccacctcctggctggtttacctgctgctgcccattttctctgggtactgctggccagaggactttagcctacccctgaagagcctgtccatgtcattttcctcgcccccatctctccccagggtcctcaagtgggaaagggagaggtagcatccctcggatccaggcccactccactccgtctccggcaccagtgggcaggctgagtctgggcctcaaggggccctgggcttagggtatctatgg

SEQ ID NO: 297687 - DNA, 2780 bp, Homo sapiens
ggctaggctacgaggtcgtgcgtgttttacttcggccgaggctagaggcttctggtcataggatctagactatctgtgccacgtctacgtccggaatgatagtcttgcaggtgtggtcattgctgacaatgaatacccatcccgggtggcctttaccttgctggagaaggtactagatgaattctccaagcaagtcgacaggatagactggccagtaggatcccctgctacaatccattacccagccctggatggtcacctcagtagataccagaacccacgagaagctgatcccatgactaaagtgcaggccgaactagatgagaccaaaatcattctgcacaacaccatggagtctctgttagagcgaggtgagaagctagatgacttggtgtccaaatccgaggtgctgggaacacagtctaaagccttctataaaactgcccggaaacaaaactcatgctgtgccatcatgtgatgcagcctgccagaggcccaatgctggaatggcaccatcattcacatcagaactgcagcccctggaaaagaagagacagccatagacgaggagccagagtgggggcagactggccatttttattttgaagttcctgcgagaaatggatggtggaagggtggcgaatgttcaaattcatatgtgtggtagtgattcttggaaagaatttgaggtccccaaaggtgtatttttgggcaaatgaaaccataaactccgactggcttctgtagatgccaaagggctctttttcagctaaccctgggaaggctctgtgggagggaggtcggagccagctgtttctcgatctttggtatatctttggatcttatttgtacattaatgatattaacactccagtggggggtggggagtccctgatgctagggctggggtgggtggagtttgaagactcttgggaaagcctctcctggggccactgttgggggtgggagtgagcccaccacagaggccacaggcaggcccccacttcaggcccaaggcctggggcggggggaacagtcactgggtctcagattctgagactgttgtttagcttacctttctgctaggattggcttcccgcagagggcagggcccatcctaagcagcttccaagtcccacaaaggtggcttgtgggaggatttggaaggagctgcattgtgggcggggagtgtgtgggttgggttcgtaccagcaagtagactaggaactgagcccaggaaagggggatgttttcctggtgtttggatggtcagctgggagtgtccatcatcaggggaagatcaaacacaggtgcactcagctgcccagggcctctgggacacttgccttgacttgcaacttgccttgaacatcacgatcaaagcagcaggtgctgtggtctctcaaaattgatttttatttgactctgtggctctaagactgccttgaaccgcctgaggcctatgcatctgaacaagtgggtctctcccttgagcaccaggagtgggtgccagccggccccgaggattcccagcaccccacctatggtcttgccagcataggcttgctagttccttcttggtcagaggtagctgcagaggggggaggccaagggtttggtctaagctgtgccctgccacctggcaggaggcccactcactgcccaagtcatggcaacaggctggagcagcccaggagatgggcctaaaatgttctggatcccttgggtcctagtgttatgttccagtctgcccacctgtgctcaggatgcagccctgggatccagcacccatggaagcttctgctgggatggtgtcacctatgggttttgaaccagtgtggtatggtccttgggagctctgctctgagcttgccacactgctgagagcacccactgtcctgaccagagtctcagtggtcctgacccccaatgtgggcaggggctgggcaggagggtggggtctgctgtgggttcagaggactccacctcctggctggtttacctgctgctgcccattttctctgggtactgctggccagaggactttagcctacccctgaagagcctgtccatgtcattttcctactgccatagataccctaagcccagggccccttgaggcccagactcagcctgcccactggtgccggagacggagtggagtgggcctggatccgagggatgctacctctccctttcccacttgaggaccctggggagagatgggggcggggaaaatggaggtatgaatttggggtaagaggaagtgagatctccgcttgcaggtcagcccctgccttgcagggcgggctggcttgactcaggccctgtgagatagagggcccagcccagccccacccacagatcccctgctcctgttgtgttctgttgtaaatcatttggcgagactgtattttagtaactgctgcctaacttccctgtgttctatttgagaggcgcctgtctggataaagttgtcttgaaatttacaaaaaaaaaaaaaaaaaaaaaaaaaaaaaaaaaaaaaaaaaaaaaaaacagcgggggattattatatgggggggggaaaaaaggggttataaagggggccaagtgggtccaataggggttttaccataggaccccatatttttttctgcgcaccaaggggagtaatatcgcgagggttccccaatataaggggcgcagcgacataaattgacgataaccacggggtaccgcgcgatttatgtccgcagaaaactgtagatacacaatacaaaggacacgacacagggaga

SEQ ID NO: 297688 - DNA, 3208 bp, Homo sapiens
atccggaagtggattgcgagccaggaggaggaagccggcggtggccccgtcagcagccggctgctgagaggccggtaggcggcggcggtcccgaggggcggcggccgcgctgctccctgagaacgggtcccgcagctgggcaggcgggcggcctgagggcgcggagccatgaagctgtacagcctcagcgtcctctacaaaggcgaggccaaggtggtgctgctcaaagccgcatacgatgtgtcttccttcagctttttccagagatccagcgttcaggaattcatgaccttcacgagtcaactgattgtggagcgctcatcgaaaggcactagagcttctgtcaaagaacaagactatctgtgccacgtctacgtccggaatgatagtcttgcaggtgtggtcattgctgacaatgaatacccatcccgggtggcctttaccttgctggagaaggtactagatgaattctccaagcaagtcgacaggatagactggccagtaggatcccctgctacaatccattacccagccctggatggtcacctcagtagataccagaacccacgagaagctgatcccatgactaaagtgcaggccgaactagatgagaccaaaatcattctggttctgttccatccacttggacagtaactattcttggaccgagtctcgacacctagaggtgaagtttgtgtgtgttggagaggaacccagcacaacaccatggagtctctgttagagcgaggtgagaagctagatgacttggtgtccaaatccgaggtgctgggaacacagtctaaagccttctataaaactaaaatatttaattgacaaggatgggtgctgctgactgccgctttctctcaggcccggaaacaaaactcatgctgtgccatcatgtgatgcagcctgccagaggcccaatgctggaatggcaccatcattcacatcagaactgcagcccctggaaaagaagagacagccatagacgaggagccagagtgggggcagactggccatttttattttgaagttcctgcgagaaatggatggtggaagggtggcgaatgttcaaattcatatgtgtggtagtgattcttggaaagaatttgaggtccccaaaggtgtatttttgggcaaatgaaaccataaactccgactggcttctgtagatgccaaagggctctttttcagctaaccctgggaaggctctgtgggagggaggtcggagccagctgtttctcgatctttggtatatctttggatcttatttgtacattaatgatattaacactccagtggggggtggggagtccctgatgctagggctggggtgggtggagtttgaagactcttgggaaagcctctcctggggccactgttgggggtgggagtgagcccaccacagaggccacaggcaggcccccacttcaggcccaaggcctggggcggggggaacagtcactgggtctcagattctgagactgttgtttagcttacctttctgctaggattggcttcccgcagagggcagggcccatcctaagcagcttccaagtcccacaaaggtggcttgtgggaggatttggaaggagctgcattgtgggcggggagtgtgtgggttgggttcgtaccagcaagtagactaggaactgagcccaggaaagggggatgttttcctggtgtttggatggtcagctgggagtgtccatcatcaggggaagatcaaacacaggtgcactcagctgcccagggcctctgggacacttgccttgacttgcaacttgccttgaacatcacgatcaaagcagcaggtgctgtggtctctcaaaattgatttttatttgactctgtggctctaagactgccttgaaccgcctgaggcctatgcatctgaacaagtgggtctctcccttgagcaccaggagtgggtgccagccggccccgaggattcccagcaccccacctatggtcttgccagcataggcttgctagttccttcttggtcagaggtagctgcagaggggggaggccaagggtttggtctaagctgtgccctgccacctggcaggaggcccactcactgcccaagtcatggcaacaggctggagcagcccaggagatgggcctaaaatgttctggatcccttgggtcctagtgttatgttccagtctgcccacctgtgctcaggatgcagccctgggatccagcacccatggaagcttctgctgggatggtgtcacctatgggttttgaaccagtgtggtatggtccttgggagctctgctctgagcttgccacactgctgagagcacccactgtcctgaccagagtctcagtggtcctgacccccaatgtgggcaggggctgggcaggagggtggggtctgctgtgggttcagaggactccacctcctggctggtttacctgctgctgcccattttctctgggtactgctggccagaggactttagcctacccctgaagagcctgtccatgtcattttcctactgccatagataccctaagcccagggccccttgaggcccagactcagcctgcccactggtgccggagacggagtggagtgggcctggatccgagggatgctacctctccctttcccacttgaggaccctggggagagatgggggcggggaaaatggaggtatgaatttggggtaagaggaagtgagatctccgcttgcaggtcagcccctgccttgcagggcgggctggcttgactcaggccctgtgagatagagggcccagcccagccccacccacagatcccctgctcctgttgtgttctgttgtaaatcatttggcgagactgtattttagtaactgctgcctaacttccctgtgttctatttgagaggcgcctgtctggataaagttgtcttgaaatttacaaaaaaaaaaaaaaaaaaaaaaaaaaaaaaaaaaaaaaaaaaaaaaaacagcgggggattattatatgggggggggaaaaaaggggttataaagggggccaagtgggtccaataggggttttaccataggaccccatatttttttctgcgcaccaaggggagtaatatcgcgagggttccccaatataaggggcgcagcgacataaattgacgataaccacggggtaccgcgcgatttatgtccgcagaaaactgtagatacacaatacaaaggacacgacacagggaga

SEQ ID NO: 297689 - DNA, 2965 bp, Homo sapiens
atccggaagtggattgcgagccaggaggaggaagccggcggtggccccgtcagcagccggctgctgagaggccggtaggcggcggcggtcccgaggggcggcggccgcgctgctccctgagaacgggtcccgcagctgggcaggcgggcggcctgagggcgcggagccatgaagctgtacagcctcagcgtcctctacaaaggcgaggccaaggtggtgctgctcaaagccgcatacgatgtgtcttccttcagctttttccagagatccagcgttcaggaattcatgaccttcacgagtcaactgattgtggagcgctcatcgaaaggcactagagcttctgtcaaagaacaagactatctgtgccacgtctacgtccggaatgatagtcttgcaggtgtggtcattgctgacaatgaatacccatcccgggtggcctttaccttgctggagaaggtactagatgaattctccaagcaagtcgacaggatagactggccagtaggatcccctgctacaatccattacccagccctggatggtcacctcagtagataccagaacccacgagaagctgatcccatgactaaagtgcaggccgaactagatgagaccaaaatcattctggcccggaaacaaaactcatgctgtgccatcatgtgatgcagcctgccagaggcccaatgctggaatggcaccatcattcacatcagaactgcagcccctggaaaagaagagacagccatagacgaggagccagagtgggggcagactggccatttttattttgaagttcctgcgagaaatggatggtggaagggtggcgaatgttcaaattcatatgtgtggtagtgattcttggaaagaatttgaggtccccaaaggtgtatttttgggcaaatgaaaccataaactccgactggcttctgtagatgccaaagggctctttttcagctaaccctgggaaggctctgtgggagggaggtcggagccagctgtttctcgatctttggtatatctttggatcttatttgtacattaatgatattaacactccagtggggggtggggagtccctgatgctagggctggggtgggtggagtttgaagactcttgggaaagcctctcctggggccactgttgggggtgggagtgagcccaccacagaggccacaggcaggcccccacttcaggcccaaggcctggggcggggggaacagtcactgggtctcagattctgagactgttgtttagcttacctttctgctaggattggcttcccgcagagggcagggcccatcctaagcagcttccaagtcccacaaaggtggcttgtgggaggatttggaaggagctgcattgtgggcggggagtgtgtgggttgggttcgtaccagcaagtagactaggaactgagcccaggaaagggggatgttttcctggtgtttggatggtcagctgggagtgtccatcatcaggggaagatcaaacacaggtgcactcagctgcccagggcctctgggacacttgccttgacttgcaacttgccttgaacatcacgatcaaagcagcaggtgctgtggtctctcaaaattgatttttatttgactctgtggctctaagactgccttgaaccgcctgaggcctatgcatctgaacaagtgggtctctcccttgagcaccaggagtgggtgccagccggccccgaggattcccagcaccccacctatggtcttgccagcataggcttgctagttccttcttggtcagaggtagctgcagaggggggaggccaagggtttggtctaagctgtgccctgccacctggcaggaggcccactcactgcccaagtcatggcaacaggctggagcagcccaggagatgggcctaaaatgttctggatcccttgggtcctagtgttatgttccagtctgcccacctgtgctcaggatgcagccctgggatccagcacccatggaagcttctgctgggatggtgtcacctatgggttttgaaccagtgtggtatggtccttgggagctctgctctgagcttgccacactgctgagagcacccactgtcctgaccagagtctcagtggtcctgacccccaatgtgggcaggggctgggcaggagggtggggtctgctgtgggttcagaggactccacctcctggctggtttacctgctgctgcccattttctctgggtactgctggccagaggactttagcctacccctgaagagcctgtccatgtcattttcctactgccatagataccctaagcccagggccccttgaggcccagactcagcctgcccactggtgccggagacggagtggagtgggcctggatccgagggatgctacctctccctttcccacttgaggaccctggggagagatgggggcggggaaaatggaggtatgaatttggggtaagaggaagtgagatctccgcttgcaggtcagcccctgccttgcagggcgggctggcttgactcaggccctgtgagatagagggcccagcccagccccacccacagatcccctgctcctgttgtgttctgttgtaaatcatttggcgagactgtattttagtaactgctgcctaacttccctgtgttctatttgagaggcgcctgtctggataaagttgtcttgaaatttacaaaaaaaaaaaaaaaaaaaaaaaaaaaaaaaaaaaaaaaaaaaaaaaacagcgggggattattatatgggggggggaaaaaaggggttataaagggggccaagtgggtccaataggggttttaccataggaccccatatttttttctgcgcaccaaggggagtaatatcgcgagggttccccaatataaggggcgcagcgacataaattgacgataaccacggggtaccgcgcgatttatgtccgcagaaaactgtagatacacaatacaaaggacacgacacagggaga

SEQ ID NO: 297690 - DNA, 2273 bp, Homo sapiens
atccggaagtggattgcgagccaggaggaggaagccggcggtggccccgtcagcagccggctgctgagaggccggtaggcggcggcggtcccgaggggcggcggccgcgctgctccctgagaacgggtcccgcagctgggcaggcgggcggcctgagggcgcggagccatgaagctgtacagcctcagcgtcctctacaaaggcgaggccaaggtggtgctgctcaaagccgcatacgatgtgtcttccttcagctttttccagagatccagcgttcaggaattcatgaccttcacgagtcaactgattgtggagcgctcatcgaaaggcactagagcttctgtcaaagaacaagactatctgtgccacgtctacgtccggaatgatagtcttgcaggtgtggtcattgctgacaatgaatacccatcccgggtggcctttaccttgctggagaaggtactagatgaattctccaagcaagtcgacaggatagactggccagtaggatcccctgctacaatccattacccagccctggatggtcacctcagtagataccagaacccacgagaagctgatcccatgactaaagtgcaggccgaactagatgagaccaaaatcattctgcacaacaccatggagtctctgttagagcgaggtgagaagctagatgacttggtgtccaaatccgaggtgctgggaacacagtctaaagccttctataaaactgcccggaaacaaaactcatgctgtgccatcatgtgatgcagcctgccagaggcccaatgctggaatggcaccatcattcacatcagaactgcagcccctggaaaagaagagacagccatagacgaggagccagagtgggggcagactggccatttttattttgaagttcctgcgagaaatggatggtggaagggtggcgaatgttcaaattcatatgtgtggtagtgattcttggaaagaatttgaggtccccaaaggtgtatttttgggcaaatgaaaccataaactccgactggcttctgtagatgccaaagggctctttttcagctaaccctgggaaggctctgtgggagggaggtcggagccagctgtttctcgatctttggtatatctttggatcttatttgtacattaatgatattaacactccagtggggggtggggagtccctgatgctagggctggggtgggtggagtttgaagactcttgggaaagcctctcctggggccactgttgggggtgggagtgagcccaccacagaggccacaggcaggcccccacttcaggcccaaggcctggggcggggggaacagtcactgggtctcagattctgagactgttgtttagcttacctttctgctaggattggcttcccgcagagggcagggcccatcctaagcagcttccaagtcccacaaaggtggcttgtgggaggatttggaaggagctgcattgtgggcggggagtgtgtgggttgggttcgtaccagcaagtagactaggaactgagcccaggaaagggggatgttttcctggtgtttggatggtcagctgggagtgtccatcatcaggggaagatcaaacacaggtgcactcagctgcccagggcctctgggacacttgccttgacttgcaacttgccttgaacatcacgatcaaagcagcaggtgctgtggtctctcaaaattgatttttatttgactctgtggctctaagactgccttgaaccgcctgaggcctatgcatctgaacaagtgggtctctcccttgagcaccaggagtgggtgccagccggccccgaggattcccagcaccccacctatggtcttgccagcataggcttgctagttccttcttggtcagaggtagctgcagaggggggaggccaagggtttggtctaagctgtgccctgccacctggcaggaggcccactcactgcccaagtcatggcaacaggctggagcagcccaggagatgggcctaaaatgttctggatcccttgggtcctagtgttatgttccagtctgcccacctgtgctcaggatgcagccctgggatccagcacccatggaagcttctgctgggatggtgtcacctatgggttttgaaccagtgtggtatggtccttgggagctctgctctgagcttgccacactgctgagagcacccactgtcctgaccagagtctcagtggtcctgacccccaatgtgaggggtgtctcagcaaagaccgggctaaactgccgggtttgtcacacactgc

SEQ ID NO: 297691 - DNA, 2228 bp, Homo sapiens
  misc_feature (2120)..(2120): n is a, c, g, or t
atccggaagtggattgcgagccaggaggaggaagccggcggtggccccgtcagcagccggctgctgagaggccggtaggcggcggcggtcccgaggggcggcggccgcgctgctccctgagaacgggtcccgcagctgggcaggcgggcggcctgagggcgcggagccatgaagctgtacagcctcagcgtcctctacaaaggcgaggccaaggtggtgctgctcaaagccgcatacgatgtgtcttccttcagctttttccagagatccagcgttcaggaattcatgaccttcacgagtcaactgattgtggagcgctcatcgaaaggcactagagcttctgtcaaagaacaagactatctgtgccacgtctacgtccggaatgatagtcttgcaggtgtggtcattgctgacaatgaatacccatcccgggtggcctttaccttgctggagaaggtactagatgaattctccaagcaagtcgacaggatagactggccagtaggatcccctgctacaatccattacccagccctggatggtcacctcagtagataccagaacccacgagaagctgatcccatgactaaagtgcaggccgaactagatgagaccaaaatcattctgcacaacaccatggagtctctgttagagcgaggtgagaagctagatgacttggtgtccaaatccgaggtgctgggaacacagtctaaagccttctataaaactgcccggaaacaaaactcatgctgtgccatcatgtgatgcagcctgccagaggcccaatgctggaatggcaccatcattcacatcagaactgcagcccctggaaaagaagagacagccatagacgaggagccagagtgggggcagactggccatttttattttgaagttcctgcgagaaatggatggtggaagggtggcgaatgttcaaattcatatgtgtggtagtgattcttggaaagaatttgaggtccccaaaggtgtatttttgggcaaatgaaaccataaactccgactggcttctgtagatgccaaagggctctttttcagctaaccctgggaaggctctgtgggagggaggtcggagccagctgtttctcgatctttggtatatctttggatcttatttgtacattaatgatattaacactccagtggggggtggggagtccctgatgctagggctggggtgggtggagtttgaagactcttgggaaagcctctcctggggccactgttgggggtgggagtgagcccaccacagaggccacaggcaggcccccacttcaggcccaaggcctggggcggggggaacagtcactgggtctcagattctgagactgttgtttagcttacctttctgctaggattggcttcccgcagagggcagggcccatcctaagcagcttccaagtcccacaaaggtggcttgtgggaggatttggaaggagctgcattgtgggcggggagtgtgtgggttgggttcgtaccagcaagtagactaggaactgagcccaggaaagggggatgttttcctggtgtttggatggtcagctgggagtgtccatcatcaggggaagatcaaacacaggtgcactcagctgcccagggcctctgggacacttgccttgacttgcaacttgccttgaacatcacgatcaaagcagcaggtgctgtggtctctcaaaattgatttttatttgactctgtggctctaagactgccttgaaccgcctgaggcctatgcatctgaacaagtgggtctctcccttgagcaccaggagtgggtgccagccggccccgaggattcccagcaccccacctatggtcttgccagcataggcttgctagttccttcttggtcagaggtagctgcagaggggggaggccaagggtttggtctaagctgtgccctgccacctggcaggaggcccactcactgcccaagtcatggcaacaggctggagcagcccaggagatgggcctaaaatgttctggatcccttgggtcctagtgttatgttccagtctgcccacctgtgctcaggatgcagccctgggatccagcacccatggaagcttctgctgggatgggtcccttggtttgacccttgnttggcctgcagcccgtgtcggtgcccttgttgagccctgtctaccaactcgggctcgcccatgcgcggtccgggggttccgttagacccccggtctctgcccctgccg

SEQ ID NO: 297692 - DNA, 1863 bp, Homo sapiens
tattcatgaccgggcctggcgttctcctgttagtcctgtccgttggtgtacagtagcccaccacagaggccacaggcaggcccccacttcaggcccaaggcctggggcggggggaacagtcactgggtctcagattctgagactgttgtttagcttacctttctgctaggattggcttcccgcagagggcagggcccatcctaagcagcttccaagtcccacaaaggtggcttgtgggaggatttggaaggagctgcattgtgggcggggagtgtgtgggttgggttcgtaccagcaagtagactaggaactgagcccaggaaagggggatgttttcctggtgtttggatggtcagctgggagtgtccatcatcaggggaagatcaaacacaggtgcactcagctgcccagggcctctgggacacttgccttgacttgcaacttgccttgaacatcacgatcaaagcagcaggtgctgtggtctctcaaaattgatttttatttgactctgtggctctaagactgccttgaaccgcctgaggcctatgcatctgaacaagtgggtctctcccttgagcaccaggagtgggtgccagccggccccgaggattcccagcaccccacctatggtcttgccagcataggcttgctagttccttcttggtcagaggtagctgcagaggggggaggccaagggtttggtctaagctgtgccctgccacctggcaggaggcccactcactgcccaagtcatggcaacaggctggagcagcccaggagatgggcctaaaatgttctggatcccttgggtcctagtgttatgttccagtctgcccacctgtgctcaggatgcagccctgggatccagcacccatggaagcttctgctgggatggtgtcacctatgggttttgaaccagtgtggtatggtccttgggagctctgctctgagcttgccacactgctgagagcacccactgtcctgaccagagtctcagtggtcctgacccccaatgtgggcaggggctgggcaggagggtggggtctgctgtgggttcagaggactccacctcctggctggtttacctgctgctgcccattttctctgggtactgctggccagaggactttagcctacccctgaagagcctgtccatgtcattttcctactgccatagataccctaagcccagggccccttgaggcccagactcagcctgcccactggtgccggagacggagtggagtgggcctggatccgagggatgctacctctccctttcccacttgaggaccctggggagagatgggggcggggaaaatggaggtatgaatttggggtaagaggaagtgagatctccgcttgcaggtcagcccctgccttgcagggcgggctggcttgactcaggccctgtgagatagagggcccagcccagccccacccacagatcccctgctcctgttgtgttctgttgtaaatcatttggcgagactgtattttagtaactgctgcctaacttccctgtgttctatttgagaggcgcctgtctggataaagttgtcttgaaatttacaaaaaaaaaaaaaaaaaaaaaaaaaaaaaaaaaaaaaaaaaaaaaaaacagcgggggattattatatgggggggggaaaaaaggggttataaagggggccaagtgggtccaataggggttttaccataggaccccatatttttttctgcgcaccaaggggagtaatatcgcgagggttccccaatataaggggcgcagcgacataaattgacgataaccacggggtaccgcgcgatttatgtccgcagaaaactgtagatacacaatacaaaggacacgacacagggaga

SEQ ID NO: 297693 - DNA, 1875 bp, Homo sapiens
atccggaagtggattgcgagccaggaggaggaagccggcggtggccccgtcagcagccggctgctgagaggccggtaggcggcggcggtcccgaggggcggcggccgcgctgctccctgagaacgggtcccgcagctgggcaggcgggcggcctgagggcgcggagccatgaagctgtacagcctcagcgtcctctacaaaggcgaggccaaggtggtgctgctcaaagccgcatacgatgtgtcttccttcagctttttccagagatccagcgttcaggaattcatgaccttcacgagtcaactgattgtggagcgctcatcgaaaggcactagagcttctgtcaaagaacaagactatctgtgccacgtctacgtccggaatgatagtcttgcaggtgtggtcattgctgacaatgaatacccatcccgggtggcctttaccttgctggagaaggtactagatgaattctccaagcaagtcgacaggatagactggccagtaggatcccctgctacaatccattacccagccctggatggtcacctcagtagataccagaacccacgagaagctgatcccatgactaaagtgcaggccgaactagatgagaccaaaatcattctgcacaacaccatggagtctctgttagagcgaggtgagaagctagatgacttggtgtccaaatccgaggtgctgggaacacagtctaaagccttctataaaactgcccggaaacaaaactcatgctgtgccatcatgtgatgcagcctgccagaggcccaatgctggaatggcaccatcattcacatcagaactgcagcccctggaaaagaagagacagccatagacgaggagccagagtgggggcagactggccatttttattttgaagttcctgcgagaaatggatggtggaagggtggcgaatgttcaaattcatatgtgtggtagtgattcttggaaagaatttgaggtccccaaaggtgtatttttgggcaaatgaaaccataaactccgactggcttctgtagatgccaaagggctctttttcagctaaccctgggaaggctctgtgggagggaggtcggagccagctgtttctcgatctttggtatatctttggatcttatttgtacattaatgatattaacactccagtggggggtggggagtccctgatgctagggctggggtgggtggagtttgaagactcttgggaaagcctctcctggggccactgttgggggtgggagtgagcccaccacagaggccacaggcaggcccccacttcaggcccaaggcctggggcggggggaacagtcactgggtctcagattctgagactgttgtttagcttacctttctgctaggattggcttcccgcagagggcagggcccatcctaagcagcttccaagtcccacaaaggtggcttgtgggaggatttggaaggagctgcattgtgggcggggagtgtgtgggttgggttcgtaccagcaagtagactaggaactgagcccaggaaagggggatgttttcctggtgtttggatggtcagctgggagtgtccatcatcaggggaagatcaaacacaggtgcactcagctgcccagggcctctgggacacttgccttgacttgcaacttgccttgaacatcacgatcaaagcagcaggtgctgtggtctctcaaaattgatttttatttgactctgtggctctaagactgccttgaaccgcctgaggcctatgcatctgaacaagtgggtctctcccttgagcaccaggagtgggtgccagccggccccgaggattcaaggcagtcttagagccacagagtcaaataaaaatcaattttgagagaccacagcacct

SEQ ID NO: 297694 - DNA, 1818 bp, Homo sapiens
ccaagacgggtggcgcctacggcgaggacctgggctccggacctacaagcctctcccaggtatgcgacgggaataggtatccgtccacgtcatcgagggtgaccaccgcacgctgttggagggcagcggcctggagtccatcatcgagcatcatccacagctccctggctgagccacgcgtgagcgtgcgggagggctaggcccgtgctgccctgctgcgcgagtgtccgtgtccacgattccgaaccaacaagtagactaggaactgagcccaggaaagggggatgttttcctggtgtttggatggtcagctgggagtgtccatcatcaggggaagatcaaacacaggtgcactcagctgcccagggcctctgggacacttgccttgacttgcaacttgccttgaacatcacgatcaaagcagcaggtgctgtggtctctcaaaattgatttttatttgactctgtggctctaagactgccttgaaccgcctgaggcctatgcatctgaacaagtgggtctctcccttgagcaccaggagtgggtgccagccggccccgaggattcccagcaccccacctatggtcttgccagcataggcttgctagttccttcttggtcagaggtagctgcagaggggggaggccaagggtttggtctaagctgtgccctgccacctggcaggaggcccactcactgcccaagtcatggcaacaggctggagcagcccaggagatgggcctaaaatgttctggatcccttgggtcctagtgttatgttccagtctgcccacctgtgctcaggatgcagccctgggatccagcacccatggaagcttctgctgggatggtgtcacctatgggttttgaaccagtgtggtatggtccttgggagctctgctctgagcttgccacactgctgagagcacccactgtcctgaccagagtctcagtggtcctgacccccaatgtgggcaggggctgggcaggagggtggggtctgctgtgggttcagaggactccacctcctggctggtttacctgctgctgcccattttctctgggtactgctggccagaggactttagcctacccctgaagagcctgtccatgtcattttcctactgccatagataccctaagcccagggccccttgaggcccagactcagcctgcccactggtgccggagacggagtggagtgggcctggatccgagggatgctacctctccctttcccacttgaggaccctggggagagatgggggcggggaaaatggaggtatgaatttggggtaagaggaagtgagatctccgcttgcaggtcagcccctgccttgcagggcgggctggcttgactcaggccctgtgagatagagggcccagcccagccccacccacagatcccctgctcctgttgtgttctgttgtaaatcatttggcgagactgtattttagtaactgctgcctaacttccctgtgttctatttgagaggcgcctgtctggataaagttgtcttgaaatttacaaaaaaaaaaaaaaaaaaaaaaaaaaaaaaaaaaaaaaaaaaaaaaaacagcgggggattattatatgggggggggaaaaaaggggttataaagggggccaagtgggtccaataggggttttaccataggaccccatatttttttctgcgcaccaaggggagtaatatcgcgagggttccccaatataaggggcgcagcgacataaattgacgataaccacggggtaccgcgcgatttatgtccgcagaaaactgtagatacacaatacaaaggacacgacacagggaga

SEQ ID NO: 297695 - DNA, 2076 bp, Homo sapiens
atccggaagtggattgcgagccaggaggaggaagccggcggtggccccgtcagcagccggctgctgagaggccggtaggcggcggcggtcccgaggggcggcggccgcgctgctccctgagaacgggtcccgcagctgggcaggcgggcggcctgagggcgcggagccatgaagctgtacagcctcagcgtcctctacaaaggcgaggccaaggtggtgctgctcaaagccgcatacgatgtgtcttccttcagctttttccagagatccagcgttcaggaattcatgaccttcacgagtcaactgattgtggagcgctcatcgaaaggcactagagcttctgtcaaagaacaagactatctgtgccacgtctacgtccggaatgatagtcttgcaggtgtggtcattgctgacaatgaatacccatcccgggtggcctttaccttgctggagaaggtactagatgaattctccaagcaagtcgacaggatagactggccagtaggatcccctgctacaatccattacccagccctggatggtcacctcagtagataccagaacccacgagaagctgatcccatgactaaagtgcaggccgaactagatgagaccaaaatcattctgcacaacaccatggagtctctgttagagcgaggtgagaagctagatgacttggtgtccaaatccgaggtgctgggaacacagtctaaagccttctataaaactgcccggaaacaaaactcatgctgtgccatcatgtgatgcagcctgccagaggcccaatgctggaatggcaccatcattcacatcagaactgcagcccctggaaaagaagagacagccatagacgaggagccagagtgggggcagactggccatttttattttgaagttcctgcgagaaatggatggtggaagggtggcgaatgttcaaattcatatgtgtggtagtgattcttggaaagaatttgaggtccccaaaggtgtatttttgggcaaatgaaaccataaactccgactggcttctgtagatgccaaagggctctttttcagctaaccctgggaaggctctgtgggagggaggtcggagccagctgtttctcgatctttggtatatctttggatcttatttgtacattaatgatattaacactccagtggggggtggggagtccctgatgctagggctggggtgggtggagtttgaagactcttgggaaagcctctcctggggccactgttgggggtgggagtgagcccaccacagaggccacaggcaggcccccacttcaggcccaaggcctggggcggggggaacagtcactgggtctcagattctgagactgttgtttagcttacctttctgctaggattggcttcccgcagagggcagggcccatcctaagcagcttccaagtcccacaaaggtggcttgtgggaggatttggaaggagctgcattgtgggcggggagtgtgtgggttgggttcgtaccagcaagtagactaggaactgagccctttcccacttgaggaccctggggagagatgggggcggggaaaatggaggtatgaatttggggtaagaggaagtgagatctccgcttgcaggtcagcccctgccttgcagggcgggctggcttgactcaggccctgtgagatagagggcccagcccagccccacccacagatcccctgctcctgttgtgttctgttgtaaatcatttggcgagactgtattttagtaactgctgcctaacttccctgtgttctatttgagaggcgcctgtctggataaagttgtcttgaaatttaaaaaaaaaaaaaaaaaaacagcgggggattattatatgggggggggaaaaaaggggttataaagggggccaagtgggtccaataggggttttaccataggaccccatatttttttctgcgcaccaaggggagtaatatcgcgagggttccccaatataaggggcgcagcgacataaattgacgataaccacggggtaccgcgcgatttatgtccgcagaaaactgtagatacacaatacaaaggacacgacacagggaga

SEQ ID NO: 297696 - DNA, 1962 bp, Homo sapiens
atcatggctaagatctgctactgggcgcactgtagtatgctgtcgaaggtgagcccaacataaagggtacccggcatgtctcgtcttcagggccaccgtattagtggacggtcggtataatagtctatggggtcgcgcgcagtccgtgatgactgtcggttcgtagaccttgacgcatattaacttgctaggctttgggcattctctcggtagaagggacacgcgttacctatctttagggtgtggatactaattcgcgcaacaaacatggtcggcatagtaggatatggatgcgcgtaaaggtcatagtattagagtgggctggagaggatggtgattgaagggttgtgtggagtactgaactggataatggtcattagttagcgtaagtagagtctcagcgtataagtgggggttagtgattccatgatgttattatgattgcgtacaggtaggcgtgagtgtccatcatcaggggaagatcaaacacaggtgcactcagctgcccagggcctctgggacacttgccttgacttgcaacttgccttgaacatcacgatcaaagcagcaggtgctgtggtctctcaaaattgatttttatttgactctgtggctctaagactgccttgaaccgcctgaggcctatgcatctgaacaagtgggtctctcccttgagcaccaggagtgggtgccagccggccccgaggattcccagcaccccacctatggtcttgccagcataggcttgctagttccttcttggtcagaggtagctgcagaggggggaggccaagggtttggtctaagctgtgccctgccacctggcaggaggcccactcactgcccaagtcatggcaacaggctggagcagcccaggagatgggcctaaaatgttctggatcccttgggtcctagtgttatgttccagtctgcccacctgtgctcaggatgcagccctgggatccagcacccatggaagcttctgctgggatggtgtcacctatgggttttgaaccagtgtggtatggtccttgggagctctgctctgagcttgccacactgctgagagcacccactgtcctgaccagagtctcagtggtcctgacccccaatgtgggcaggggctgggcaggagggtggggtctgctgtgggttcagaggactccacctcctggctggtttacctgctgctgcccattttctctgggtactgctggccagaggactttagcctacccctgaagagcctgtccatgtcattttcctactgccatagataccctaagcccagggccccttgaggcccagactcagcctgcccactggtgccggagacggagtggagtgggcctggatccgagggatgctacctctccctttcccacttgaggaccctggggagagatgggggcggggaaaatggaggtatgaatttggggtaagaggaagtgagatctccgcttgcaggtcagcccctgccttgcagggcgggctggcttgactcaggccctgtgagatagagggcccagcccagccccacccacagatcccctgctcctgttgtgttctgttgtaaatcatttggcgagactgtattttagtaactgctgcctaacttccctgtgttctatttgagaggcgcctgtctggataaagttgtcttgaaatttacaaaaaaaaaaaaaaaaaaaaaaaaaaaaaaaaaaaaaaaaaaaaaaaacagcgggggattattatatgggggggggaaaaaaggggttataaagggggccaagtgggtccaataggggttttaccataggaccccatatttttttctgcgcaccaaggggagtaatatcgcgagggttccccaatataaggggcgcagcgacataaattgacgataaccacggggtaccgcgcgatttatgtccgcagaaaactgtagatacacaatacaaaggacacgacacagggaga

SEQ ID NO: 297697 - DNA, 1469 bp, Homo sapiens
atccggaagtggattgcgagccaggaggaggaagccggcggtggccccgtcagcagccggctgctgagaggccggtaggcggcggcggtcccgaggggcggcggccgcgctgctccctgagaacgggtcccgcagctgggcaggcgggcggcctgagggcgcggagccatgaagctgtacagcctcagcgtcctctacaaaggcgaggccaaggtggtgctgctcaaagccgcatacgatgtgtcttccttcagctttttccagagatccagcgttcaggaattcatgaccttcacgagtcaactgattgtggagcgctcatcgaaaggcactagagcttctgtcaaagaacaagactatctgtgccacgtctacgtccggaatgatagtcttgcaggtgtggtcattgctgacaatgaatacccatcccgggtggcctttaccttgctggagaaggtactagatgaattctccaagcaagtcgacaggatagactggccagtaggatcccctgctacaatccattacccagccctggatggtcacctcagtagataccagaacccacgagaagctgatcccatgactaaagtgcaggccgaactagatgagaccaaaatcattctgcacaacaccatggagtctctgttagagcgaggtgagaagctagatgacttggtgtccaaatccgaggtgctgggaacacagtctaaagccttctataaaactgcccggaaacaaaactcatgctgtgccatcatgtgatgcagcctgccagaggcccaatgctggaatggcaccatcattcacatcagaactgcagcccctggaaaagaagagacagccatagacgaggagccagagtgggggcagactggccatttttattttgaagttcctgcgagaaatggatggtggaagggtggcgaatgttcaaattcatatgtgtggtagtgattcttggaaagaatttgaggtccccaaaggtgtatttttgggcaaatgaaaccataaactccgactggcttctgtagatgccaaagggctctttttcagctaaccctgggaaggctctgtgggagggaggtcggagccagctgtttctcgatctttggtatatctttggatcttatttgtacattaatgatattaacactccaaatatctcatcaacaaccgaataaacaaccacccaaaaatgactaatcaaactaaactccaaaccaaatgataaccatacacaaaactaaaggacgaacctgatctctatatactaagtatccttaatcattctattgccaagaactaactcctcggactcctgcctcatcattaaacaaacaacccaatatctaataaccctagccatggccatcccttatgagcgggcgcagcactacaggcttcggccctaaaattaaaatgcctagccaattctttacacaggcaaactaacccttattccaatc

SEQ ID NO: 297698 - DNA, 946 bp, Homo sapiens
atccggaagtggattgcgagccaggaggaggaagccggcggtggccccgtcagcagccggctgctgagaggccggtaggcggcggcggtcccgaggggcggcggccgcgctgctccctgagaacgggtcccgcagctgggcaggcgggcggcctgagggcgcggagccatgaagctgtacagcctcagcgtcctctacaaaggcgaggccaaggtggtgctgctcaaagccgcatacgatgtgtcttccttcagctttttccagagatccagcgttcaggaattcatgaccttcacgagtcaactgattgtggagcgctcatcgaaaggcactagagcttctgtcaaagaacaagactatctgtgccacgtctacgtccggaatgatagtcttgcaggtgtggtcattgctgacaatgaatacccatcccgggtggcctttaccttgctggagaaggtactagatgaattctccaagcaagtcgacaggatagactggccagtaggatcccctgctacaatccattacccagccctggatggtcacctcagtagataccagaacccacgagaagctgatcccatgactaaagtgcaggccgaactagatgagaccaaaatcattctgcacaacaccatggagtctctgttagagcgaggtgagaagctagatgacttggtgtccaaatccgaggtgctgggaacacagtctaaagccttctataaaactgcccggaaacaaaactcatgctgtgccatcatgtgatgcagcctgccagaggcccaatgctggaatggcaccatcattcacatcagaactgcagcccctggaaaagaagagacagccatagacgaggagccagagtgggggcagactggccaggctttatggctgaacaccacgcgagacacggaagggcgatgccaggcacagaacgtctgtaaaa

SEQ ID NO: 297699 - DNA, 783 bp, Homo sapiens
atccggaagtggattgcgagccaggaggaggaagccggcggtggccccgtcagcagccggctgctgagaggccggtaggcggcggcggtcccgaggggcggcggccgcgctgctccctgagaacgggtcccgcagctgggcaggcgggcggcctgagggcgcggagccatgaagctgtacagcctcagcgtcctctacaaaggcgaggccaaggtggtgctgctcaaagccgcatacgatgtgtcttccttcagctttttccagagatccagcgttcaggaattcatgaccttcacgagtcaactgattgtggagcgctcatcgaaaggcactagagcttctgtcaaagaacaagactatctgtgccacgtctacgtccggaatgatagtcttgcaggtgtggtcattgctgacaatgaatacccatcccgggtggcctttaccttgctggagaaggtactagatgaattctccaagcaagtcgacaggatagactggccagtaggatcccctgctacaatccattacccagccctggatggtcacctcagtagataccagaacccacgagaagctgatcccatgactaaagtgcaggccgaactagatgagaccaaaatcattctggtaagcaggaagatggagagcaagcccaagaactgaggcgggggtgcgatttccactggccaggcatgcacagatccatcctcgttttaatataatagtaaccacggcactctccagcaagtgggattgcccaccccttcccccaccccgggcatc

SEQ ID NO: 297700 - DNA, 921 bp, Homo sapiens
atccggaagtggattgcgagccaggaggaggaagccggcggtggccccgtcagcagccggctgctgagaggccggtaggcggcggcggtcccgaggggcggcggccgcgctgctccctgagaacgggtcccgcagctgggcaggcgggcggcctgagggcgcggagccatgaagctgtacagcctcagcgtcctctacaaaggcgaggccaaggtggtgctgctcaaagccgcatacgatgtgtcttccttcagctttttccagagatccagcgttcaggaattcatgaccttcacgagtcaactgattgtggagcgctcatcgaaaggcactagagcttctgtcaaagaacaagactatctgtgccacgtctacgtccggaatgatagtcttgcaggtgtggtcattgctgacaatgaatacccatcccgggtggcctttaccttgctggagaaggtactagatgaattctccaagcaagtcgacaggatagactggccagtaggatcccctgtcctgttgtgttctgttgtaaatcatttggcgagactgtattttagtaactgctgcctaacttccctgtgttctatttgagaggcgcctgtctggataaagttgtcttgaaatttacaaaaaaaaaaaaaaaaaaaaaaaaaaaaaaaaaaaaaaaaaaaaaaaacagcgggggattattatatgggggggggaaaaaaggggttataaagggggccaagtgggtccaataggggttttaccataggaccccatatttttttctgcgcaccaaggggagtaatatcgcgagggttccccaatataaggggcgcagcgacataaattgacgataaccacggggtaccgcgcgatttatgtccgcagaaaactgtagatacacaatacaaaggacacgacacagggaga

SEQ ID NO: 297701 - DNA, 498 bp, Homo sapiens
atataaatgtgtgtgtatatatatatatgagttttcctggagtgctggttatctaagcctgtgctggggacagctttttgggaagtctgctacatcccagttagatcttctagatttcacgggaatgtcaccaggttctgttccatccacttggacagtaactattcttggaccgagtctcgacacctagaggtgaagtttgtgtgtgttggagaggaacccaggtaaggcactttcccccatgactgaaatatgaggggctcatgtcagggcacgtactgaacagagctggattctcttttcttttttgtccagcacaacaccatggagtctctgttagagcgaggtgagaagctagatgacttggtgtccaaatccgaggtgctgggaacacagtctaaagccttctataaaactgtgagtacccagcacctgctgcctcctgggtgttctctctagagagcagtcgcagcttgctgcttctggcactctccacta

SEQ ID NO: 297702 - DNA, 4512 bp, Homo sapiens
ctcgctcagcctctccacatcgcggctccggcacctgaagggacgcgggcgggcgcgggcagctccgaccggcggcggcggggcgggacaggcagcccggcggcctccgatggccccgccgtgagaggccggacccgcggcggggaccagcagcggtctagaggagtcccaggagcagccaggacaggcggaagcagtggctgccatggaggaggacaagctcttatctgcagtgcctgaggaaggcgatgccacccgtgaccccggtccagagcctgaagaggagccaggggtccggaatgggatggccagtgagggcctgaacagcagcctctgcagcccagggcacgagcgaaggggcaccccagcggacactgaggaacccacgaaggacccagatgtggccttccatggcctcagccttggcctctctctcaccaatggcctagccctggggccagacttgaacattctggaagattcagcggagtccaggccctggagggctggcgtgctggcagagggggacaatgcttccaggagcctctacccagatgctgaggaccctcagctggggttggatggtcccggggagccagatgtgcgggatggcttcagcgccacgtttgagaagattctggagtcagagctgctgcggggcacccagtacagcagcctcgactccctagacgggctgagcctcacggatgagagcgacagctgcgtcagcttcgaggcccccctcacacccctcatccagcagcgggcccgtgacagccctgagccaggggctgggttgggcattggggacatggcgtttgagggggacatgggggcagctggtggtgatggggagctgggcagccccctgcggcgctccatctccagcagccgctctgagaatgtcctgagccgcctgtctctcatggccatgcccaatggattccatgaagatggccctcagggcccagggggggatgaggatgatgatgaggaggacacggacaagttgctgaactcagccagtgaccccagcctgaaggatggcctgtcagactcagactctgagctcagcagctcggaggggttggagcctggtagtgcagaccctctggccaacgggtgccagggggtcagtgaagctgctcatcggctggcacgccgtctctaccacctcgagggcttccagcgctgtgatgtggcccggcagctgggcaagaacaacgagtttagcaggctggtggccggggagtacctcagtttcttcgacttctcgggcttgactctggacggagcactcagaacattcttgaaggccttcccgctgatgggggagacacaagagcgtgagcgggtcctcacacacttctcccgccggtactgccagtgcaaccctgatgacagcacttcggaagatgggatccacacgctcacctgtgccctgatgctgctcaacacggacctgcacggccacaacattggcaaaaagatgtcctgtcagcaattcattgccaacttggaccagctgaatgatggccaagactttgccaaagacctgctgaagaccctttacaactccatcaagaatgaaaagctggaatgggccattgatgaggatgagctgaggaaatccctgtctgagctggtggatgacaagttcgggacaggcacgaagaaggtgacgcgaatcctggatggtggcaaccccttcctggatgtcccacaggcgctcagtgccaccacctacaagcacggcgtcctgacccggaagactcacgctgacatggatggcaagaggacgccccgtgggaggcgtggctggaagaaattctacgcagtgctcaaagggaccatcctgtacctgcagaaggatgagtacaggcctgacaaagctctatcggagggtgacctgaagaacgccattcgcgtgcatcacgctctggccaccagggcctctgactacagcaagaagtccaacgtgctgaagcttaagacagccgactggagggtattcctcttccaggcaccgagcaaggaagaaatgctgtcctggatcctcaggatcaacctggtggcagccatcttctctgccccggccttcccagccgctgtcagctccatgaagaagttctgtcggcccctgctgccctcctgcaccacccgcctctgccaggaggagcaactgcggtctcatgagaataagttgaggcagctgactgcggagctggccgaacacaggtgtcacccagtcgagaggggcatcaagtccaaggaggccgaggagtaccggttgaaggagcactatctcaccttcgagaaaagccgttatgagacctatatccacctcctggctatgaaaatcaaagtgggctcagatgatctggagcggattgaggcccggctggccactctggaaggggatgacccttctctccggaagacacattcaagccctgccctcagccagggccatgtgactggcagcaaaaccacaaaggatgccactgggcctgatacttagctgacatggatttgcagaccccagggtgggcagatgtctccagtggggtcagtgagcacaattccagccaggggccacttggaccaagctccagtcagttgatgggcagctagaggggtgcagaaagcctgtgggcccaggagatggagatgccgtttgtggcgttgatctccttgcgtccttgggcatctccgggcatcagaccctctccctggcccttgttttcctctccaccatggagcctcattttgtaggccagttgtgtgcatgctctagacaccacctcgctggagaagctggaagggctgttgtcttcccaggtctttctcttctcatcaagctcctctcctcatcttttttgtgtgtgagggcaggtcttgactctaggtctcagctggaaccccaccctttctcctcctccttcctctgagttgaccagcagcaggtctgccgaccaccagcaccatcctctcctcccagcagcctccagaaccatgcccaggtctcctgcctcacatcacaataatctgggacccaggcttgtgccctttcagtgtaaagctgactccatcacatgtgcatccacttcttttcatccattgagatcacactgcctcctttttatacagacacaaatatacatctataagaataatatatacataaggaacccctgaaagatggttttggaactggaatcagttagaggatgaaatcagataaaggaaaagcctattttggagcttcccctgttaggaaggatggctgcacctggccccctggcattcctgacgctctaggagggaagggggaggcagtgctggcctcccttgccctgtttttccctcttccagctgacctgtgacttatactgctcttaccgatgatacttttggaaaaaatagagcgtgtatgcaccgccccgtttgtcccatggatatcctggggtgtgagtcggatgggaccacggccctgtttatatttgggtctttatgttggtgctgccaggtctctgagctccagaggtggcctcttggacagatctactgctataggaataaaagacactctgtctcgcaaatggctgcttgtcaacaagcccaaagatgcttgtcggaggacggttatggaagcccttaattcttggttgtgggaaaaggtggaatgacaagttattgattgtttttctgtcgctatttctttcatttgtctagtgaatcagaaaggcttagccaaggccacatctgggaagagtggagaaatttgccacttgacgatcacggattagctagcacctttaagccctgcatttctccaactgacaagtgggtgggggtgatggcacattcagtgtggctatgaagagcgaatcctctctattgtttaaatagattactgtagtttggccaggaatttggcgtcagtggtaacacacttagttaataaaataagccaggcttgcaactaagtatctaactttacaggcccactcacatttgaggcaaggggctattgagtatgtggagagatgtagtgatttaaattcagattatttaagttggatcagctgaagtgtgttttagacccaaaccatctggccccttcgttttgctcagaggaagtaaatgttcacttaaatgaaattgaaaacgccatgtggcaccacaaaagagctctctgtactttccccatgctgcctcaaaagttctgtgagtttcggggtcagtgtcccacccttcacttcccgagggcgggtgagtggagagcagagccaggagctctggcagctgtggacagatgtgcttcctgagcatgggttgtgcctcccatcagtaaaaaaatgtttagttcacttccttaattgtataattatttatttgtaaattatatacatgtactactgtactaaaatattatgtacattataaaacatacacaaaaatagaaatttaaaaaagatgagatgaaaataaatctaagtcaaagttcta

SEQ ID NO: 297703 - DNA, 4900 bp, Homo sapiens
ctcgctcagcctctccacatcgcggctccggcacctgaagggacgcgggcgggcgcgggcagctccgaccggcggcggcggggcgggacaggcagcccggcggcctccgatggccccgccgtgagaggccggacccgcggcggggaccagcagcggtctagaggagtcccaggagcagccaggacaggcggaagcagtggctgccatggaggaggacaagctcttatctgcagtgcctgaggaaggcgatgccacccgtgaccccggtccagagcctgaagaggagccaggggtccggaatgggatggccagtgagggcctgaacagcagcctctgcagcccagggcacgagcgaaggggcaccccagcggacactgaggaacccacgaaggacccagatgtggccttccatggcctcagccttggcctctctctcaccaatggcctagccctggggccagacttgaacattctggaagattcagcggagtccaggccctggagggctggcgtgctggcagagggggacaatgcttccaggagcctctacccagatgctgaggaccctcagctggggttggatggtcccggggagccagatgtgcgggatggcttcagcgccacgtttgagaagattctggagtcagagctgctgcggggcacccagtacagcagcctcgactccctagacgggctgagcctcacggatgagagcgacagctgcgtcagcttcgaggcccccctcacacccctcatccagcagcgggcccgtgacagccctgagccaggggctgggttgggcattggggacatggcgtttgagggggacatgggggcagctggtggtgatggggagctgggcagccccctgcggcgctccatctccagcagccgctctgagaatgtcctgagccgcctgtctctcatggccatgcccaatggattccatgaagatggccctcagggcccagggggggatgaggatgatgatgaggaggacacggacaagttgctgaactcagccagtgaccccagcctgaaggatggcctgtcagactcagactctgagctcagcagctcggaggggttggagcctggtagtgcagaccctctggccaacgggtgccagggggtcagtgaagctgctcatcggctggcacgccgtctctaccacctcgagggcttccagcgctgtgatgtggcccggcagctgggcaagaacaacgagtttagcaggctggtggccggggagtacctcagtttcttcgacttctcgggcttgactctggacggagcactcagaacattcttgaaggccttcccgctgatgggggagacacaagagcgtgagcgggtcctcacacacttctcccgccggtactgccagtgcaaccctgatgacagcacttcggaagatgggatccacacgctcacctgtgccctgatgctgctcaacacggacctgcacggccacaacattggcaaaaagatgtcctgtcagcaattcattgccaacttggaccagctgaatgatggccaagactttgccaaagacctgctgaagaccctttacaactccatcaagaatgaaaagctggaatgggccattgatgaggatgagctgaggaaatccctgtctgagctggtggatgacaagttcgggacaggcacgaagaaggtgacgcgaatcctggatggtggcaaccccttcctggatgtcccacaggcgctcagtgccaccacctacaagcacggcgtcctgacccggaagactcacgctgacatggatggcaagaggacgccccgtgggaggcgtggctggaagaaattctacgcagtgctcaaagggaccatcctgtacctgcagaaggatgagtacaggcctgacaaagctctatcggagggtgacctgaagaacgccattcgcgtgcatcacgctctggccaccagggcctctgactacagcaagaagtccaacgtgctgaagcttaagacagccgactggagggtattcctcttccaggcaccgagcaaggaagaaatgctgtcctggatcctcaggatcaacctggtggcagccatcttctctgccccggccttcccagccgctgtcagctccatgaagaagttctgtcggcccctgctgccctcctgcaccacccgcctctgccaggaggagcaactgcggtctcatgagaataagttgaggcagctgactgcggagctggccgaacacaggtgtcacccagtcgagaggggcatcaagtccaaggaggccgaggagtaccggttgaaggagcactatctcaccttcgagaaaagccgttatgagacctatatccacctcctggctatgaaaatcaaagtgggctcagatgatctggagcggattgaggcccggctggccactctggaaggggatgacccttctctccggaagacacattcaagccctgccctcagccagggccatgtgactggcagcaaaaccacaaaggatgccactgggcctgatacttagctgacatggatttgcagaccccagggtgggcagatgtctccagtggggtcagtgagcacaattccagccaggggccacttggaccaagctccagtcagttgatgggcagctagaggggtgcagaaagcctgtgggcccaggagatggagatgccgtttgtggcgttgatctccttgcgtccttgggcatctccgggcatcagaccctctccctggcccttgttttcctctccaccatggagcctcattttgtaggccagttgtgtgcatgctctagacaccacctcgctggagaagctggaagggctgttgtcttcccaggtctttctcttctcatcaagctcctctcctcatcttttttgtgtgtgagggcaggtcttgactctaggtctcagctggaaccccaccctttctcctcctccttcctctgagttgaccagcagcaggtctgccgaccaccagcaccatcctctcctcccagcagcctccagaaccatgcccaggtctcctgcctcacatcacaataatctgggacccaggcttgtgccctttcagtgtaaagctgactccatcacatgtgcatccacttcttttcatccattgagatcacactgcctcctttttatacagacacaaatatacatctataagaataatatatacataaggaacccctgaaagatggttttggaactggaatcagttagaggatgaaatcagataaaggaaaagcctattttggagcttcccctgttaggaaggatggctgcacctggccccctggcattcctgacgctctaggagggaagggggaggcagtgctggcctcccttgccctgtttttccctcttccagctgacctgtgacttatactgctcttaccgatgatacttttggaaaaaatagagcgtgtatgcaccgccccgtttgtcccatggatatcctggggtgtgagtcggatgggaccacggccctgtttatatttgggtctttatgttggtgctgccaggtctctgagctccagaggtggcctcttggacagatctactgctataggaataaaagacactctgtctcgcaaatggctgcttgtcaacaagcccaaagatgcttgtcggaggacggttatggaagcccttaattcttggttgtgggaaaaggtggaatgacaagttattgattgtttttctgtcgctatttctttcatttgtctagtgaatcagaaaggcttagccaaggccacatctgggaagagtggagaaatttgccacttgacgatcacggattagctagcacctttaagccctgcatttctccaactgacaagtgggtgggggtgatggcacattcagtgtggctatgaagagcgaatcctctctattgtttaaatagattactgtagtttggccaggaatttggcgtcagtggtaacacacttagttaataaaataagccaggcttgcaactaagtatctaactttacaggcccactcacatttgaggcaaggggctattgagtatgtggagagatgtagtgatttaaattcagattatttaagttggatcagctgaagtgtgttttagacccaaaccatctggccccttcgttttgctcagaggaagtaaatgttcacttaaatgaaattgaaaacgccatgtggcaccacaaaagagctctctgtactttccccatgctgcctcaaaagttctgtgagtttcggggtcagtgtcccacccttcacttcccgagggcgggtgagtggagagcagagccaggagctctggcagctgtggacagatgtgcttcctgagcatgggttgtgcctcccatcagtaaaaaaatgtttagttcacttccttaattgtataattatttatttgtaaattatatacatgtactactgtactaaaatattatgtacattataaaacatacacaaaaatagaaatttaaaaaagatgagatgaaaataaatctaagtcaaagttctaatagttcttcctgcattcgaatggatcctcaccacccacaactgctgcctccaacatgcccattttctaggactgttcaaattcaggactggtgacatgcaataagtggtttgcgccacctggtggtcctgggaagtggcctcgggctcagggacttctgggggttgccccttgaggacggtgtctcttgcgccttcatcctctcattcaatgagggccaactgtgtgctgcacgctgggcggggtgatggggatacggtggtgggaggaagtttggctgcctgtcctcgtggggctcacagtttcgtgaggagaagaacaggcagttaccattaccacttgggcctctgggaggggctggaaagagaagccaaaaaatgacctggaa

SEQ ID NO: 297704 - DNA, 1704 bp, Homo sapiens
  misc_feature (2)..(2): n is a, c, g, or t
  misc_feature (5)..(7): n is a, c, g, or t
gncannngggaagtcggcgtgtcgagtggctcttcctggctgctgaggcgggttaaggtctgagggtcttgtggggccacggcgctgatcaccaggtgtttggcttggtcggttcttatttctcgcctggcaatggcgacgtacacctgcataacttgccgggtggcgttccgcgacgcggacatgcagcgggcccactataagacggactggcaccgctacaacctgcggcggaaggtggccagcatggccccagtgaccgccgagggcttccaggagcgagtgcgggcgcagcgggccgtcgcggaggaggagagcaagggctcggccacctactgcaccgtttgcagtaagaagtttgcctctttcaacgcctacgagaaccacctcaagtcccggcgtcacgttgagctggagaagaaggccgtgcaggcagtgaatcggaaagtggagatgatgaatgaaaagaacttggagaaaggactgggcgtggacagtgtggacaaggatgccatgaacgcggccatccagcaggccatcaaggcccagccgtccatgtctcccaagaaggcgcccccagcgcctgcaaaggaggccaggaatgtcgtggccgtgggtactggtggccgtgggacccacgaccgagacccgagtgagaaaccaccccggctccagtggtttgaacagcaggcgaagaagttggcaaagcagcaggaggaggacagcgaggaggaggaagaggacctggatggagacgattgggaagatattgattctgatgaagaattggaatgtgaggatactgaagcaatggacgatgtggtggagcaggatgcagaggaggaagaggctgaggaaggcccaccccttggtgccatccctatcacggactgcttattttgttcccatcattccagctcgctgatgaagaatgtggctcacatgaccaaagaccacagtttctttattcctgatatagaatatctttcagatattaagggactgattaaatacttgggagagaaagttggtgttggcaagatttgcttgtggtgcaacgagaaagggaagtccttctactccacagaagctgtacaggcacatatgaatgacaaaagccactgtaagctcttcacagatggcgatgctgctttggaatttgcagacttctatgattttaggagtagctatccagatcacaaggaaggggaggaccccaataaggctgaggagttgccctcagaaaagaacttggaatatgatgatgaaaccatggaattgattctgccttctggtgccagagtgggtcatcgctccttgatgagatactacaaacagcgatttggcttgtcaagagctgtggcagttgccaaaaatcggaaggccgtgggccgagtacttcagcagtacagagccctgggatggactggcagcacaggagcggctcttatgcgagagcgagacatgcagtatgtccaaaggatgaaatcaaaatggatgctgaagacaggaatgaagaacaatgccaccaagcagatgcactttcgggtccaagtgagattctgagagtctgctgggattgagcaatcatctcctgcccaagtttcctccttgccctgaggaccagtgaaagacagatcataggagagacccttttgctgctacttcattcgttctgacctaataataaaagttagaaccata

SEQ ID NO: 297705 - DNA, 1416 bp, Homo sapiens
tataagcttctgtttcctcatttataaaacagagatgatagtaataagacctacctcttagagttgagtgggttgaatgtcatgcatgtgtgatatagtgcatgcccatagtcgaggttagctatcagtccccttttttgtaattttcccatagaaaatttagcaaaagttagaagagtaaagcatgccactgcaattgttgagttttgaaacctcatcagtatggtactctttacatctattctgatgtgtcttctggatgaagctggttatatccttagatcttcagggaaagcatctatccaactgaggactgtggagaaaataagaggcgggctgccttctgatggcctgggaagctctaggcaactaaaatccatttgaaaaggcactgtgtttatatgtggtttccttcactgtggctgcttgtgagctgtgtggccacttgaatctggcagagacttgacttcatcttactcttatcaggaagtattgtctgactcgatatatagcttctgcctttctgattaatggggctttaccttttgggcttataaactcttccagatgatgaaaactaaagctactaatcccagataagtgtatatatacaaaagttctggtatgcaattctggagtccacagagacccctgaggcgcatggcttagagaccccaagttagcaactctgttttaaatacaagaacctagttaccccaaactaaccttttgaattctctgccaaggttggattttctctgatcacaaataacagaactttgcctaatttcttaactgccttccaatcataggagcggctcttatgcgagagcgagacatgcagtatgtccaaaggatgaaatcaaaatggatgctgaagacaggaatgaagaacaatgccaccaagcagatgcactttcgggtccaagtgagattctgagagtctgctgggattgagcaatcatctcctgcccaagtttcctccttgccctgaggaccagtgaaagacagatcataggagagacccttttgctgctacttcattcgttctgacctaataataaaagttagaaccataaaacccaaatgtacatgaataaaccagaccaatgtcccacactactgggtactgacactcgccttcaatatgtccgatcttcagactctgcttctttcttatcaacacattcgaacctgctgattccactatgtggatctgaagtgcatgaacagatattgcaggattttaacaaagctgttaaacataattacatatccagaacaagagttaggatcatgctatgattttactctagaatggaaaagacatggacttatatgtttattggcaaaccggagctgatcacataaattgtcccgacattacaagacctaaagtgacaacctagcatacaa

SEQ ID NO: 297706 - DNA, 1951 bp, Homo sapiens
  misc_feature (2)..(2): n is a, c, g, or t
  misc_feature (5)..(7): n is a, c, g, or t
gncannngggaagtcggcgtgtcgagtggctcttcctggctgctgaggcgggttaaggtctgagggtcttgtggggccacggcgctgatcaccaggtgtttggcttggtcggttcttatttctcgcctggcaatggcgacgtacacctgcataacttgccgggtggcgttccgcgacgcggacatgcagcgggcccactataagacggactggcaccgctacaacctgcggcggaaggtggccagcatggccccagtgaccgccgagggcttccaggagcgagtgcgggcgcagcgggccgtcgcggaggaggagagcaagggctcggccacctactgcaccgtttgcagtaagaagtttgcctctttcaacgcctacgagaaccacctcaagtcccggcgtcacgttgagctggagaagaaggccgtgcaggcagtgaatcggaaagtggagatgatgaatgaaaagaacttggagaaaggactgggcgtggacagtgtggacaaggatgccatgaacgcggccatccagcaggccatcaaggcccagccgtccatgtctcccaagaaggcgcccccagcgcctgcaaaggaggccaggaatgtcgtggccgtgggtactggtggccgtgggacccacgaccgagacccgagtgagaaaccaccccggctccagtggtttgaacagcaggcgaagaagttggcaaagcagcaggaggaggacagcgaggaggaggaagaggacctggatggagacgattgggaagatattgattctgatgaagaattggaatgtgaggatactgaagcaatggacgatgtggtggagcaggatgcagaggaggaagaggctgaggaaggcccaccccttggtgccatccctatcacggactgcttattttgttcccatcattccagctcgctgatgaagaatgtggctcacatgaccaaagaccacagtttctttattcctgatatagaatatctttcagatattaagggactgattaaatacttgggagagaaagttggtgttggcaagatttgcttgtggtgcaacgagaaagggaagtccttctactccacagaagctgtacaggcacatatgaatgacaaaagccactgtaagctcttcacagatggcgatgctgctttggaatttgcagacttctatgattttaggagtagctatccagatcacaaggaaggggaggaccccaataaggctgaggagttgccctcagaaaagaacttggaatatgatgatgaaaccatggaattgattctgccttctggtgccagagtgggtcatcgctccttgatgagatactacaaacagcgatttggcttgtcaagagctgtggcagttgccaaaaatcggaaggccgtgggccgagtacttcagcagtacagagccctgggatggactggcagcacaggagcggctcttatgcgagagcgagacatgcagtatgtccaaaggatgaaatcaaaatggatgctgaagacaggaatgaagaacaatgccaccaagcagatgcactttcgggtccaagtgagattctgagagtctgctgggattgagcaatcatctcctgcccaagtttcctccttgccctgaggaccagtgaaagacagatcataggagagacccttttgctgctacttcattcgttctgacctaataataaaagttagaaccatatgagttttcagatgtcgtttttgaatagtgttgaaaggttatgttttcacaaggtaagtcctgtgtctactggaccctgggacttgcactgctgcctgacagttgcttcatcgcctcagctttaaatgatttatgattgtcagagtaatgtgaggaatcaggaatgacttgtgtgccccaaacttagtttaactttcagagtaactcaccatgtcatggcactgggacctatgtaagggggcttgaa

SEQ ID NO: 297707 - DNA, 1650 bp, Homo sapiens
  misc_feature (2)..(2): n is a, c, g, or t
  misc_feature (5)..(7): n is a, c, g, or t
gncannngggaagtcggcgtgtcgagtggctcttcctggctgctgaggcgggttaaggtctgagggtcttgtggggccacggcgctgatcaccaggtgtttggcttggtcggttcttatttctcgcctggcaatggcgacgtacacctgcataacttgccgggtggcgttccgcgacgcggacatgcagcgggcccactataagacggactggcaccgctacaacctgcggcggaaggtggccagcatggccccagtgaccgccgagggcttccaggagcgagtgcgggcgcagcgggccgtcgcggaggaggagagcaagggctcggccacctactgcaccgtttgcagtaagaagtttgcctctttcaacgcctacgagaaccacctcaagtcccggcgtcacgttgagctggagaagaaggccgtgcaggcagtgaatcggaaagtggagatgatgaatgaagcggccatccagcaggccatcaaggcccagccgtccatgtctcccaagaaggcgcccccagcgcctgcaaaggaggccaggaatgtcgtggccgtgggtactggtggccgtgggacccacgaccgagacccgagtgagaaaccaccccggctccagtggtttgaacagcaggcgaagaagttggcaaagcagcaggaggaggacagcgaggaggaggaagaggacctggatggagacgattgggaagatattgattctgatgaagaattggaatgtgaggatactgaagcaatggacgatgtggtggagcaggatgcagaggaggaagaggctgaggaaggcccaccccttggtgccatccctatcacggactgcttattttgttcccatcattccagctcgctgatgaagaatgtggctcacatgaccaaagaccacagtttctttattcctgatatagaatatctttcagatattaagggactgattaaatacttgggagagaaagttggtgttggcaagatttgcttgtggtgcaacgagaaagggaagtccttctactccacagaagctgtacaggcacatatgaatgacaaaagccactgtaagctcttcacagatggcgatgctgctttggaatttgcagacttctatgattttaggagtagctatccagatcacaaggaaggggaggaccccaataaggctgaggagttgccctcagaaaagaacttggaatatgatgatgaaaccatggaattgattctgccttctggtgccagagtgggtcatcgctccttgatgagatactacaaacagcgatttggcttgtcaagagctgtggcagttgccaaaaatcggaaggccgtgggccgagtacttcagcagtacagagccctgggatggactggcagcacaggagcggctcttatgcgagagcgagacatgcagtatgtccaaaggatgaaatcaaaatggatgctgaagacaggaatgaagaacaatgccaccaagcagatgcactttcgggtccaagtgagattctgagagtctgctgggattgagcaatcatctcctgcccaagtttcctccttgccctgaggaccagtgaaagacagatcataggagagacccttttgctgctacttcattcgttctgacctaataataaaagttagaaccata

SEQ ID NO: 297708 - DNA, 999 bp, Homo sapiens
  misc_feature (2)..(2): n is a, c, g, or t
  misc_feature (5)..(7): n is a, c, g, or t
gncannngggaagtcggcgtgtcgagtggctcttcctggctgctgaggcgggttaaggtctgagggtcttgtggggccacggcgctgatcaccaggtgtttggcttggtcggttcttatttctcgcctggcaatggcgacgtacacctgcataacttgccgggtggcgttccgcgacgcggacatgcagcgggcccactataagacggactggcaccgctacaacctgcggcggaaggtggccagcatggccccagtgaccgccgagggcttccaggagcgagtgcgggcgcagcgggccgtcgcggaggaggagagcaagggctcggccacctactgcaccgtttgcagtaagaagtttgcctctttcaacgcctacgagaaccacctcaagtcccggcgtcacgttgagctggagaagaaggccgtgcaggcagtgaatcggaaagtggagatgatgaatgaaaagaacttggagaaaggactgggcgtggacagtgtggacaaggatgccatgaacgcggccatccagcaggccatcaaggcccagccgtccatgtctcccaagaaggcgcccccagcgcctgcaaaggaggccaggaatgtcgtggccgtgggtactggtggccgtgggacccacgaccgagacccgagtgagaaaccaccccggctccagtggtttgaacagcaggcgaagaagttggcaaagcagcaggaggaggacagcgaggaggaggaagaggacctggatggagacgattgggaagatattgattctgatgaagaattggaatgtgaggatactgaagcaatggacgatgtggtggagcaggatgcagaggaggaagaggctgaggaaggcccaccccttggtgccatccctatcacggactgcttattttgttcccatcattccagctcgctgatgaagaatgtggctcacatgaccaaagaccacagtttctcatccttaggaggggggtcctgctagatcgatcat

SEQ ID NO: 297709 - DNA, 794 bp, Homo sapiens
  misc_feature (2)..(2): n is a, c, g, or t
  misc_feature (5)..(7): n is a, c, g, or t
gncannngggaagtcggcgtgtcgagtggctcttcctggctgctgaggcgggttaaggtctgagggtcttgtggggccacggcgctgatcaccaggtgtttggcttggtcggttcttatttctcgcctggcaatggcgacgtacacctgcattaatgaatcggaagagagaaagagcgagggaaagagacgtgaagaaaaaaggaacagaagggaagaaaggacgacacggacccgccacaacaacaagaccgagacaagacgcgaaacacacacaggaacagacaaaacacaccagcatacaaaaacaagaacaacaacaacaagagcaaaaaacgaaaaaaaaaaaaaacaaaagaacaaacacaaacgcaaagagaaaagaagaacgagaaaagacaaagaagacagaaaaagaaagaaaagaagagaagacacgaaagaaaacagagaaagagagagagaggcagaacgaagacgaaaggagcgaacaaagaccataagaggcaagacgagacgagagagaaaaaaaggagagagaaacagagcgaaaaggaagagaaggagcgaagaagaaacaaaaaaaaagaaataagagagagaggacaaacagagaagaaggaagaggaaaaaaacgagagcagaagaagagagaacagaaagaggaagagaaaaaggcagacagaaaggaggagggagaaaagaaacgaaaacaaaaaggaaggaggaagaaaagaaaggaaagcaagacgcgagaggaggaaggagaagcaaacggaaggagaaaaagggacg

SEQ ID NO: 297710 - DNA, 4180 bp, Homo sapiens
gcggggaagcagcagcggccaggatgaatcccaggtgctctggagctggatggtgaaggtcggcactcttcaccctcccgagccctgcccgtctcggccccatgcccccaccagtcagccccgggccacaggcagtgagcaggcacctgggagccgaggccctgtgaccaggccaaggagacgggcgctccagggtcccagccacctgtcccccccatggagctgaggccctggttgctatgggtggtagcagcaacaggaaccttggtcctgctagcagctgatgctcagggccagaaggtcttcaccaacacgtgggctgtgcgcatccctggaggcccagcggtggccaacagtgtggcacggaagcatgggttcctcaacctgggccagatcttcggggactattaccacttctggcatcgaggagtgacgaagcggtccctgtcgcctcaccgcccgcggcacagccggctgcagagggagcctcaagtacagtggctggaacagcaggtggcaaagcgacggactaaacgggacgtgtaccaggagcccacagaccccaagtttcctcagcagtggtacctgtctggtgtcactcagcgggacctgaatgtgaaggcggcctgggcgcagggctacacagggcacggcattgtggtctccattctggacgatggcatcgagaagaaccacccggacttggcaggcaattatgatcctggggccagttttgatgtcaatgaccaggaccctgacccccagcctcggtacacacagatgaatgacaacaggcacggcacacggtgtgcgggggaagtggctgcggtggccaacaacggtgtctgtggtgtaggtgtggcctacaacgcccgcattggaggggtgcgcatgctggatggcgaggtgacagatgcagtggaggcacgctcgctgggcctgaaccccaaccacatccacatctacagtgccagctggggccccgaggatgacggcaagacagtggatgggccagcccgcctcgccgaggaggccttcttccgtggggttagccagggccgaggggggctgggctccatctttgtctgggcctcggggaacgggggccgggaacatgacagctgcaactgcgacggctacaccaacagtatctacacgctgtccatcagcagcgccacgcagtttggcaacgtgccgtggtacagcgaggcctgctcgtccacactggccacgacctacagcagtggcaaccagaatgagaagcagatcgtgacgactgacttgcggcagaagtgcacggagtctcacacgggcacctcagcctctgcccccttagcagccggcatcattgctctcaccctggaggccaataagaacctcacatggcgggacatgcaacacctggtggtacagacctcgaagccagcccacctcaatgccaacgactgggccaccaatggtgtgggccggaaagtgagccactcatatggctacgggcttttggacgcaggcgccatggtggccctggcccagaattggaccacagtggccccccagcggaagtgcatcatcgacatcctcaccgagcccaaagacatcgggaaacggctcgaggtgcggaagaccgtgaccgcgtgcctgggcgagcccaaccacatcactcggctggagcacgctcaggcgcggctcaccctgtcctataatcgccgtggcgacctggccatccacctggtcagccccatgggcacccgctccaccctgctggcagccaggccacatgactactccgcagatgggtttaatgactgggccttcatgacaactcattcctgggatgaggatccctctggcgagtgggtcctagagattgaaaacaccagcgaagccaacaactatgggacgctgaccaagttcaccctcgtactctatggcaccgcccctgaggggctgcccgtacctccagaaagcagtggctgcaagaccctcacgtccagtcaggcctgtgtggtgtgcgaggaaggcttctccctgcaccagaagagctgtgtccagcactgccctccaggcttcgccccccaagtcctcgatacgcactatagcaccgagaatgacgtggagaccatccgggccagcgtctgcgccccctgccacgcctcatgtgccacatgccaggggccggccctgacagactgcctcagctgccccagccacgcctccttggaccctgtggagcagacttgctcccggcaaagccagagcagccgagagtccccgccacagcagcagccacctcggctgcccccggaggtggaggcggggcaacggctgcgggcagggctgctgccctcacacctgcctgaggtggtggccggcctcagctgcgccttcatcgtgctggtcttcgtcactgtcttcctggtcctgcagctgcgctctggctttagttttcggggggtgaaggtgtacaccatggaccgtggcctcatctcctacaaggggctgccccctgaagcctggcaggaggagtgcccgtctgactcagaagaggacgagggccggggcgagaggaccgcctttatcaaagaccagagcgccctctgatgagcccactgcccaccccctcaagccaatcccctccttgggcactttttaattcaccaaagtatttttttatcttgggactgggtttggaccccagctgggaggcaagaggggtggagactgtttcccatcctaccctcgggcccacctggccacctgaggtgggcccaggaccagctggggcgtggggagggccgtaccccaccctcagcaccccttccatgtggagaaaggagtgaaacctttagggcagcttgccccggccccggccccagccagagttcctgcggagtgaagaggggcagcccttgcttgttgggattcctgacccaggccgcagctcttgcccttccctgtccctctaaagcaataatggtcccatccaggcagtcgggggctggcctaggagatatctgagggaggaggccacctctccaagggcttctgcaccctccaccctgtcccccagctctggtgagtcttggcggcagcagccatcataggaagggaccaaggcaaggcaggtgcctccaggtgtgcacgtggcatgtggcctgtggcctgtgtcccatgacccacccctgtgctccgtgcctccaccaccactggccaccaggctggcgcagccaaggccgaagctctggctgaaccctgtgctggtgtcctgaccaccctcccctctcttgcacccgcctctcccgtcagggcccaagtccctgttttctgagcccgggctgcctgggctgttggcactcacagacctggagcccctgggtgggtggtggggaggggcgctggcccagccggcctctctggcctcccacccgatgctgctttcccctgtggggatctcaggggctgtttgaggatatattttcactttgtgattatttcactttagatgctgatgatttgtttttgtatttttaatgggggtagcagctggactacccacgttctcacacccaccgtccgccctgctcctccctggctgccctggccctgaggtgtgggggctgcagcatgttgctgaggagtgaggaatagttgagccccaagtcctgaagaggcgggccagccaggcgggctcaaggaaagggggtcccagtgggaggggcaggctgacatctgtgtttcaagtggggctcgccatgccgggggttcataggtcactggctctccaagtgccagaggtgggcaggtggtggcactgagcccccccaacactgtgccctggtggagaaagcactgacctgtcatgcccccctcaaacctcctcttctgacgtgccttttgcacccctcccattaggacaatcagtcccctcccatctgggagtccccttttcttttctaccctagccattcctggtacccagccatctgcccaggggtgccccctcctctcccatccccctgccctcgtggccagcccggctggttttgtaagatactgggttggtgcacagtgatttttttcttgtaatttaaacaggcccagcattgctggttctatttaatggacatgagataatgttagaggttttaaagtgattaaacgtgcagactatgcaaaccag

SEQ ID NO: 297711 - DNA, 676 bp, Homo sapiens
accggtgaggcgacagggaccgcttcgtcactcctcgatgccagaagtggtaatagtccccgaagatctggcccaggttgaggaacccatgcttcctcagcagtggtacctgtctggtgtcactcagcgggacctgaatgtgaaggcggcctgggcgcagggctacacagggcacggcattgtggtctccattctggacgatggcatcgagaagaaccacccggacttggcaggcaattatgatcctggggccagttttgatgtcaatgaccaggaccctgacccccagcctcggtacacacagatgaatgacaacaggcacggcacacggtgtgcgggggaagtggctgcggtggccaacaacggtgtctgtggtgtaggtgtggcctacaacgcccgcattggaggggtgcgcatgctggatggcgaggtgacagatgcagtggaggcacgctcgctgggcctgaaccccaaccacatccacatctacagccccctcctctcccatccccctgccctcgtggccagcccggctggttttgtaagatactgggttggtgcacagtgatttttttcttgtaatttaaacaggcccagcattgctggttctatttaatggacatgagataatgttagaggttttaaagtgattaaacgtgcagactatgcaaaccag

SEQ ID NO: 297712 - DNA, 4352 bp, Homo sapiens
ctgcccccgcccgcgccggagctggagcccaggccgagccctgccctggtcgccggccgggccgaggccgcgccgccgcgcctccccgcctccgcgccgtgacgctgccgccgggcgcggggaccgcgccgagcccaggcccccgccgccgggctctccgctcggccgaggggcgcccgagccgccgcggcggtcgcctggaaaagtttccccgccagggctccccaggggtcggcactcttcaccctcccgagccctgcccgtctcggccccatgcccccaccagtcagccccgggccacaggcagtgagcaggcacctgggagccgaggccctgtgaccaggccaaggagacgggcgctccagggtcccagccacctgtcccccccatggagctgaggccctggttgctatgggtggtagcagcaacaggaaccttggtcctgctagcagctgatgctcagggccagaaggtcttcaccaacacgtgggctgtgcgcatccctggaggcccagcggtggccaacagtgtggcacggaagcatgggttcctcaacctgggccagatcttcggggactattaccacttctggcatcgaggagtgacgaagcggtccctgtcgcctcaccgcccgcggcacagccggctgcagagggagcctcaagtacagtggctggaacagcaggtggcaaagcgacggactaaacgggacgtgtaccaggagcccacagaccccaagtttcctcagcagtggtacctgtctggtgtcactcagcgggacctgaatgtgaaggcggcctgggcgcagggctacacagggcacggcattgtggtctccattctggacgatggcatcgagaagaaccacccggacttggcaggcaattatgatcctggggccagttttgatgtcaatgaccaggaccctgacccccagcctcggtacacacagatgaatgacaacaggcacggcacacggtgtgcgggggaagtggctgcggtggccaacaacggtgtctgtggtgtaggtgtggcctacaacgcccgcattggaggggtgcgcatgctggatggcgaggtgacagatgcagtggaggcacgctcgctgggcctgaaccccaaccacatccacatctacagtgccagctggggccccgaggatgacggcaagacagtggatgggccagcccgcctcgccgaggaggccttcttccgtggggttagccagggccgaggggggctgggctccatctttgtctgggcctcggggaacgggggccgggaacatgacagctgcaactgcgacggctacaccaacagtatctacacgctgtccatcagcagcgccacgcagtttggcaacgtgccgtggtacagcgaggcctgctcgtccacactggccacgacctacagcagtggcaaccagaatgagaagcagatcgtgacgactgacttgcggcagaagtgcacggagtctcacacgggcacctcagcctctgcccccttagcagccggcatcattgctctcaccctggaggccaataagaacctcacatggcgggacatgcaacacctggtggtacagacctcgaagccagcccacctcaatgccaacgactgggccaccaatggtgtgggccggaaagtgagccactcatatggctacgggcttttggacgcaggcgccatggtggccctggcccagaattggaccacagtggccccccagcggaagtgcatcatcgacatcctcaccgagcccaaagacatcgggaaacggctcgaggtgcggaagaccgtgaccgcgtgcctgggcgagcccaaccacatcactcggctggagcacgctcaggcgcggctcaccctgtcctataatcgccgtggcgacctggccatccacctggtcagccccatgggcacccgctccaccctgctggcagccaggccacatgactactccgcagatgggtttaatgactgggccttcatgacaactcattcctgggatgaggatccctctggcgagtgggtcctagagattgaaaacaccagcgaagccaacaactatgggacgctgaccaagttcaccctcgtactctatggcaccgcccctgaggggctgcccgtacctccagaaagcagtggctgcaagaccctcacgtccagtcaggcctgtgtggtgtgcgaggaaggcttctccctgcaccagaagagctgtgtccagcactgccctccaggcttcgccccccaagtcctcgatacgcactatagcaccgagaatgacgtggagaccatccgggccagcgtctgcgccccctgccacgcctcatgtgccacatgccaggggccggccctgacagactgcctcagctgccccagccacgcctccttggaccctgtggagcagacttgctcccggcaaagccagagcagccgagagtccccgccacagcagcagccacctcggctgcccccggaggtggaggcggggcaacggctgcgggcagggctgctgccctcacacctgcctgaggtggtggccggcctcagctgcgccttcatcgtgctggtcttcgtcactgtcttcctggtcctgcagctgcgctctggctttagttttcggggggtgaaggtgtacaccatggaccgtggcctcatctcctacaaggggctgccccctgaagcctggcaggaggagtgcccgtctgactcagaagaggacgagggccggggcgagaggaccgcctttatcaaagaccagagcgccctctgatgagcccactgcccaccccctcaagccaatcccctccttgggcactttttaattcaccaaagtatttttttatcttgggactgggtttggaccccagctgggaggcaagaggggtggagactgtttcccatcctaccctcgggcccacctggccacctgaggtgggcccaggaccagctggggcgtggggagggccgtaccccaccctcagcaccccttccatgtggagaaaggagtgaaacctttagggcagcttgccccggccccggccccagccagagttcctgcggagtgaagaggggcagcccttgcttgttgggattcctgacccaggccgcagctcttgcccttccctgtccctctaaagcaataatggtcccatccaggcagtcgggggctggcctaggagatatctgagggaggaggccacctctccaagggcttctgcaccctccaccctgtcccccagctctggtgagtcttggcggcagcagccatcataggaagggaccaaggcaaggcaggtgcctccaggtgtgcacgtggcatgtggcctgtggcctgtgtcccatgacccacccctgtgctccgtgcctccaccaccactggccaccaggctggcgcagccaaggccgaagctctggctgaaccctgtgctggtgtcctgaccaccctcccctctcttgcacccgcctctcccgtcagggcccaagtccctgttttctgagcccgggctgcctgggctgttggcactcacagacctggagcccctgggtgggtggtggggaggggcgctggcccagccggcctctctggcctcccacccgatgctgctttcccctgtggggatctcaggggctgtttgaggatatattttcactttgtgattatttcactttagatgctgatgatttgtttttgtatttttaatgggggtagcagctggactacccacgttctcacacccaccgtccgccctgctcctccctggctgccctggccctgaggtgtgggggctgcagcatgttgctgaggagtgaggaatagttgagccccaagtcctgaagaggcgggccagccaggcgggctcaaggaaagggggtcccagtgggaggggcaggctgacatctgtgtttcaagtggggctcgccatgccgggggttcataggtcactggctctccaagtgccagaggtgggcaggtggtggcactgagcccccccaacactgtgccctggtggagaaagcactgacctgtcatgcccccctcaaacctcctcttctgacgtgccttttgcacccctcccattaggacaatcagtcccctcccatctgggagtccccttttcttttctaccctagccattcctggtacccagccatctgcccaggggtgccccctcctctcccatccccctgccctcgtggccagcccggctggttttgtaagatactgggttggtgcacagtgatttttttcttgtaatttaaacaggcccagcattgctggttctatttaatggacatgagataatgttagaggttttaaagtgattaaacgtgcagactatgcaaaccag

SEQ ID NO: 297713 - DNA, 3704 bp, Homo sapiens
accggtgaggcgacagggaccgcttcgtcactcctcgatgccagaagtggtaatagtccccgaagatctggcccaggttgaggaacccatgcttcctcagcagtggtacctgtctggtgtcactcagcgggacctgaatgtgaaggcggcctgggcgcagggctacacagggcacggcattgtggtctccattctggacgatggcatcgagaagaaccacccggacttggcaggcaattatgatcctggggccagttttgatgtcaatgaccaggaccctgacccccagcctcggtacacacagatgaatgacaacaggcacggcacacggtgtgcgggggaagtggctgcggtggccaacaacggtgtctgtggtgtaggtgtggcctacaacgcccgcattggaggggtgcgcatgctggatggcgaggtgacagatgcagtggaggcacgctcgctgggcctgaaccccaaccacatccacatctacagtgccagctggggccccgaggatgacggcaagacagtggatgggccagcccgcctcgccgaggaggccttcttccgtggggttagccagggccgaggggggctgggctccatctttgtctgggcctcggggaacgggggccgggaacatgacagctgcaactgcgacggctacaccaacagtatctacacgctgtccatcagcagcgccacgcagtttggcaacgtgccgtggtacagcgaggcctgctcgtccacactggccacgacctacagcagtggcaaccagaatgagaagcagatcgtgacgactgacttgcggcagaagtgcacggagtctcacacgggcacctcagcctctgcccccttagcagccggcatcattgctctcaccctggaggccaataagaacctcacatggcgggacatgcaacacctggtggtacagacctcgaagccagcccacctcaatgccaacgactgggccaccaatggtgtgggccggaaagtgagccactcatatggctacgggcttttggacgcaggcgccatggtggccctggcccagaattggaccacagtggccccccagcggaagtgcatcatcgacatcctcaccgagcccaaagacatcgggaaacggctcgaggtgcggaagaccgtgaccgcgtgcctgggcgagcccaaccacatcactcggctggagcacgctcaggcgcggctcaccctgtcctataatcgccgtggcgacctggccatccacctggtcagccccatgggcacccgctccaccctgctggcagccaggccacatgactactccgcagatgggtttaatgactgggccttcatgacaactcattcctgggatgaggatccctctggcgagtgggtcctagagattgaaaacaccagcgaagccaacaactatgggacgctgaccaagttcaccctcgtactctatggcaccgcccctgaggggctgcccgtacctccagaaagcagtggctgcaagaccctcacgtccagtcaggcctgtgtggtgtgcgaggaaggcttctccctgcaccagaagagctgtgtccagcactgccctccaggcttcgccccccaagtcctcgatacgcactatagcaccgagaatgacgtggagaccatccgggccagcgtctgcgccccctgccacgcctcatgtgccacatgccaggggccggccctgacagactgcctcagctgccccagccacgcctccttggaccctgtggagcagacttgctcccggcaaagccagagcagccgagagtccccgccacagcagcagccacctcggctgcccccggaggtggaggcggggcaacggctgcgggcagggctgctgccctcacacctgcctgaggtggtggccggcctcagctgcgccttcatcgtgctggtcttcgtcactgtcttcctggtcctgcagctgcgctctggctttagttttcggggggtgaaggtgtacaccatggaccgtggcctcatctcctacaaggggctgccccctgaagcctggcaggaggagtgcccgtctgactcagaagaggacgagggccggggcgagaggaccgcctttatcaaagaccagagcgccctctgatgagcccactgcccaccccctcaagccaatcccctccttgggcactttttaattcaccaaagtatttttttatcttgggactgggtttggaccccagctgggaggcaagaggggtggagactgtttcccatcctaccctcgggcccacctggccacctgaggtgggcccaggaccagctggggcgtggggagggccgtaccccaccctcagcaccccttccatgtggagaaaggagtgaaacctttagggcagcttgccccggccccggccccagccagagttcctgcggagtgaagaggggcagcccttgcttgttgggattcctgacccaggccgcagctcttgcccttccctgtccctctaaagcaataatggtcccatccaggcagtcgggggctggcctaggagatatctgagggaggaggccacctctccaagggcttctgcaccctccaccctgtcccccagctctggtgagtcttggcggcagcagccatcataggaagggaccaaggcaaggcaggtgcctccaggtgtgcacgtggcatgtggcctgtggcctgtgtcccatgacccacccctgtgctccgtgcctccaccaccactggccaccaggctggcgcagccaaggccgaagctctggctgaaccctgtgctggtgtcctgaccaccctcccctctcttgcacccgcctctcccgtcagggcccaagtccctgttttctgagcccgggctgcctgggctgttggcactcacagacctggagcccctgggtgggtggtggggaggggcgctggcccagccggcctctctggcctcccacccgatgctgctttcccctgtggggatctcaggggctgtttgaggatatattttcactttgtgattatttcactttagatgctgatgatttgtttttgtatttttaatgggggtagcagctggactacccacgttctcacacccaccgtccgccctgctcctccctggctgccctggccctgaggtgtgggggctgcagcatgttgctgaggagtgaggaatagttgagccccaagtcctgaagaggcgggccagccaggcgggctcaaggaaagggggtcccagtgggaggggcaggctgacatctgtgtttcaagtggggctcgccatgccgggggttcataggtcactggctctccaagtgccagaggtgggcaggtggtggcactgagcccccccaacactgtgccctggtggagaaagcactgacctgtcatgcccccctcaaacctcctcttctgacgtgccttttgcacccctcccattaggacaatcagtcccctcccatctgggagtccccttttcttttctaccctagccattcctggtacccagccatctgcccaggggtgccccctcctctcccatccccctgccctcgtggccagcccggctggttttgtaagatactgggttggtgcacagtgatttttttcttgtaatttaaacaggcccagcattgctggttctatttaatggacatgagataatgttagaggttttaaagtgattaaacgtgcagactatgcaaaccag

SEQ ID NO: 297714 - DNA, 3480 bp, Homo sapiens
tgccggtgttaagggccccctcaaggtccccggtatcgtataagcttgattagccggacccccagcctcggtacacacagataaatgacaacaggcacggcacacggtgtgcgggggaagtggctgcggtggccaacaacggtgtctgtggtgtaggtgtggcctacaacgcccgcattggaggggtgcgcatgctggatggcgaggtgacagatgcagtggaggcacgctcgctgggcctgaaccccaaccacatccacatctacagtgccagctggggccccgaggatgacggcaagacagtggatgggccagcccgcctcgccgaggaggccttcttccgtggggttagccagggccgaggggggctgggctccatctttgtctgggcctcggggaacgggggccgggaacatgacagctgcaactgcgacggctacaccaacagtatctacacgctgtccatcagcagcgccacgcagtttggcaacgtgccgtggtacagcgaggcctgctcgtccacactggccacgacctacagcagtggcaaccagaatgagaagcagatcgtgacgactgacttgcggcagaagtgcacggagtctcacacgggcacctcagcctctgcccccttagcagccggcatcattgctctcaccctggaggccaataagaacctcacatggcgggacatgcaacacctggtggtacagacctcgaagccagcccacctcaatgccaacgactgggccaccaatggtgtgggccggaaagtgagccactcatatggctacgggcttttggacgcaggcgccatggtggccctggcccagaattggaccacagtggccccccagcggaagtgcatcatcgacatcctcaccgagcccaaagacatcgggaaacggctcgaggtgcggaagaccgtgaccgcgtgcctgggcgagcccaaccacatcactcggctggagcacgctcaggcgcggctcaccctgtcctataatcgccgtggcgacctggccatccacctggtcagccccatgggcacccgctccaccctgctggcagccaggccacatgactactccgcagatgggtttaatgactgggccttcatgacaactcattcctgggatgaggatccctctggcgagtgggtcctagagattgaaaacaccagcgaagccaacaactatgggacgctgaccaagttcaccctcgtactctatggcaccgcccctgaggggctgcccgtacctccagaaagcagtggctgcaagaccctcacgtccagtcaggcctgtgtggtgtgcgaggaaggcttctccctgcaccagaagagctgtgtccagcactgccctccaggcttcgccccccaagtcctcgatacgcactatagcaccgagaatgacgtggagaccatccgggccagcgtctgcgccccctgccacgcctcatgtgccacatgccaggggccggccctgacagactgcctcagctgccccagccacgcctccttggaccctgtggagcagacttgctcccggcaaagccagagcagccgagagtccccgccacagcagcagccacctcggctgcccccggaggtggaggcggggcaacggctgcgggcagggctgctgccctcacacctgcctgaggtggtggccggcctcagctgcgccttcatcgtgctggtcttcgtcactgtcttcctggtcctgcagctgcgctctggctttagttttcggggggtgaaggtgtacaccatggaccgtggcctcatctcctacaaggggctgccccctgaagcctggcaggaggagtgcccgtctgactcagaagaggacgagggccggggcgagaggaccgcctttatcaaagaccagagcgccctctgatgagcccactgcccaccccctcaagccaatcccctccttgggcactttttaattcaccaaagtatttttttatcttgggactgggtttggaccccagctgggaggcaagaggggtggagactgtttcccatcctaccctcgggcccacctggccacctgaggtgggcccaggaccagctggggcgtggggagggccgtaccccaccctcagcaccccttccatgtggagaaaggagtgaaacctttagggcagcttgccccggccccggccccagccagagttcctgcggagtgaagaggggcagcccttgcttgttgggattcctgacccaggccgcagctcttgcccttccctgtccctctaaagcaataatggtcccatccaggcagtcgggggctggcctaggagatatctgagggaggaggccacctctccaagggcttctgcaccctccaccctgtcccccagctctggtgagtcttggcggcagcagccatcataggaagggaccaaggcaaggcaggtgcctccaggtgtgcacgtggcatgtggcctgtggcctgtgtcccatgacccacccctgtgctccgtgcctccaccaccactggccaccaggctggcgcagccaaggccgaagctctggctgaaccctgtgctggtgtcctgaccaccctcccctctcttgcacccgcctctcccgtcagggcccaagtccctgttttctgagcccgggctgcctgggctgttggcactcacagacctggagcccctgggtgggtggtggggaggggcgctggcccagccggcctctctggcctcccacccgatgctgctttcccctgtggggatctcaggggctgtttgaggatatattttcactttgtgattatttcactttagatgctgatgatttgtttttgtatttttaatgggggtagcagctggactacccacgttctcacacccaccgtccgccctgctcctccctggctgccctggccctgaggtgtgggggctgcagcatgttgctgaggagtgaggaatagttgagccccaagtcctgaagaggcgggccagccaggcgggctcaaggaaagggggtcccagtgggaggggcaggctgacatctgtgtttcaagtggggctcgccatgccgggggttcataggtcactggctctccaagtgccagaggtgggcaggtggtggcactgagcccccccaacactgtgccctggtggagaaagcactgacctgtcatgcccccctcaaacctcctcttctgacgtgccttttgcacccctcccattaggacaatcagtcccctcccatctgggagtccccttttcttttctaccctagccattcctggtacccagccatctgcccaggggtgccccctcctctcccatccccctgccctcgtggccagcccggctggttttgtaagatactgggttggtgcacagtgatttttttcttgtaatttaaacaggcccagcattgctggttctatttaatggacatgagataatgttagaggttttaaagtgattaaacgtgcagactatgcaaaccag

SEQ ID NO: 297715 - DNA, 4508 bp, Homo sapiens
ctgcccccgcccgcgccggagctggagcccaggccgagccctgccctggtcgccggccgggccgaggccgcgccgccgcgcctccccgcctccgcgccgtgacgctgccgccgggcgcggggaccgcgccgagcccaggcccccgccgccgggctctccgctcggccgaggggcgcccgagccgccgcggcggtcgcctggaaaagtttccccgccagggctccccaggggtcggcactcttcaccctcccgagccctgcccgtctcggccccatgcccccaccagtcagccccgggccacaggcagtgagcaggcacctgggagccgaggccctgtgaccaggccaaggagacgggcgctccagggtcccagccacctgtcccccccatggagctgaggccctggttgctatgggtggtagcagcaacaggaaccttggtcctgctagcagctgatgctcagggccagaaggtcttcaccaacacgtgggctgtgcgcatccctggaggcccagcggtggccaacagtgtggcacggaagcatgggttcctcaacctgggccagatcttcggggactattaccacttctggcatcgaggagtgacgaagcggtccctgtcgcctcaccgcccgcggcacagccggctgcagagggagcctcaagtacagtggctggaacagcaggtggcaaagcgacggactaaacgggacgtgtaccaggagcccacagaccccaagtttcctcagcagtggtacctgtctggtgtcactcagcgggacctgaatgtgaaggcggcctgggcgcagggctacacagggcacggcattgtggtctccattctggacgatggcatcgagaagaaccacccggacttggcaggcaattatgatcctggggccagttttgatgtcaatgaccaggaccctgacccccagcctcggtacacacagatgaatgacaacaggcacggcacacggtgtgcgggggaagtggctgcggtggccaacaacggtgtctgtggtgtaggtgtggcctacaacgcccgcattggaggggtgcgcatgctggatggcgaggtgacagatgcagtggaggcacgctcgctgggcctgaaccccaaccacatccacatctacagtgccagctggggccccgaggatgacggcaagacagtggatgggccagcccgcctcgccgaggaggccttcttccgtggggttagccagggccgaggggggctgggctccatctttgtctgggcctcggggaacgggggccgggaacatgacagctgcaactgcgacggctacaccaacagtatctacacgctgtccatcagcagcgccacgcagtttggcaacgtgccgtggtacagcgaggcctgctcgtccacactggccacgacctacagcagtggcaaccagaatgagaagcagatcgtgacgactgacttgcggcagaagtgcacggagtctcacacgggcacctcagcctctgcccccttagcagccggcatcattgctctcaccctggaggccaataagaacctcacatggcgggacatgcaacacctggtggtacagacctcgaagccagcccacctcaatgccaacgactgggccaccaatggtgtgggccggaaagtgagccactcatatggctacgggcttttggacgcaggcgccatggtggccctggcccagaattggaccacagtggccccccagcggaagtgcatcatcgacatcctcaccgagcccaaagacatcgggaaacggctcgaggtgcggaagaccgtgaccgcgtgcctgggcgagcccaaccacatcactcggctggagcacgctcaggcgcggctcaccctgtcctataatcgccgtggcgacctggccatccacctggtcagccccatgggcacccgctccaccctgctggcagccaggccacatgactactccgcagatgggtttaatgactgggccttcatgacaactcattcctgggatgaggatccctctggcgagtgggtcctagagattgaaaacaccagcgaagccaacaactatgggacgctgaccaagttcaccctcgtactctatggcaccgcccctgaggggctgcccgtacctccagaaagcagtggctgcaagaccctcacgtccagtcaggcctgtgtggtgtgcgaggaaggcttctccctgcaccagaagagctgtgtccagcactgccctccaggcttcgccccccaagtcctcgatacgcactatagcaccgagaatgacgtggagaccatccgggccagcgtctgcgccccctgccacgcctcatgtgccacatgccaggggccggccctgacagactgcctcagctgccccagccacgcctccttggaccctgtggagcagacttgctcccggcaaagccagagcagccgagagtccccgccacagcagcagccacctcggctgcccccggaggtggaggcggggcaacggctgcgggcagggctgctgccctcacacctgcctgaggtggtggccggcctcagctgcgccttcatcgtgctggtcttcgtcactgtcttcctggtcctgcagctgcgctctggctttagttttcggggggtgaaggtgtacaccatggaccgtggcctcatctcctacaaggggctgccccctgaagcctggcaggaggagtgcccgtctgactcagaagaggacgagggccggggcgagaggaccgcctttatcaaagaccagagcgccctctgatgagcccactgcccaccccctcaagccaatcccctccttgggcactttttaattcaccaaagtatttttttatcttgggactgggtttggaccccagctgggaggcaagaggggtggagactgtttcccatcctaccctcgggcccacctggccacctgaggtgggcccaggaccagctggggcgtggggagggccgtaccccaccctcagcaccccttccatgtggagaaaggagtgaaacctttagggcagcttgccccggccccggccccagccagagttcctgcggagtgaagaggggcagcccttgcttgttgggattcctgacccaggccgcagctcttgcccttccctgtccctctaaagcaataatggtcccatccaggcagtcgggggctggcctaggagatatctgagggaggaggccacctctccaagggcttctgcaccctccaccctgtcccccagctctggtgagtcttggcggcagcagccatcataggaagggaccaaggcaaggcaggtgcctccaggtgtgcacgtggcatgtggcctgtggcctgtgtcccatgacccacccctgtgctccgtgcctccaccaccactggccaccaggctggcgcagccaaggccgaagctctggctgaaccctgtgctggtgtcctgaccaccctcccctctcttgcacccgcctctcccgtcagggcccaagtccctgttttctgagcccgggctgcctgggctgttggcactcacagacctggagcccctgggtgggtggtggggaggggcgctggcccagccggcctctctggcctcccacccgatgctgctttcccctgtggggatctcaggggctgtttgaggatatattttcactttgtgattatttcactttagatgctgatgatttgtttttgtatttttaatgggggtagcagctggactacccacgttctcacacccaccgtccgccctgctcctccctggctgccctggccctgaggtgtgggggctgcagcatgttgctgaggagtgaggaatagttgagccccaagtcctgaagaggcgggccagccaggcgggctcaaggaaagggggtcccagtgggaggggcaggctgacatctgtgtttcaagtggggctcgccatgccgggggttcataggtcactggctctccaagtgccagaggtgggcaggtggtggcactgagcccccccaacactgtgccctggtggagaaagcactgacctgtcatgcccccctcaaacctcctcttctgacgtgccttttgcacccctcccattaggacaatcagtcccctcccatctgggagtccccttttcttttctaccctagccattcctggtacccagccatctgcccaggggtgccccctcctctcccatccccctgccctcgtggccagcccggctggttttgtaagatactgggttggtgcacagtgatttttttcttgtaatttaaacaggcccagcattgctggttctatttaatggacatgagataatgttagaggttttaaagtgattaaacgtgcagactatgcaaaccagaaaaaaaaaaaaattcagaggaatcataggcgggggcgcgaaaaaagacggtactagaaggggccatgggccaacgggtacccgagaccaaggttttggccacggggaaaccgcggtccccaaatggaccggatactcaaaaggccggaccgctag

SEQ ID NO: 297716 - DNA, 3007 bp, Homo sapiens
agcactctctgtagggcagcccttagggcagctggagagctgctcccaaaaaagactgatccccagcctctcccttccttctttgcagtaagaacctcacatggcgggacatgcaacacctggtggtacagacctcgaagccagcccacctcaatgccaacgactgggccaccaatggtgtgggccggaaagtgagccactcatatggctacgggcttttggacgcaggcgccatggtggccctggcccagaattggaccacagtggccccccagcggaagtgcatcatcgacatcctcaccgagcccaagtgagggctggacccaggctgggagggggccagtgggacctgagagtcgcagggggtgcccgctggtccctctgggccaggctgaccatcatggtgctctcctgcacagagacatcgggaaacggctcgaggtgcggaagaccgtgaccgcgtgcctgggcgagcccaaccacatcactcggctggagcacgctcaggcgcggctcaccctgtcctataatcgccgtggcgacctggccatccacctggtcagccccatgggcacccgctccaccctgctggcagccaggccacatgactactccgcagatgggtttaatgactgggccttcatgacaactcattcctgggatgaggatccctctggcgagtgggtcctagagattgaaaacaccagcgaagccaacaactatgggacgctgaccaagttcaccctcgtactctatggcaccgcccctgaggggctgcccgtacctccagaaagcagtggctgcaagaccctcacgtccagtcaggcctgtgtggtgtgcgaggaaggcttctccctgcaccagaagagctgtgtccagcactgccctccaggcttcgccccccaagtcctcgatacgcactatagcaccgagaatgacgtggagaccatccgggccagcgtctgcgccccctgccacgcctcatgtgccacatgccaggggccggccctgacagactgcctcagctgccccagccacgcctccttggaccctgtggagcagacttgctcccggcaaagccagagcagccgagagtccccgccacagcagcagccacctcggctgcccccggaggtggaggcggggcaacggctgcgggcagggctgctgccctcacacctgcctgaggtggtggccggcctcagctgcgccttcatcgtgctggtcttcgtcactgtcttcctggtcctgcagctgcgctctggctttagttttcggggggtgaaggtgtacaccatggaccgtggcctcatctcctacaaggggctgccccctgaagcctggcaggaggagtgcccgtctgactcagaagaggacgagggccggggcgagaggaccgcctttatcaaagaccagagcgccctctgatgagcccactgcccaccccctcaagccaatcccctccttgggcactttttaattcaccaaagtatttttttatcttgggactgggtttggaccccagctgggaggcaagaggggtggagactgtttcccatcctaccctcgggcccacctggccacctgaggtgggcccaggaccagctggggcgtggggagggccgtaccccaccctcagcaccccttccatgtggagaaaggagtgaaacctttagggcagcttgccccggccccggccccagccagagttcctgcggagtgaagaggggcagcccttgcttgttgggattcctgacccaggccgcagctcttgcccttccctgtccctctaaagcaataatggtcccatccaggcagtcgggggctggcctaggagatatctgagggaggaggccacctctccaagggcttctgcaccctccaccctgtcccccagctctggtgagtcttggcggcagcagccatcataggaagggaccaaggcaaggcaggtgcctccaggtgtgcacgtggcatgtggcctgtggcctgtgtcccatgacccacccctgtgctccgtgcctccaccaccactggccaccaggctggcgcagccaaggccgaagctctggctgaaccctgtgctggtgtcctgaccaccctcccctctcttgcacccgcctctcccgtcagggcccaagtccctgttttctgagcccgggctgcctgggctgttggcactcacagacctggagcccctgggtgggtggtggggaggggcgctggcccagccggcctctctggcctcccacccgatgctgctttcccctgtggggatctcaggggctgtttgaggatatattttcactttgtgattatttcactttagatgctgatgatttgtttttgtatttttaatgggggtagcagctggactacccacgttctcacacccaccgtccgccctgctcctccctggctgccctggccctgaggtgtgggggctgcagcatgttgctgaggagtgaggaatagttgagccccaagtcctgaagaggcgggccagccaggcgggctcaaggaaagggggtcccagtgggaggggcaggctgacatctgtgtttcaagtggggctcgccatgccgggggttcataggtcactggctctccaagtgccagaggtgggcaggtggtggcactgagcccccccaacactgtgccctggtggagaaagcactgacctgtcatgcccccctcaaacctcctcttctgacgtgccttttgcacccctcccattaggacaatcagtcccctcccatctgggagtccccttttcttttctaccctagccattcctggtacccagccatctgcccaggggtgccccctcctctcccatccccctgccctcgtggccagcccggctggttttgtaagatactgggttggtgcacagtgatttttttcttgtaatttaaacaggcccagcattgctggttctatttaatggacatgagataatgttagaggttttaaagtgattaaacgtgcagactatgcaaaccag

SEQ ID NO: 297717 - DNA, 4283 bp, Homo sapiens
ctgcccccgcccgcgccggagctggagcccaggccgagccctgccctggtcgccggccgggccgaggccgcgccgccgcgcctccccgcctccgcgccgtgacgctgccgccgggcgcggggaccgcgccgagcccaggcccccgccgccgggctctccgctcggccgaggggcgcccgagccgccgcggcggtcgcctggaaaagtttccccgccagggctccccaggggtcggcactcttcaccctcccgagccctgcccgtctcggccccatgcccccaccagtcagccccgggccacaggcagtgagcaggcacctgggagccgaggccctgtgaccaggccaaggagacgggcgctccagggtcccagccacctgtcccccccatggagctgaggccctggttgctatgggtggtagcagcaacaggaaccttggtcctgctagcagctgatgctcagggccagaaggtcttcaccaacacgtgggctgtgcgcatccctggaggcccagcggtggccaacagtgtggcacggaagcatgggttcctcaacctgggccagatcttcggggactattaccacttctggcatcgaggagtgacgaagcggtccctgtcgcctcaccgcccgcggcacagccggctgcagagggagcctcaagtacagtggctggaacagcaggtggcaaagcgacggactaaacgggacgtgtaccaggagcccacagaccccaagtttcctcagcagtggtacctgtctggtgtcactcagcgggacctgaatgtgaaggcggcctgggcgcagggctacacagggcacggcattgtggtctccattctggacgatggcatcgagaagaaccacccggacttggcaggcaattatgatcctggggccagttttgatgtcaatgaccaggaccctgacccccagcctcggtacacacagatgaatgacaacaggcacggcacacggtgtgcgggggaagtggctgcggtggccaacaacggtgtctgtggtgtaggtgtggcctacaacgcccgcattggaggggtgcgcatgctggatggcgaggtgacagatgcagtggaggcacgctcgctgggcctgaaccccaaccacatccacatctacagtgccagctggggccccgaggatgacggcaagacagtggatgggccagcccgcctcgccgaggaggccttcttccgtggggttagccagggccgaggggggctgggctccatctttgtctgggcctcggggaacgggggccgggaacatgacagctgcaactgcgacggctacaccaacagtatctacacgctgtccatcagcagcgccacgcagtttggcaacgtgccgtggtacagcgaggcctgctcgtccacactggccacgacctacagcagtggcaaccagaatgagaagcagatcgtgacgactgacttgcggcagaagtgcacggagtctcacacgggcacctcagcctctgcccccttagcagccggcatcattgctctcaccctggaggccaataagaacctcacatggcgggacatgcaacacctggtggtacagacctcgaagccagcccacctcaatgccaacgactgggccaccaatggtgtgggccggaaagtgagccactcatatggctacgggcttttggacgcaggcgccatggtggccctggcccagaattggaccacagtggccccccagcggaagtgcatcatcgacatcctcaccgagcccaaagacatcgggaaacggctcgaggtgcggaagaccgtgaccgcgtgcctgggcgagcccaaccacatcactcggctggagcacgctcaggcgcggctcaccctgtcctataatcgccgtggcgacctggccatccacctggtcagccccatgggcacccgctccaccctgctggcagccaggccacatgactactccgcagatgggtttaatgactgggccttcatgacaactcattcctgggatgaggatccctctggcgagtgggtcctagagattgaaaacaccagcgaagccaacaactatgggacgctgaccaagttcaccctcgtactctatggcaccgcccctgaggggctgcccgtacctccagaaagcagtggctgcaagaccctcacgtccagtcaggcctgtgtggtgtgcgaggaaggcttctccctgcaccagaagagctgtgtccagcactgccctccaggcttcgccccccaagtcctcgatacgcactatagcaccgagaatgacgtggagaccatccgggccagcgtctgcgccccctgccacgcctcatgtgccacatgccaggggccggccctgacagactgcctcagctgccccagccacgcctccttggaccctgtggagcagacttgctcccggcaaagccagagcagccgagagtccccgccacagcagcagccacctcggctgcccccggaggtggaggcggggcaacggctgcgggcagggctgctgccctcacacctgcctgaggtggtggccggcctcagctgcgccttcatcgtgctggtcttcgtcactgtcttcctggtcctgcagctgcgctctggctttagttttcggggggtgaaggtgtacaccatggaccgtggcctcatctcctacaaggggctgccccctgaagcctggcaggaggagtgcccgtctgactcagaagaggacgagggccggggcgagaggaccgcctttatcaaagaccagagcgccctctgatgagcccactgcccaccccctcaagccaatcccctccttgggcactttttaattcaccaaagtatttttttatcttgggactgggtttggaccccagctgggaggcaagaggggtggagactgtttcccatcctaccctcgggcccacctggccacctgaggtgggcccaggaccagctggggcgtggggagggccgtaccccaccctcagcaccccttccatgtggagaaaggagtgaaacctttagggcagcttgccccggccccggccccagccagattccctgtccctctaaagcaataatggtcccatccaggcagtcgggggctggcctaggagatatctgagggaggaggccacctctccaagggcttctgcaccctccaccctgtcccccagctctggtgagtcttggcggcagcagccatcataggaagggaccaaggcaaggcaggtgcctccaggtgtgcacgtggcatgtggcctgtggcctgtgtcccatgacccacccctgtgctccgtgcctccaccaccactggccaccaggctggcgcagccaaggccgaagctctggctgaaccctgtgctggtgtcctgaccaccctcccctctcttgcacccgcctctcccgtcagggcccaagtccctgttttctgagcccgggctgcctgggctgttggcactcacagacctggagcccctgggtgggtggtggggaggggcgctggcccagccggcctctctggcctcccacccgatgctgctttcccctgtggggatctcaggggctgtttgaggatatattttcactttgtgattatttcactttagatgctgatgatttgtttttgtatttttaatgggggtagcagctggactacccacgttctcacacccaccgtccgccctgctcctccctggctgccctggccctgaggtgtgggggctgcagcatgttgctgaggagtgaggaatagttgagccccaagtcctgaagaggcgggccagccaggcgggctcaaggaaagggggtcccagtgggaggggcaggctgacatctgtgtttcaagtggggctcgccatgccgggggttcataggtcactggctctccaagtgccagaggtgggcaggtggtggcactgagcccccccaacactgtgccctggtggagaaagcactgacctgtcatgcccccctcaaacctcctcttctgacgtgccttttgcacccctcccattaggacaatcagtcccctcccatctgggagtccccttttcttttctaccctagccattcctggtacccagccatctgcccaggggtgccccctcctctcccatccccctgccctcgtggccagcccggctggttttgtaagatactgggttggtgcacagtgatttttttcttgtaatttaaacaggcccagcattgctggttctatttaatggacatgagataatgttagaggttttaaagtgattaaacgtgcagactatgcaaaccag

SEQ ID NO: 297718 - DNA, 4331 bp, Homo sapiens
ctgcccccgcccgcgccggagctggagcccaggccgagccctgccctggtcgccggccgggccgaggccgcgccgccgcgcctccccgcctccgcgccgtgacgctgccgccgggcgcggggaccgcgccgagcccaggcccccgccgccgggctctccgctcggccgaggggcgcccgagccgccgcggcggtcgcctggaaaagtttccccgccagggctccccaggggtcggcactcttcaccctcccgagccctgcccgtctcggccccatgcccccaccagtcagccccgggccacaggcagtgagcaggcacctgggagccgaggccctgtgaccaggccaaggagacgggcgctccagggtcccagccacctgtcccccccatggagctgaggccctggttgctatgggtggtagcagcaacaggaaccttggtcctgctagcagctgatgctcagggccagaaggtcttcaccaacacgtgggctgtgcgcatccctggaggcccagcggtggccaacagtgtggcacggaagcatgggttcctcaacctgggccagatcttcggggactattaccacttctggcatcgaggagtgacgaagcggtccctgtcgcctcaccgcccgcggcacagccggctgcagagggagcctcaagtacagtggctggaacagcaggtggcaaagcgacggactaaacgggacgtgtaccaggagcccacagaccccaagtttcctcagcagtggtacctgtctggtgtcactcagcgggacctgaatgtgaaggcggcctgggcgcagggctacacagggcacggcattgtggtctccattctggacgatggcatcgagaagaaccacccggacttggcaggcaattatgatcctggggccagttttgatgtcaatgaccaggaccctgacccccagcctcggtacacacagatgaatgacaacaggcacggcacacggtgtgcgggggaagtggctgcggtggccaacaacggtgtctgtggtgtaggtgtggcctacaacgcccgcattggaggggtgcgcatgctggatggcgaggtgacagatgcagtggaggcacgctcgctgggcctgaaccccaaccacatccacatctacagtgccagctggggccccgaggatgacggcaagacagtggatgggccagcccgcctcgccgaggaggccttcttccgtggggttagccagggccgaggggggctgggctccatctttgtctgggcctcggggaacgggggccgggaacatgacagctgcaactgcgacggctacaccaacagtatctacacgctgtccatcagcagcgccacgcagtttggcaacgtgccgtggtacagcgaggcctgctcgtccacactggccacgacctacagcagtggcaaccagaatgagaagcagatcgtgacgactgacttgcggcagaagtgcacggagtctcacacgggcacctcagcctctgcccccttagcagccggcatcattgctctcaccctggaggccaataagaacctcacatggcgggacatgcaacacctggtggtacagacctcgaagccagcccacctcaatgccaacgactgggccaccaatggtgtgggccggaaagtgagccactcatatggctacgggcttttggacgcaggcgccatggtggccctggcccagaattggaccacagtggccccccagcggaagtgcatcatcgacatcctcaccgagcccaaagacatcgggaaacggctcgaggtgcggaagaccgtgaccgcgtgcctgggcgagcccaaccacatcactcggctggagcacgctcaggcgcggctcaccctgtcctataatcgccgtggcgacctggccatccacctggtcagccccatgggcacccgctccaccctgctggcagccaggccacatgactactccgcagatgggtttaatgactgggccttcatgacaactcattcctgggatgaggatccctctggcgagtgggtcctagagattgaaaacaccagcgaagccaacaactatgggacgctgaccaagttcaccctcgtactctatggcaccgcccctgaggggctgcccgtacctccagaaagcagtggctgcaagaccctcacgtccagtcaggcctgtgtggtgtgcgaggaaggcttctccctgcaccagaagagctgtgtccagcactgccctccaggcttcgccccccaagtcctcgatacgcactatagcaccgagaatgacgtggagaccatccgggccagcgtctgcgccccctgccacgcctcatgtgccacatgccaggggccggccctgacagactgcctcagctgccccagccacgcctccttggaccctgtggagcagacttgctcccggcaaagccagagcagccgagagtccccgccacagcagcagccacctcggctgcccccggaggtggaggcggggcaacggctgcgggcagggctgctgccctcacacctgcctgaggtggtggccggcctcagctgcgccttcatcgtgctggtcttcgtcactgtcttcctggtcctgcagctgcgctctggctttagttttcggggggtgaaggtgtacaccatggaccgtggcctcatctcctacaaggggctgccccctgaagcctggcaggaggagtgcccgtctgactcagaagaggacgagggccggggcgagaggaccgcctttatcaaagaccagagcgccctctgatgagcccactgcccaccccctcaagccaatcccctccttgggcactttttaattcaccaaagtatttttttatcttgggactgggtttggaccccagctgggaggcaagaggggtggagactgtttcccatcctaccctcgggcccacctggccacctgaggtgggcccaggaccagctggggcgtggggagggccgtaccccaccctcagcaccccttccatgtggagaaaggagtgaaacctttagggcagcttgccccggccccggccccagccagagttcctgcggagtgaagaggggcagcccttgcttgttgggattcctgacccaggccgcagctcttgcccttccctgtccctctaaagcaataatggtcccatccaggcagtcgggggctggcctaggagatatctgagggaggaggccacctctccaagggcttctgcaccctccaccctgtcccccagctctggtgagtcttggcggcagcagccatcataggaagggaccaaggcaaggcaggtgcctccaggtgtgcacgtggcatgtggcctgtggcctgtgtcccatgacccacccctgtgctccgtgcctccaccaccactggccaccaggctggcgcagccaaggccgaagctctggctgaaccctgtgctggtgtcctgaccaccctcccctctcttgcacccgcctctcccgtcagggcccaagtccctgttttctgagcccgggctgcctgggctgttggcactcacagacctggagcccctgggtgggtggtggggaggggcgctggcccagccggcctctctggcctcccacccgatgctgctttcccctgtggggatctcaggggctgtttgaggatatattttcactttgtgattatttcactttagatgctgatgatttgtttttgtatttttaatgggggtagcagctggactacccacgttctcacacccaccgtccgccctgctcctccctggctgccctggccctgaggtgtgggggctgcagcatgttgctgaggagtgaggaatagttgagccccaagtcctgaagaggcgggccagccaggcgggctcaaggaaagggggtcccagtgggaggggcaggctgacatctgtgtttcaagtggggctcgccatgccgggggttcataggtcactggctctccaagtgccagaggtgggcaggtggtggcactgagcccccccaacactgtgccctggtggagaaagcactgacctgtcatgcccccctcaaacctcctcttctgacgtgccttttgcacccctcccattaggacaatcagtcccctcccatctgggagtccccttttcttttctaccctagccattcctggtacccagccatctgcccaggggtgccccctcctctcccatccccctgccctcgtggccagcccggctggttttgtaagatactgggttggtgcacagtgatttttttcttgtaatttaaacaggcccagcattgctggttccatggttatagacgtcccgaccatgtaagacggtattccagtaatt

SEQ ID NO: 297719 - DNA, 3979 bp, Homo sapiens
ctgcccccgcccgcgccggagctggagcccaggccgagccctgccctggtcgccggccgggccgaggccgcgccgccgcgcctccccgcctccgcgccgtgacgctgccgccgggcgcggggaccgcgccgagcccaggcccccgccgccgggctctccgctcggccgaggggcgcccgagccgccgcggcggtcgcctggaaaagtttccccgccagggctccccaggggtcggcactcttcaccctcccgagccctgcccgtctcggccccatgcccccaccagtcagccccgggccacaggcagtgagcaggcacctgggagccgaggccctgtgaccaggccaaggagacgggcgctccagggtcccagccacctgtcccccccatggagctgaggccctggttgctatgggtggtagcagcaacaggaaccttggtcctgctagcagctgatgctcagggccagaaggtcttcaccaacacgtgggctgtgcgcatccctggaggcccagcggtggccaacagtgtggcacggaagcatgggttcctcaacctgggccagatcttcggggactattaccacttctggcatcgaggagtgacgaagcggtccctgtcgcctcaccgcccgcggcacagccggctgcagagggagcctcaagtacagtggctggaacagcaggtggcaaagcgacggactaaacgggacgtgtaccaggagcccacagaccccaagtttcctcagcagtggtacctgtctggtgtcactcagcgggacctgaatgtgaaggcggcctgggcgcagggctacacagggcacggcattgtggtctccattctggacgatggcatcgagaagaaccacccggacttggcaggcaattatgatcctggggccagttttgatgtcaatgaccaggaccctgacccccagcctcggtacacacagatgaatgacaacaggcacggcacacggtgtgcgggggaagtggctgcggtggccaacaacggtgtctgtggtgtaggtgtggcctacaacgcccgcattggaggggtgcgcatgctggatggcgaggtgacagatgcagtggaggcacgctcgctgggcctgaaccccaaccacatccacatctacagtgccagctggggccccgaggatgacggcaagacagtggatgggccagcccgcctcgccgaggaggccttcttccgtggggttagccagggccgaggggggctgggctccatctttgtctgggcctcggggaacgggggccgggaacatgacagctgcaactgcgacggctacaccaacagtatctacacgctgtccatcagcagcgccacgcagtttggcaacgtgccgtggtacagcgaggcctgctcgtccacactggccacgacctacagcagtggcaaccagaatgagaagcagatcgtgacgactgacttgcggcagaagtgcacggagtctcacacgggcacctcagcctctgcccccttagcagccggcatcattgctctcaccctggaggccaataagaacctcacatggcgggacatgcaacacctggtggtacagacctcgaagccagcccacctcaatgccaacgactgggccaccaatggtgtgggccggaaagtgagccactcatatggctacgggcttttggacgcaggcgccatggtggccctggcccagaattggaccacagtggccccccagcggaagtgcatcatcgacatcctcaccgagcccaaagacatcgggaaacggctcgaggtgcggaagaccgtgaccgcgtgcctgggcgagcccaaccacatcactcggctggagcacgctcaggcgcggctcaccctgtcctataatcgccgtggcgacctggccatccacctggtcagccccatgggcacccgctccaccctgctggcagccaggccacatgactactccgcagatgggtttaatgactgggccttcatgacaactcattcctgggatgaggatccctctggcgagtgggtcctagagattgaaaacaccagcgaagccaacaactatgggacgctgaccaagttcaccctcgtactctatggcaccgcccctgaggggctgcccgtacctccagaaagcagtggctgcaagaccctcacgtccagtcaggcctgtgtggtgtgcgaggaaggcttctccctgcaccagaagagctgtgtccagcactgccctccaggcttcgccccccaagtcctcgatacgcactatagcaccgagaatgacgtggagaccatccgggccagcgtctgcgccccctgccacgcctcatgtgccacatgccaggggccggccctgacagactgcctcagctgccccagccacgcctccttggaccctgtggagcagacttgctcccggcaaagccagagcagccgagagtccccgccacagcagcagccacctcggctgcccccggaggtggaggcggggcaacggctgcgggcagggctgctgccctcacacctgcctgaggtggtggccggcctcagctgcgccttcatcgtgctggtcttcgtcactgtcttcctggtcctgcagctgcgctctggctttagttttcggggggtgaaggtgtacaccatggaccgtggcctcatctcctacaaggggctgccccctgaagcctggcaggaggagtgcccgtctgactcagaagaggacgagggccggggcgagaggaccgcctttatcaaagaccagagcgccctctgatgagcccactgcccaccccctcaagccaatcccctccttgggcactttttaattcaccaaagtatttttttatcttgggactgggtttggaccccagctgggaggcaagaggggtggagactgtttcccatcctaccctcgggcccacctggccacctgaggtgggcccaggaccagctggggcgtggggagggccgtaccccaccctcagcaccccttccatgtggagaaaggagtgaaacctttagggcagcttgccccggccccggccccagccagagttcctgcggagtgaagaggggcagcccttgcttgttgggattcctgacccaggccgcagctcttgcccttccctgtccctctaaagcaataatggtcccatccaggcagtcgggggctggcctaggagatatctgagggaggaggccacctctccaagggcttctgcaccctccaccctgtcccccagctctggtgagtcttggcggcagcagccatcataggaagggaccaaggcaaggcaggtgcctccaggtgtgcacgtggcatgtggcctgtggcctgtgtcccatgacccacccctgtgctccgtgcctccaccaccactggccaccaggctggcgcagccaaggccgaagctctggctgaaccctgtgctggtgtcctgaccaccctcccctctcttgcacccgcctctcccgtcagggcccaagtccctgttttctgagcccgggctgcctgggctgttggcactcacagacctggagcccctgggtgggtggtggggaggggcgctggcccagccggcctctctggcctcccacccgatgctgctttcccctgtggggatctcaggggctgtttgaggatatattttcactttgtgattatttcactttagatgctgatgatttgtttttgtatttttaatgggggtagcagctggactacccacgttctcacacccaccgtccgccctgctcctccctggctgccctggccctgaggtgtgggggctgcagcatgttgctgaggagtgaggaaggctggtatctttcagagtgtaaagtaatcttggaatataaagaatttcttcaggttgaattacctagaagtttgtcactgacttgtgttcctgaactatgacacatgaatatgtgggctaagaaatagttcctcttgataaataaacaattaacaaataaa

SEQ ID NO: 297720 - DNA, 3638 bp, Homo sapiens
ctgcccccgcccgcgccggagctggagcccaggccgagccctgccctggtcgccggccgggccgaggccgcgccgccgcgcctccccgcctccgcgccgtgacgctgccgccgggcgcggggaccgcgccgagcccaggcccccgccgccgggctctccgctcggccgaggggcgcccgagccgccgcggcggtcgcctggaaaagtttccccgccagggctccccaggggtcggcactcttcaccctcccgagccctgcccgtctcggccccatgcccccaccagtcagccccgggccacaggcagtgagcaggcacctgggagccgaggccctgtgaccaggccaaggagacgggcgctccagggtcccagccacctgtcccccccatggagctgaggccctggttgctatgggtggtagcagcaacaggaaccttggtcctgctagcagctgatgctcagggccagaaggtcttcaccaacacgtgggctgtgcgcatccctggaggcccagcggtggccaacagtgtggcacggaagcatgggttcctcaacctgggccagatcttcggggactattaccacttctggcatcgaggagtgacgaagcggtccctgtcgcctcaccgcccgcggcacagccggctgcagagggagcctcaagtacagtggctggaacagcaggtggcaaagcgacggactaaacgggacgtgtaccaggagcccacagaccccaagtttcctcagcagtggtacctgtctggtgtcactcagcgggacctgaatgtgaaggcggcctgggcgcagggctacacagggcacggcattgtggtctccattctggacgatggcatcgagaagaaccacccggacttggcaggcaattatgatcctggggccagttttgatgtcaatgaccaggaccctgacccccagcctcggtacacacagatgaatgacaacaggcacggcacacggtgtgcgggggaagtggctgcggtggccaacaacggtgtctgtggtgtaggtgtggcctacaacgcccgcattggaggggtgcgcatgctggatggcgaggtgacagatgcagtggaggcacgctcgctgggcctgaaccccaaccacatccacatctacagtgccagctggggccccgaggatgacggcaagacagtggatgggccagcccgcctcgccgaggaggccttcttccgtggggttagccagggccgaggggggctgggctccatctttgtctgggcctcggggaacgggggccgggaacatgacagctgcaactgcgacggctacaccaacagtatctacacgctgtccatcagcagcgccacgcagtttggcaacgtgccgtggtacagcgaggcctgctcgtccacactggccacgacctacagcagtggcaaccagaatgagaagcagatcgtgacgactgacttgcggcagaagtgcacggagtctcacacgggcacctcagcctctgcccccttagcagccggcatcattgctctcaccctggaggccaataagaacctcacatggcgggacatgcaacacctggtggtacagacctcgaagccagcccacctcaatgccaacgactgggccaccaatggtgtgggccggaaagtgagccactcatatggctacgggcttttggacgcaggcgccatggtggccctggcccagaattggaccacagtggccccccagcggaagtgcatcatcgacatcctcaccgagcccaaagacatcgggaaacggctcgaggtgcggaagaccgtgaccgcgtgcctgggcgagcccaaccacatcactcggctggagcacgctcaggcgcggctcaccctgtcctataatcgccgtggcgacctggccatccacctggtcagccccatgggcacccgctccaccctgctggcagccaggccacatgactactccgcagatgggtttaatgactgggccttcatgacaactcattcctgggatgaggatccctctggcgagtgggtcctagagattgaaaacaccagcgaagccaacaactatgggacgctgaccaagttcaccctcgtactctatggcaccgcccctgaggggctgcccgtacctccagaaagcagtggctgcaagaccctcacgtccagtcaggcctgtgtggtgtgcgaggaaggcttctccctgcaccagaagagctgtgtccagcactgccctccaggcttcgccccccaagtcctcgatacgcactatagcaccgagaatgacgtggagaccatccgggccagcgtctgcgccccctgccacgcctcatgtgccacatgccaggggccggccctgacagactgcctcagctgccccagccacgcctccttggaccctgtggagcagacttgctcccggcaaagccagagcagccgagagtccccgccacagcagcagccacctcggctgcccccggaggtggaggcggggcaacggctgcgggcagggctgctgccctcacacctgcctgaggtggtggccggcctcagctgcgccttcatcgtgctggtcttcgtcactgtcttcctggtcctgcagctgcgctctggctttagttttcggggggtgaaggtgtacaccatggaccgtggcctcatctcctacaaggggctgccccctgaagcctggcaggaggagtgcccgtctgactcagaagaggacgagggccggggcgagaggaccgcctttatcaaagaccagagcgccctctgatgagcccactgcccaccccctcaagccaatcccctccttgggcactttttaattcaccaaagtatttttttatcttgggactgggtttggaccccagctgggaggcaagaggggtggagactgtttcccatcctaccctcgggcccacctggccacctgaggtgggcccaggaccagctggggcgtggggagggccgtaccccaccctcagcaccccttccatgtggagaaaggagtgaaacctttagggcagcttgccccggccccggccccagccagagttcctgcggagtgaagaggggcagcccttgcttgttgggattcctgacccaggccgcagctcttgcccttccctgtccctctaaagcaataatggtcccatccaggcagtcgggggctggcctaggagatatctgagggaggaggccacctctccaagggcttctgcaccctccaccctgtcccccagctctggtgagtcttggcggcagcagccatcataggaagggaccaaggcaaggcaggtgcctccaggtgtgcacgtggcatgtggcctgtggcctgtgtcccatgacccacccctgtgctccgtgcctccaccaccactggccaccaggctggcgcagccaaggccgaagctctggctgaaccctgtgctggtgtcctgaccaccctcccctgccccctcctctcccatccccctgccctcgtggccagcccggctggttttgtaagatactgggttggtgcacagtgatttttttcttgtaatttaaacaggcccagcattgctggttctatttaatggacatgagataatgttagaggttttaaagtgattaaacgtgcagactatgcaaaccag

SEQ ID NO: 297721 - DNA, 1986 bp, Homo sapiens
ctgcccccgcccgcgccggagctggagcccaggccgagccctgccctggtcgccggccgggccgaggccgcgccgccgcgcctccccgcctccgcgccgtgacgctgccgccgggcgcggggaccgcgccgagcccaggcccccgccgccgggctctccgctcggccgaggggcgcccgagccgccgcggcggtcgcctggaaaagtttccccgccagggctccccaggggtcggcactcttcaccctcccgagccctgcccgtctcggccccatgcccccaccagtcagccccgggccacaggcagtgagcaggcacctgggagccgaggccctgtgaccaggccaaggagacgggcgctccagggtcccagccacctgtcccccccatggagctgaggccctggttgctatgggtggtagcagcaacaggaaccttggtcctgctagcagctgatgctcagggccagaaggtcttcaccaacacgtgggctgtgcgcatccctggaggcccagcggtggccaacagtgtggcacggaagcatgggttcctcaacctgggccagatcttcggggactattaccacttctggcatcgaggagtgacgaagcggtccctgtcgcctcaccgcccgcggcacagccggctgcagagggagcctcaagtacagtggctggaacagcaggtggcaaagcgacggactaaacgggacgtgtaccaggagcccacagaccccaagtttcctcagcagtggtacctgtctggtgtcactcagcgggacctgaatgtgaaggcggcctgggcgcagggctacacagggcacggcattgtggtctccattctggacgatggcatcgagaagaaccacccggacttggcaggcaattatgatcctggggccagttttgatgtcaatgaccaggaccctgacccccagcctcggtacacacagatgaatgacaacaggcacggcacacggtgtgcgggggaagtggctgcggtggccaacaacggtgtctgtggtgtaggtgtggcctacaacgcccgcattggaggggtgcgcatgctggatggcgaggtgacagatgcagtggaggcacgctcgctgggcctgaaccccaaccacatccacatctacagtgccagctggggccccgaggatgacggcaagacagtggatgggccagcccgcctcgccgaggaggccttcttccgtggggttagccagggccgaggggggctgggctccatctttgtctgggcctcggggaacgggggccgggaacatgacagctgcaactgcgacggctacaccaacagtatctacacgctgtccatcagcagcgccacgcagtttggcaacgtgccgtggtacagcgaggccctgctcctccctggctgccctggccctgaggtgtgggggctgcagcatgttgctgaggagtgaggaatagttgagccccaagtcctgaagaggcgggccagccaggcgggctcaaggaaagggggtcccagtgggaggggcaggctgacatctgtgtttcaagtggggctcgccatgccgggggttcataggtcactggctctccaagtgccagaggtgggcaggtggtggcactgagcccccccaacactgtgccctggtggagaaagcactgacctgtcatgcccccctcaaacctcctcttctgacgtgccttttgcacccctcccattaggacaatcagtcccctcccatctgggagtccccttttcttttctaccctagccattcctggtacccagccatctgcccaggggtgccccctcctctcccatccccctgccctcgtggccagcccggctggttttgtaagatactgggttggtgcacagtgatttttttcttgtaatttaaacaggcccagcattgctggttctatttaatggacatgagataatgttagaggttttaaagtgattaaacgtgcagactatgcaaaccag

SEQ ID NO: 297722 - DNA, 1003 bp, Homo sapiens
aatggctagtatgaggctggtggttaattcgccgaggcatgctggtgccaggctagccgaagctctggctgaaccctgtgctggtgtcctgaccaccctcccctctcttgcacccgcctctcccgtcagggcccaagtccctgttttctgagcccgggctgcctgggctgttggcactcacagacctggagcccctgggtgggtggtggggaggggcgctggcccagccggcctctctggcctcccacccgatgctgctttcccctgtggggatctcaggggctgtttgaggatatattttcactttgtgattatttcactttagatgctgatgatttgtttttgtatttttaatgggggtagcagctggactacccacgttctcacacccaccgtccgccctgctcctccctggctgccctggccctgaggtgtgggggctgcagcatgttgctgaggagtgaggaatagttgagccccaagtcctgaagaggcgggccagccaggcgggctcaaggaaagggggtcccagtgggaggggcaggctgacatctgtgtttcaagtggggctcgccatgccgggggttcataggtcactggctctccaagtgccagaggtgggcaggtggtggcactgagcccccccaacactgtgccctggtggagaaagcactgacctgtcatgcccccctcaaacctcctcttctgacgtgccttttgcacccctcccattaggacaatcagtcccctcccatctgggagtccccttttcttttctaccctagccattcctggtacccagccatctgcccaggggtgccccctcctctcccatccccctgccctcgtggccagcccggctggttttgtaagatactgggttggtgcacagtgatttttttcttgtaatttaaacaggcccagcattgctggttctatttaatggacatgagataatgttagaggttttaaagtgattaaacgtgcagactatgcaaaccag

SEQ ID NO: 297723 - DNA, 2434 bp, Homo sapiens
ctgcccccgcccgcgccggagctggagcccaggccgagccctgccctggtcgccggccgggccgaggccgcgccgccgcgcctccccgcctccgcgccgtgacgctgccgccgggcgcggggaccgcgccgagcccaggcccccgccgccgggctctccgctcggccgaggggcgcccgagccgccgcggcggtcgcctggaaaagtttccccgccagggctccccaggggtcggcactcttcaccctcccgagccctgcccgtctcggccccatgcccccaccagtcagccccgggccacaggcagtgagcaggcacctgggagccgaggccctgtgaccaggccaaggagacgggcgctccagggtcccagccacctgtcccccccatggagctgaggccctggttgctatgggtggtagcagcaacaggaaccttggtcctgctagcagctgatgctcagggccagaaggtcttcaccaacacgtgggctgtgcgcatccctggaggcccagcggtggccaacagtgtggcacggaagcatgggttcctcaacctgggccagatcttcggggactattaccacttctggcatcgaggagtgacgaagcggtccctgtcgcctcaccgcccgcggcacagccggctgcagagggagcctcaagtacagtggctggaacagcaggtggcaaagcgacggactaaacgggacgtgtaccaggagcccacagaccccaagtttcctcagcagtggtacctgtctggtgtcactcagcgggacctgaatgtgaaggcggcctgggcgcagggctacacagggcacggcattgtggtctccattctggacgatggcatcgagaagaaccacccggacttggcaggcaattatgatcctggggccagttttgatgtcaatgaccaggaccctgacccccagcctcggtacacacagatgaatgacaacaggcacggcacacggtgtgcgggggaagtggctgcggtggccaacaacggtgtctgtggtgtaggtgtggcctacaacgcccgcattggaggggtgcgcatgctggatggcgaggtgacagatgcagtggaggcacgctcgctgggcctgaaccccaaccacatccacatctacagtgccagctggggccccgaggatgacggcaagacagtggatgggccagcccgcctcgccgaggaggccttcttccgtggggttagccagggccgaggggggctgggctccatctttgtctgggcctcggggaacgggggccgggaacatgacagctgcaactgcgacggctacaccaacagtatctacacgctgtccatcagcagcgccacgcagtttggcaacgtgccgtggtacagcgaggcctgctcgtccacactggccacgacctacagcagtggcaaccagaatgagaagcagatcgtgacgactgacttgcggcagaagtgcacggagtctcacacgggcacctcagcctctgcccccttagcagccggcatcattgctctcaccctggaggccaataagaacctcacatggcgggacatgcaacacctggtggtacagacctcgaagccagcccacctcaatgccaacgactgggccaccaatggtgtgggccggaaagtgagccactcatatggctacgggcttttggacgcaggcgccatggtggccctggcccagaattggaccacagtggccccccagcggaagtgcatcatcgacatcctcaccgagcccaaagacatcgggaaacggctcgaggtgcggaagaccgtgaccgcgtgcctgggcgagcccaaccacatcactcggctggagcacgctcaggcgcggctcaccctgtcctataatcgccgtggcgacctggccatccacctggtcagccccatgggcacccgctccaccctgctggcagccaggccacatgactactccgcagatgggtttaatgactgggccttcatgacaactcattcctgggatgaggatccctctggcgagtgggtcctagagattgaaaacaccagcgaagccaacaactatgggacgctgaccaagttcaccctcgtactctatggcaccgcccctgaggggctgcccgtacctccagaaagcagtggctgcaagaccctcacgtccagtcaggcctgtgtggtgtgcgaggaaggctcatccctggaacagaagagctgtgtacagcagtggacatccaggctaacggaccacccaagagtactcgaatacggcactaatagacaacgaaagaatgaaagatggaggaacccatccggggcacagcggatatagagcaccacatgagacgccttcatgtgccaccatgcccaggggacgggccctgaagagaactgaccacaagatgacccgaagacaaggcctacctggaaccag

SEQ ID NO: 297724 - DNA, 2302 bp, Homo sapiens
ctgcccccgcccgcgccggagctggagcccaggccgagccctgccctggtcgccggccgggccgaggccgcgccgccgcgcctccccgcctccgcgccgtgacgctgccgccgggcgcggggaccgcgccgagcccaggcccccgccgccgggctctccgctcggccgaggggcgcccgagccgccgcggcggtcgcctggaaaagtttccccgccagggctccccaggggtcggcactcttcaccctcccgagccctgcccgtctcggccccatgcccccaccagtcagccccgggccacaggcagtgagcaggcacctgggagccgaggccctgtgaccaggccaaggagacgggcgctccagggtcccagccacctgtcccccccatggagctgaggccctggttgctatgggtggtagcagcaacaggaaccttggtcctgctagcagctgatgctcagggccagaaggtcttcaccaacacgtgggctgtgcgcatccctggaggcccagcggtggccaacagtgtggcacggaagcatgggttcctcaacctgggccagatcttcggggactattaccacttctggcatcgaggagtgacgaagcggtccctgtcgcctcaccgcccgcggcacagccggctgcagagggagcctcaagtacagtggctggaacagcaggtggcaaagcgacggactaaacgggacgtgtaccaggagcccacagaccccaagtttcctcagcagtggtacctgtctggtgtcactcagcgggacctgaatgtgaaggcggcctgggcgcagggctacacagggcacggcattgtggtctccattctggacgatggcatcgagaagaaccacccggacttggcaggcaattatgatcctggggccagttttgatgtcaatgaccaggaccctgacccccagcctcggtacacacagatgaatgacaacaggcacggcacacggtgtgcgggggaagtggctgcggtggccaacaacggtgtctgtggtgtaggtgtggcctacaacgcccgcattggaggggtgcgcatgctggatggcgaggtgacagatgcagtggaggcacgctcgctgggcctgaaccccaaccacatccacatctacagtgccagctggggccccgaggatgacggcaagacagtggatgggccagcccgcctcgccgaggaggccttcttccgtggggttagccagggccgaggggggctgggctccatctttgtctgggcctcggggaacgggggccgggaacatgacagctgcaactgcgacggctacaccaacagtatctacacgctgtccatcagcagcgccacgcagtttggcaacgtgccgtggtacagcgaggcctgctcgtccacactggccacgacctacagcagtggcaaccagaatgagaagcagatcgtgacgactgacttgcggcagaagtgcacggagtctcacacgggcacctcagcctctgcccccttagcagccggcatcattgctctcaccctggaggccaataagaacctcacatggcgggacatgcaacacctggtggtacagacctcgaagccagcccacctcaatgccaacgactgggccaccaatggtgtgggccggaaagtgagccactcatatggctacgggcttttggacgcaggcgccatggtggccctggcccagaattggaccacagtggccccccagcggaagtgcatcatcgacatcctcaccgagcccaaagacatcgggaaacggctcgaggtgcggaagaccgtgaccgcgtgcctgggcgagcccaaccacatcactcggctggagcacgctcaggcgcggctcaccctgtcctataatcgccgtggcgacctggccatccacctggtcagccccatgggcacccgctccaccctgctggcagccaggccacatgactactccgcagatgggtttaatgactgggccttcatgacaactcattcctgggatgaggatccctctggcgagtgggtcctagagattgaaaacaccagcgaagccaacaactatgggacgctgaccaagttcaccctcgtactctatggcacctcagcctctgcccccttagcagccggcatcattgctctcaccctggaggccaataagaacctcacatggcgggacatgcaacacctggtggtacagacctcgaagccagcccacctcaatgccaacgactgggccaccaatggtgtgggccggaaagtgagccactcatatggctacgggctttgacgcaggcgc

SEQ ID NO: 297725 - DNA, 1519 bp, Homo sapiens
ctgcccccgcccgcgccggagctggagcccaggccgagccctgccctggtcgccggccgggccgaggccgcgccgccgcgcctccccgcctccgcgccgtgacgctgccgccgggcgcggggaccgcgccgagcccaggcccccgccgccgggctctccgctcggccgaggggcgcccgagccgccgcggcggtcgcctggaaaagtttccccgccagggctccccaggggtcggcactcttcaccctcccgagccctgcccgtctcggccccatgcccccaccagtcagccccgggccacaggcagtgagcaggcacctgggagccgaggccctgtgaccaggccaaggagacgggcgctccagggtcccagccacctgtcccccccatggagctgaggccctggttgctatgggtggtagcagcaacaggaaccttggtcctgctagcagctgatgctcagggccagaaggtcttcaccaacacgtgggctgtgcgcatccctggaggcccagcggtggccaacagtgtggcacggaagcatgggttcctcaacctgggccagatcttcggggactattaccacttctggcatcgaggagtgacgaagcggtccctgtcgcctcaccgcccgcggcacagccggctgcagagggagcctcaagtacagtggctggaacagcaggtggcaaagcgacggactaaacgggacgtgtaccaggagcccacagaccccaagtttcctcagcagtggtacctgtctggtgtcactcagcgggacctgaatgtgaaggcggcctgggcgcagggctacacagggcacggcattgtggtctccattctggacgatggcatcgagaagaaccacccggacttggcaggcaattatgatcctggggccagttttgatgtcaatgaccaggaccctgacccccagcctcggtacacacagatgaatgacaacaggcacggcacacggtgtgcgggggaagtggctgcggtggccaacaacggtgtctgtggtgtaggtgtggcctacaacgcccgcattggaggggtgcgcatgctggatggcgaggtgacagatgcagtggaggcacgctcgctgggcctgaaccccaaccacatccacatctacagtgccagctggggccccgaggatgacggcaagacagtggatgggccagcccgcctcgccgaggaggccttcttccgtggggttagccagggccgaggggggctgggctccatctttgtctgggcctcggggaacgggggccgggaacatgacagctgcaactgcgacggctacaccaacagtatctacacgctgtccatcagcagcgccacgcagtttggcaacgtgccgtggtacagcgaggcctgctcgtccacactggccacgacctacagaagcagcaccacgaattcgccgagcagcaccacgaattcgccgagcagcaccacgaattcgccgagcagcaccacgaattcgccgagcagaaccacgaattcgccg

SEQ ID NO: 297726 - DNA, 4517 bp, Homo sapiens
  misc_feature (24)..(24): n is a, c, g, or t
  misc_feature (28)..(29): n is a, c, g, or t
gtagtttcgagcccgctgcccttngccnnctgggcggagaagctgcttcctcctgggaacaaccgcctcccgctcctagcaggttgctactgccccgaacccgcgctgcagggaacagcggggcaaacagtgagtggggttcagcgtagactctggaccaggagaggcccgcggtgaccgaggcctgggccccggaaaccaatagagccatggcgactccctctgctgccttcgaggcccttatgaatggtgtgacaagctgggatgtacccgaagatgctgttccatgtgaactgcttcttattggagaggcttcatttcctgtgatggtgaatgacatgggccaggtcctcattgctgcctcctcctatggccgtggccgcctggtggtcgtgtcccatgaggactacttggtggaagcccagctcacgccctttctcctgaacgcagtggggtggctttgctcttcccctggggctcccattggtgtacacccatccctggcacctttggccaaaatcctcgagggctctggagtggatgcaaaggttgagccagaagtgaaagactccctgggggtttactgtattgatgcctacaatgaaaccatgacagaaaagctggtcaagttcatgaaatgtggtggcggcttgctcataggaggacaagcctgggattgggccaaccagggggaggatgaaagggttctgttcacgttccctgggaacctcgtgaccagtgtggctggcatttactttactgacaacaaaggggacacgagtttctttaaagtctccaagaagatgcccaagatcccagtgttggttagttgtgaagatgacctctccgacgacagagaagagcttctgcatgggatttcagagctggacatcagcaactcggattgtttcccatcccagctgctagtgcatggggctttagcctttcctctagggttagattcctaccatggctgtgttatagcggctgcccgctatggccggggccgggtggttgtgactggccataaggtattattcactgttggtaaactgggcccctttctgctcaatgctgtccgctggctggatgggggccgcagaggcaagattgtggtgcagacagagctgagaaccctgagtggcctcctcgcagtggggggcatagacaccagcatcgagcccaatctgaccagtgatgcaagtgtctactgctttgaacccgtgagtgaagtgggggtcaaggaactgcaggagtttgtagcagagggtggcgggctatttgttggagcccaagcctggtggtgggccttcaagaaccccggagtgtcccctttggctcgattcccaggaaacctcctcctcaacccctttggcatcagcattacaagccaaagcctcaatccagggccctttcgtactcctaaagcagggataaggacctatcacttccgctccaccttggccgagttccaggttataatgggcaggaagagaggaaatgtggaaaagggctggttggcaaagctgggaccagatggtgcagctttcctgcagattcccgcagaagagatccctgcctacatgtctgtgcatcgactcctgaggaagctgctaagtcgatatcggcttccagtagcaacccgagagaaccctgttatcaatgactgctgcagaggtgctatgctttccctggccacagggctggcccactctggaagcgacctctctctgttagtcccagaaattgaagatatgtacagcagcccctatctgcgcccctcagaatctcctatcaccgtcgaggtcaactgcaccaatccaggcaccagatattgctggatgagtactgggctctacatacctggaaggcaaattatagaagtctcactgcctgaagctgctgcctctgccgacctgaagatacagattggctgccacacagatgacctgaccagggccagcaagcttttccgaggcccactcgtaattaaccggtgctgcttggacaaacccacaaaatcgatcacgtgcctctggggtggactcctctatataattgtgcctcagaacagcaaactgggttctgtgcctgtcaccgtgaagggggctgtgcatgctccatactacaagctgggggagaccaccctggaggagtggaagaggcgtatccaggagaatccagggccctggggagagctggccacggacaacatcattctgaccgtgccgaccgcaaatcttcgtactctggagaaccctgagccgctgctccgcctctgggatgaggtgatgcaggctgtggcgcgactgggagctgagcccttccctttgcgcctgcctcagaggattgttgccgacgtgcagatctcagtgggctggatgcatgcagggtaccccatcatgtgccatctggagtcagtgcaggagctcatcaacgagaagctcatcagaaccaaggggctgtggggccccgtccatgagctgggccgcaaccagcagcggcaggagtgggagttcccaccacacaccaccgaggccacctgcaacctgtggtgtgtgtatgtgcatgagacggtcttgggcattcctcgaagccgtgccaatattgctctgtggcccccagttcgggagaagagagtcagaatctacctgagcaagggtcccaatgtgaaaaactggaatgcatggaccgcactggaaacgtatttacagctccaggaagcctttggttgggagccattcatccgtctcttcaccgagtacaggaaccagaccaacttgcccacagaaaatgttgacaaaatgaatctgtgggtcaagatgttctcccaccaagtgcagaagaacctggctccgttctttgaggcctgggcctggcccatccagaaggaagtggctaccagcctggcctatctgcctgaatggaaggaaaatattatgaaattgtacctcctcacacagatgccccactgaaattgaagtcaagaaatgcaaaaaggaactgacacatctcagcaaagaaaactgaagggatttggttataagtggagaggatctcagcatatttctggaagatagaaagtggatgaagcatgataatgaaagagtgaagaacctttcagataaaatgtaagctgatctgaacaacataaccccaaagagacttgcgcacctgaaaagcttgtctactgaagaattactccagttgtaagattgagccctctcctactctcccccaactcttatgcacagaacacaggcagtctccactattgataccagttaaaaatttcttgttattgttgctgttgttgtttgtataaaggaattgaacaggctgcttgcagagagataagagttggtgctccagaaaaaaatttctcttctagtggaaataagtgcccctacccccagccggtcagctaattctctactgacagctgagacctcctactcaagtgcctgttgccttcaggtatagaagaggtttcctgaagaaacagacctaactgtacaacagcagaggaaacccatgccaactgttatacaagttaacagttatgttgattcttaaatgggaatggtgagttagaaattcccagacatgggcgatggggagggaagaggaataagaaaagtcacgaggtagaattaggggccttgaaaatatgacaaactctgagggaaacaaagacaatgtggaaagaataacttaattttaattccatctccagagagatttgaggtgtatttaagatgaaaaacaggatactacaaagaaacggaaaactcaggagttcgagaccagcctaggcaagatggcaacatcccgtctctacaaaataatttttaaaaattagccaagcatggtggcatgtgcctgtggtcctagctacttgggaggctgaagtgggaagatcacttgagcccaggagttcaaggcttcagtgagccatgatggtgccactgcactccagcctgggggacagagtgagaccctgtctcttaaaaagcaagaaaagaaagagaagactgagaataagaagatctctttgaaaataaaataagactgctaaaagtatttggtatacagtctggaaaataaagttgagggaatctctccagataaagagcaaaaagaaatagatagaaaaatataaagaaagaaaaaagacatagacaatcaatatgtaatgttaggagttcctggaagagagaacagagacagtgtaggtgaagaaataaaaagaaaaagaattgaagaacagagcaagctaagtctccagattgagagggcccaatacaatctacatctagacacaatattgtaaaattttggaatattaaggatagaaggaagatattaaagtggccagggagaaaacaaatgaggtcatcacgattagctcaacacaaaaatggatgagaaatagactgctaacagatttgtcatcagcaacactgaatgccagaagtcaatggatcaacatcttcagagcttatggaaaatttttg

SEQ ID NO: 297727 - DNA, 4477 bp, Homo sapiens
  misc_feature (24)..(24): n is a, c, g, or t
  misc_feature (28)..(29): n is a, c, g, or t
gtagtttcgagcccgctgcccttngccnnctgggcggagaagctgcttcctcctgggaacaaccgcctcccgctcctagcaggttgctactgccccgaacccgcgctgcagggaacagcggggcaaacaaaaccaatagagccatggcgactccctctgctgccttcgaggcccttatgaatggtgtgacaagctgggatgtacccgaagatgctgttccatgtgaactgcttcttattggagaggcttcatttcctgtgatggtgaatgacatgggccaggtcctcattgctgcctcctcctatggccgtggccgcctggtggtcgtgtcccatgaggactacttggtggaagcccagctcacgccctttctcctgaacgcagtggggtggctttgctcttcccctggggctcccattggtgtacacccatccctggcacctttggccaaaatcctcgagggctctggagtggatgcaaaggttgagccagaagtgaaagactccctgggggtttactgtattgatgcctacaatgaaaccatgacagaaaagctggtcaagttcatgaaatgtggtggcggcttgctcataggaggacaagcctgggattgggccaaccagggggaggatgaaagggttctgttcacgttccctgggaacctcgtgaccagtgtggctggcatttactttactgacaacaaaggggacacgagtttctttaaagtctccaagaagatgcccaagatcccagtgttggttagttgtgaagatgacctctccgacgacagagaagagcttctgcatgggatttcagagctggacatcagcaactcggattgtttcccatcccagctgctagtgcatggggctttagcctttcctctagggttagattcctaccatggctgtgttatagcggctgcccgctatggccggggccgggtggttgtgactggccataaggtattattcactgttggtaaactgggcccctttctgctcaatgctgtccgctggctggatgggggccgcagaggcaagattgtggtgcagacagagctgagaaccctgagtggcctcctcgcagtggggggcatagacaccagcatcgagcccaatctgaccagtgatgcaagtgtctactgctttgaacccgtgagtgaagtgggggtcaaggaactgcaggagtttgtagcagagggtggcgggctatttgttggagcccaagcctggtggtgggccttcaagaaccccggagtgtcccctttggctcgattcccaggaaacctcctcctcaacccctttggcatcagcattacaagccaaagcctcaatccagggccctttcgtactcctaaagcagggataaggacctatcacttccgctccaccttggccgagttccaggttataatgggcaggaagagaggaaatgtggaaaagggctggttggcaaagctgggaccagatggtgcagctttcctgcagattcccgcagaagagatccctgcctacatgtctgtgcatcgactcctgaggaagctgctaagtcgatatcggcttccagtagcaacccgagagaaccctgttatcaatgactgctgcagaggtgctatgctttccctggccacagggctggcccactctggaagcgacctctctctgttagtcccagaaattgaagatatgtacagcagcccctatctgcgcccctcagaatctcctatcaccgtcgaggtcaactgcaccaatccaggcaccagatattgctggatgagtactgggctctacatacctggaaggcaaattatagaagtctcactgcctgaagctgctgcctctgccgacctgaagatacagattggctgccacacagatgacctgaccagggccagcaagcttttccgaggcccactcgtaattaaccggtgctgcttggacaaacccacaaaatcgatcacgtgcctctggggtggactcctctatataattgtgcctcagaacagcaaactgggttctgtgcctgtcaccgtgaagggggctgtgcatgctccatactacaagctgggggagaccaccctggaggagtggaagaggcgtatccaggagaatccagggccctggggagagctggccacggacaacatcattctgaccgtgccgaccgcaaatcttcgtactctggagaaccctgagccgctgctccgcctctgggatgaggtgatgcaggctgtggcgcgactgggagctgagcccttccctttgcgcctgcctcagaggattgttgccgacgtgcagatctcagtgggctggatgcatgcagggtaccccatcatgtgccatctggagtcagtgcaggagctcatcaacgagaagctcatcagaaccaaggggctgtggggccccgtccatgagctgggccgcaaccagcagcggcaggagtgggagttcccaccacacaccaccgaggccacctgcaacctgtggtgtgtgtatgtgcatgagacggtcttgggcattcctcgaagccgtgccaatattgctctgtggcccccagttcgggagaagagagtcagaatctacctgagcaagggtcccaatgtgaaaaactggaatgcatggaccgcactggaaacgtatttacagctccaggaagcctttggttgggagccattcatccgtctcttcaccgagtacaggaaccagaccaacttgcccacagaaaatgttgacaaaatgaatctgtgggtcaagatgttctcccaccaagtgcagaagaacctggctccgttctttgaggcctgggcctggcccatccagaaggaagtggctaccagcctggcctatctgcctgaatggaaggaaaatattatgaaattgtacctcctcacacagatgtaaggagtgcccatcgaggtggcaggccccactgaaattgaagtcaagaaatgcaaaaaggaactgacacatctcagcaaagaaaactgaagggatttggttataagtggagaggatctcagcatatttctggaagatagaaagtggatgaagcatgataatgaaagagtgaagaacctttcagataaaatgtaagctgatctgaacaacataaccccaaagagacttgcgcacctgaaaagcttgtctactgaagaattactccagttgtaagattgagccctctcctactctcccccaactcttatgcacagaacacaggcagtctccactattgataccagttaaaaatttcttgttattgttgctgttgttgtttgtataaaggaattgaacaggctgcttgcagagagataagagttggtgctccagaaaaaaatttctcttctagtggaaataagtgcccctacccccagccggtcagctaattctctactgacagctgagacctcctactcaagtgcctgttgccttcaggtatagaagaggtttcctgaagaaacagacctaactgtacaacagcagaggaaacccatgccaactgttatacaagttaacagttatgttgattcttaaatgggaatggtgagttagaaattcccagacatgggcgatggggagggaagaggaataagaaaagtcacgaggtagaattaggggccttgaaaatatgacaaactctgagggaaacaaagacaatgtggaaagaataacttaattttaattccatctccagagagatttgaggtgtatttaagatgaaaaacaggatactacaaagaaacggaaaactcaggagttcgagaccagcctaggcaagatggcaacatcccgtctctacaaaataatttttaaaaattagccaagcatggtggcatgtgcctgtggtcctagctacttgggaggctgaagtgggaagatcacttgagcccaggagttcaaggcttcagtgagccatgatggtgccactgcactccagcctgggggacagagtgagaccctgtctcttaaaaagcaagaaaagaaagagaagactgagaataagaagatctctttgaaaataaaataagactgctaaaagtatttggtatacagtctggaaaataaagttgagggaatctctccagataaagagcaaaaagaaatagatagaaaaatataaagaaagaaaaaagacatagacaatcaatatgtaatgttaggagttcctggaagagagaacagagacagtgtaggtgaagaaataaaaagaaaaagaattgaagaacagagcaagctaagtctccagattgagagggcccaatacaatctacatctagacacaatattgtaaaattttggaatattaaggatagaaggaagatattaaagtggccagggagaaaacaaatgaggtcatcacgattagctcaacacaaaaatggatgagaaatagactgctaacagatttgtcatcagcaacactgaatgccagaagtcaatggatcaacatcttcagagcttatggaaaatttttg

SEQ ID NO: 297728 - DNA, 3462 bp, Homo sapiens
  misc_feature (24)..(24): n is a, c, g, or t
  misc_feature (28)..(29): n is a, c, g, or t
gtagtttcgagcccgctgcccttngccnnctgggcggagaagctgcttcctcctgggaacaaccgcctcccgctcctagcaggttgctactgccccgaacccgcgctgcagggaacagcggggcaaacaaaaccaatagagccatggcgactccctctgctgccttcgaggcccttatgaatggtgtgacaagctgggatgtacccgaagatgctgttccatgtgaactgcttcttattggagaggcttcatttcctgtgatggtgaatgacatgggccaggtcctcattgctgcctcctcctatggccgtggccgcctggtggtcgtgtcccatgaggactacttggtggaagcccagctcacgccctttctcctgaacgcagtggggtggctttgctcttcccctggggctcccattggtgtacacccatccctggcacctttggccaaaatcctcgagggctctggagtggatgcaaaggttgagccagaagtgaaagactccctgggggtttactgtattgatgcctacaatgaaaccatgacagaaaagctggtcaagttcatgaaatgtggtggcggcttgctcataggaggacaagcctgggattgggccaaccagggggaggatgaaagggttctgttcacgttccctgggaacctcgtgaccagtgtggctggcatttactttactgacaacaaaggggacacgagtttctttaaagtctccaagaagatgcccaagatcccagtgttggttagttgtgaagatgacctctccgacgacagagaagagcttctgcatgggatttcagagctggacatcagcaactcggattgtttcccatcccagctgctagtgcatggggctttagcctttcctctagggttagattcctaccatggctgtgttatagcggctgcccgctatggccggggccgggtggttgtgactggccataaggtattattcactgttggtaaactgggcccctttctgctcaatgctgtccgctggctggatgggggccgcagaggcaagattgtggtgcagacagagctgagaaccctgagtggcctcctcgcagtggggggcatagacaccagcatcgagcccaatctgaccagtgatgcaagtgtctactgctttgaacccgtgagtgaagtgggggtcaaggaactgcaggagtttgtagcagagggtggcgggctatttgttggagcccaagcctggtggtgggccttcaagaaccccggagtgtcccctttggctcgattcccaggaaacctcctcctcaacccctttggcatcagcattacaagccaaagcctcaatccagggccctttcgtactcctaaagcagggataaggacctatcacttccgctccaccttggccgagttccaggttataatgggcaggaagagaggaaatgtggaaaagggctggttggcaaagctgggaccagatggtgcagctttcctgcagattcccgcagaagagatccctgcctacatgtctgtgcatcgactcctgaggaagctgctaagtcgatatcggcttccagtagcaacccgagagaaccctgttatcaatgactgctgcagaggtgctatgctttccctggccacagggctggcccactctggaagcgacctctctctgttagtcccagaaattgaagatatgtacagcagcccctatctgcgcccctcagaatctcctatcaccgtcgaggtcaactgcaccaatccaggcaccagatattgctggatgagtactgggctctacatacctggaaggcaaattatagaagtctcactgcctgaagctgctgcctctgccgacctgaagatacagattggctgccacacagatgacctgaccagggccagcaagcttttccgaggcccactcgtaattaaccggtgctgcttggacaaacccacaaaatcgatcacgtgcctctggggtggactcctctatataattgtgcctcagaacagcaaactgggttctgtgcctgtcaccgtgaagggggctgtgcatgctccatactacaagctgggggagaccaccctggaggagtggaagaggcgtatccaggagaatccagggccctggggagagctggccacggacaacatcattctgaccgtgccgaccgcaaatcttcgtactctggagaaccctgagccgctgctccgcctctgggatgaggtgatgcaggctgtggcgcgactgggagctgagcccttccctttgcgcctgcctcagaggattgttgccgacgtgcagatctcagtgggctggatgcatgcagggtaccccatcatgtgccatctggagtcagtgcaggagctcatcaacgagaagctcatcagaaccaaggggctgtggggccccgtccatgagctgggccgcaaccagcagcggcaggagtgggagttcccaccacacaccaccgaggccacctgcaacctgtggtgtgtgtatgtgcatgagacggtcttgggcattcctcgaagccgtgccaatattgctctgtggcccccagttcgggagaagagagtcagaatctacctgagcaagggtcccaatgtgaaaaactggaatgcatggaccgcactggaaacgtatttacagctccaggaagcctttggttgggagccattcatccgtctcttcaccgagtacaggaaccagaccaacttgcccacagaaaatgttgacaaaatgaatctgtgggtcaagatgttctcccaccaagtgcagaagaacctggctccgttctttgaggcctgggcctggcccatccagaaggaagtggctaccagcctggcctatctgcctgaatggaaggaaaatattatgaaattgtacctcctcacacagatgtaaggagtgcccatcgaggtggcaggccccactgaaattgaagtcaagaaatgcaaaaaggaactgacacatctcagcaaagaaaactgaagggatttggttataagtggagaggatctcagcatatttctggaagatagaaagtggatgaagcatgataatgaaagagtgaagaacctttcagataaaatgtaagctgatctgaacaacataaccccaaagagacttgcgcacctgaaaagcttgtctactgaagaattactccagttgtaagattgagccctctcctactctcccccaactcttatgcacagaacacaggcagtctccactattgataccagttaaaaatttctggtatgtgcctggtgtcgttaacggattgaacggctgttgcgaagaaaaagagtggggcccaaaaaattcctctaggggataatggcccacccgacgcaaaattcaaggcagggaaccctaaacaggcgggccgtaaaacgccaaacgcccgtcacgggaacccccggaaagcaccattgccaggaggggaccccgcggcgacacc

SEQ ID NO: 297729 - DNA, 1904 bp, Homo sapiens
catcagccagatcttttaggttctgcattactcaaatttcagttattctttctagggtaccatgaaagtgttctctagtttgttggattttgaatgatggactatttcagtgaagtgcctgactcccagagatcccaaacactgcatgttctcagagaggaaattagatcctccatctttgagaatatgtgtatccatccttgccctctttaatatatttttagcagtacatcccggggatatatttaaaatataaagttatccatgttacttccgtgtctaaaagcctccactggaatttctaatttgagataatggagtaaacataagtttaccttccctccctccccaggccccactgaaattgaagtcaagaaatgcaaaaaggaactgacacatctcagcaaagaaaactgaagggatttggttataagtggagaggatctcagcatatttctggaagatagaaagtggatgaagcatgataatgaaagagtgaagaacctttcagataaaatgtaagctgatctgaacaacataaccccaaagagacttgcgcacctgaaaagcttgtctactgaagaattactccagttgtaagattgagccctctcctactctcccccaactcttatgcacagaacacaggcagtctccactattgataccagttaaaaatttcttgttattgttgctgttgttgtttgtataaaggaattgaacaggctgcttgcagagagataagagttggtgctccagaaaaaaatttctcttctagtggaaataagtgcccctacccccagccggtcagctaattctctactgacagctgagacctcctactcaagtgcctgttgccttcaggtatagaagaggtttcctgaagaaacagacctaactgtacaacagcagaggaaacccatgccaactgttatacaagttaacagttatgttgattcttaaatgggaatggtgagttagaaattcccagacatgggcgatggggagggaagaggaataagaaaagtcacgaggtagaattaggggccttgaaaatatgacaaactctgagggaaacaaagacaatgtggaaagaataacttaattttaattccatctccagagagatttgaggtgtatttaagatgaaaaacaggatactacaaagaaacggaaaactcaggagttcgagaccagcctaggcaagatggcaacatcccgtctctacaaaataatttttaaaaattagccaagcatggtggcatgtgcctgtggtcctagctacttgggaggctgaagtgggaagatcacttgagcccaggagttcaaggcttcagtgagccatgatggtgccactgcactccagcctgggggacagagtgagaccctgtctcttaaaaagcaagaaaagaaagagaagactgagaataagaagatctctttgaaaataaaataagactgctaaaagtatttggtatacagtctggaaaataaagttgagggaatctctccagataaagagcaaaaagaaatagatagaaaaatataaagaaagaaaaaagacatagacaatcaatatgtaatgttaggagttcctggaagagagaacagagacagtgtaggtgaagaaataaaaagaaaaagaattgaagaacagagcaagctaagtctccagattgagagggcccaatacaatctacatctagacacaatattgtaaaattttggaatattaaggatagaaggaagatattaaagtggccagggagaaaacaaatgaggtcatcacgattagctcaacacaaaaatggatgagaaatagactgctaacagatttgtcatcagcaacactgaatgccagaagtcaatggatcaacatcttcagagcttatggaaaatttttg

SEQ ID NO: 297730 - DNA, 3252 bp, Homo sapiens
ctccattggatgggagttcagcagtgtgtttaagactagggtcatgcccacatcaatctcagattcccattttatctttcttttttggtatcactcctagtaccaagtcttgtgtctgtcaatatcctgtccaaaaaagaaaaacacaccaaggaaaattaatataggaaaaatttaaaaagttattagaggactgaaaatataaaaatggaacactgaaagacacagagtttttattttcagcactgcagctctgatggtccagctccaccaggacacagatccccagatccctaaaggtcagccatgcaccctgaacagctcagagggaggagccagaccagcagtgcctcacaccttgttctcttctgctctagacagatggctccataatgacagcttcataatggcagtgggtgagcccctggtgcacatcagggtcactcttctgctgctctggtttgggatgtttttgtctatttctggccactctcaggccaggccctcccagtatttcacttctccagaagtggtgatccctttgaaggtgatcagcaggggcagaggtgcaaaggctcctggatggctctcctatagcctgcggtttgggggacagagatacattgtccacatgagggtaaataagctgttgtttgctgcacaccttcctgtgttcacctacacagagcagcatgccctgctccaggatcagcccttcatccaggatgactgctactaccatggttatgtggagggggtccctgagtccttggttgcccttagtacctgttctgggggctttcttggaatgctacagataaatgaccttgtttatgaaatcaagccaattagtgtttctgccacatttgaacacctagtatataagatagacagtgatgatacacagtttccacctatgagatgtgggttaacagaagagaaaatagcacaccagatggagttgcaattgtcatataatttcactctgaagcaaagttcttttgtgggctggtggacccatcagcggtttgttgagctggtagtggtcgtggataatattagatatcttttctctcaaagtaatgcaacaacagtgcagcatgaagtatttaacgttgtcaatatagtggattccttctatcatcctttggaggttgatgtaattttgactggaattgatatatggactgcatcaaatccacttcctaccagtggagacctagataatgttttagaggacttttctatttggaagaattataaccttaataatcgactacaacatgatgttgcacatcttttcataaaagacacacaaggcatgaagcttggtgttgcctatgttaaaggaatatgccagaatccttttaatactggagttgatgtttttgaagacaacaggttggtcgtttttgcaattactttgggccacgagcttggtcataatttgggtatgcaacatgacacccagtggtgtgtgtgcgagctacagtggtgcataatgcatgcctatagaaaggtgacaactaaatttagcaactgcagttatgcccaatattgggacagtactatcagtagtggattatgtattcaaccgcctccatatccagggaatatatttagactgaagtactgtgggaatctagtggttgaagaaggggaggaatgtgactgtggaaccatacggcagtgtgcaaaagatccctgttgtctgttaaactgtactctacatcctggggctgcttgtgcttttggaatatgttgcaaagactgcaaatttctgccatcaggaactttatgtagacaacaagttggtgaatgtgaccttccagagtggtgcaatgggacatcccatcaatgcccagatgatgtgtatgtgcaggacgggatctcctgtaatgtgaatgccttctgctatgaaaagacgtgtaataaccatgatatacaatgtaaagagatttttggccaagatgcaaggagtgcatctcagagttgctaccaagaaatcaacacccaaggaaaccgtttcggtcactgtggtattgtaggcacaacatatgtaaaatgttggacccctgatatcatgtgtgggagggttcagtgtgaaaatgtgggagtaattcccaatctgatagagcattctacagtgcagcagtttcacctcaatgacaccacttgctggggcactgattatcatttagggatggctatacctgatattggtgaggtgaaagatggcacagtatgtggtccagaaaagatctgcatccgtaagaagtgtgccagtatggttcatctgtcacaagcctgtcagcctaagacctgcaacatgaggggaatctgcaacaacaaacaacactgtcactgcaaccatgaatgggcacccccatactgcaaggacaaaggctatggaggtagtgctgatagtggcccacctcctaagaacaacatggaaggattaaatgtgatgggaaagttgcgttacctgtcactattgtgccttcttcctttggttgcttttttattattttgcttacatgtgctttttaagaaacgcacaaaaagtaaagaagatgaagaaggataagagaaatgggaaaaagaaggagactaaactttatacttcatttttaatatccaattttttaatagaaaaatatgaagccatgtctcactgtttaaataaaacttcatggacatttcatgtcaggattgcaagcattagctatcacagcaaaggattcctagcctattcttacttactctacagtgtcttaagcaatattaaaggttccttttcccagaagttgtgtctttatgtttcctgagcaaaggcacagaaaagatagtttcaagctgttgtccctcatttttaactctcctctctctctctctctttttttttttttttttgctgtactatgtaatgttcaggatgtgcctgtacacaactcatttctgtttggcacattcagctgtgccaaagggggcagtagaagtagcctggagtgatgatgagggaagaagggagctttctttcctgtgtgcttaccatgagtgtcaccattattttggttggggccattcactctggcaattatatttggtttcagattccagttctgttgtcacttttagaaccaccctcatttttccttagaaataccagcagcagttggacactgacctccttaggggtccgggagtgagcagggttgtggtcctctgagttcttgaagcagcagcagctgt

SEQ ID NO: 297731 - DNA, 3341 bp, Homo sapiens
aacagagcagtaccccatctgtaaaataaggaaataataaaagaaatacatacattaaaataaaatggaaaatgtcttgccattttacatattttaagaacagtatataatgaatctttaggtatccatcatgaaaatttggtaataactcacctatgtgcaatctcccctatctggaaatcttcttggccatatgtattaagagaatcctaatgcattttattgcttcaaatatggtccaaatgcaggaatcactttgccttttttctctctctctttctccctttctatcccacccaccccatcctggctctttcagtttttattttcagcactgcagctctgatggtccagctccaccaggacacagatccccagatccctaaaggtcagccatgcaccctgaacagctcagagggaggagccagaccagcagtgcctcacaccttgttctcttctgctctagacagatggctccataatgacagcttcataatggcagtgggtgagcccctggtgcacatcagggtcactcttctgctgctctggtttgggatgtttttgtctatttctggccactctcaggccaggccctcccagtatttcacttctccagaagtggtgatccctttgaaggtgatcagcaggggcagaggtgcaaaggctcctggatggctctcctatagcctgcggtttgggggacagagatacattgtccacatgagggtaaataagctgttgtttgctgcacaccttcctgtgttcacctacacagagcagcatgccctgctccaggatcagcccttcatccaggatgactgctactaccatggttatgtggagggggtccctgagtccttggttgcccttagtacctgttctgggggctttcttggaatgctacagataaatgaccttgtttatgaaatcaagccaattagtgtttctgccacatttgaacacctagtatataagatagacagtgatgatacacagtttccacctatgagatgtgggttaacagaagagaaaatagcacaccagatggagttgcaattgtcatataatttcactctgaagcaaagttcttttgtgggctggtggacccatcagcggtttgttgagctggtagtggtcgtggataatattagatatcttttctctcaaagtaatgcaacaacagtgcagcatgaagtatttaacgttgtcaatatagtggattccttctatcatcctttggaggttgatgtaattttgactggaattgatatatggactgcatcaaatccacttcctaccagtggagacctagataatgttttagaggacttttctatttggaagaattataaccttaataatcgactacaacatgatgttgcacatcttttcataaaagacacacaaggcatgaagcttggtgttgcctatgttaaaggaatatgccagaatccttttaatactggagttgatgtttttgaagacaacaggttggtcgtttttgcaattactttgggccacgagcttggtcataatttgggtatgcaacatgacacccagtggtgtgtgtgcgagctacagtggtgcataatgcatgcctatagaaaggtgacaactaaatttagcaactgcagttatgcccaatattgggacagtactatcagtagtggattatgtattcaaccgcctccatatccagggaatatatttagactgaagtactgtgggaatctagtggttgaagaaggggaggaatgtgactgtggaaccatacggcagtgtgcaaaagatccctgttgtctgttaaactgtactctacatcctggggctgcttgtgcttttggaatatgttgcaaagactgcaaatttctgccatcaggaactttatgtagacaacaagttggtgaatgtgaccttccagagtggtgcaatgggacatcccatcaatgcccagatgatgtgtatgtgcaggacgggatctcctgtaatgtgaatgccttctgctatgaaaagacgtgtaataaccatgatatacaatgtaaagagatttttggccaagatgcaaggagtgcatctcagagttgctaccaagaaatcaacacccaaggaaaccgtttcggtcactgtggtattgtaggcacaacatatgtaaaatgttggacccctgatatcatgtgtgggagggttcagtgtgaaaatgtgggagtaattcccaatctgatagagcattctacagtgcagcagtttcacctcaatgacaccacttgctggggcactgattatcatttagggatggctatacctgatattggtgaggtgaaagatggcacagtatgtggtccagaaaagatctgcatccgtaagaagtgtgccagtatggttcatctgtcacaagcctgtcagcctaagacctgcaacatgaggggaatctgcaacaacaaacaacactgtcactgcaaccatgaatgggcacccccatactgcaaggacaaaggctatggaggtagtgctgatagtggcccacctcctaagaacaacatggaaggattaaatgtgatgggaaagttgcgttacctgtcactattgtgccttcttcctttggttgcttttttattattttgcttacatgtgctttttaagaaacgcacaaaaagtaaagaagatgaagaaggataagagaaatgggaaaaagaaggagactaaactttatacttcatttttaatatccaattttttaatagaaaaatatgaagccatgtctcactgtttaaataaaacttcatggacatttcatgtcaggattgcaagcattagctatcacagcaaaggattcctagcctattcttacttactctacagtgtcttaagcaatattaaaggttccttttcccagaagttgtgtctttatgtttcctgagcaaaggcacagaaaagatagtttcaagctgttgtccctcatttttaactctcctctctctctctctctttttttttttttttttgctgtactatgtaatgttcaggatgtgcctgtacacaactcatttctgtttggcacattcagctgtgccaaagggggcagtagaagtagcctggagtgatgatgagggaagaagggagctttctttcctgtgtgcttaccatgagtgtcaccattattttggttggggccattcactctggcaattatatttggtttcagattccagttctgttgtcacttttagaaccaccctcatttttccttagaaataccagcagcagttggacactgacctccttaggggtccgggagtgagcagggttgtggtcctctgagttcttgaagcagcagcagctgt

SEQ ID NO: 297732 - DNA, 2802 bp, Homo sapiens
ctccattggatgggagttcagcagtgtgtttaagactagggtcatgcccacatcaatctcagattcccattttatctttcttttttggtatcactcctagtaccaagtcttgtgtctgtcaatatcctgtccaaaaaagaaaaacacaccaaggaaaattaatataggaaaaatttaaaaagttattagaggactgaaaatataaaaatggaacactgaaagacacagagtttttattttcagcactgcagctctgatggtccagctccaccaggacacagatccccagatccctaaaggtcagccatgcaccctgaacagctcagagggaggagccagaccagcagtgcctcacaccttgttctcttctgctctagacagatggctccataatgacagcttcataatggcagtgggtgagcccctggtgcacatcagggtcactcttctgctgctctggtttgggatgtttttgtctatttctggccactctcaggccaggccctcccagtatttcacttctccagaagtggtgatccctttgaaggtgatcagcaggggcagaggtgcaaaggctcctggatggctctcctatagcctgcggtttgggggacagagatacattgtccacatgagggtaaataagctgttgtttgctgcacaccttcctgtgttcacctacacagagcagcatgccctgctccaggatcagcccttcatccaggatgactgctactaccatggttatgtggagggggtccctgagtccttggttgcccttagtacctgttctgggggctttcttggaatgctacagataaatgaccttgtttatgaaatcaagccaattagtgtttctgccacatttgaacacctagtatataagatagacagtgatgatacacagtttccacctatgagatgtgggttaacagaagagaaaatagcacaccagatggagttgcaattgtcatataatttcactctgaagcaaagttcttttgtgggctggtggacccatcagcggtttgttgagctggtagtggtcgtggataatattagatatcttttctctcaaagtaatgcaacaacagtgcagcatgaagtatttaacgttgtcaatatagtggattccttctatcatcctttggaggttgatgtaattttgactggaattgatatatggactgcatcaaatccacttcctaccagtggagacctagataatgttttagaggacttttctatttggaagaattataaccttaataatcgactacaacatgatgttgcacatcttttcataaaagacacacaaggcatgaagcttggtgttgcctatgttaaaggaatatgccagaatccttttaatactggagttgatgtttttgaagacaacaggttggtcgtttttgcaattactttgggccacgagcttggtcataatttgggtatgcaacatgacacccagtggtgtgtgtgcgagctacagtggtgcataatgcatgcctatagaaaggtgacaactaaatttagcaactgcagttatgcccaatattgggacagtactatcagtagtggattatgtattcaaccgcctccatatccagggaatatatttagactgaagtactgtgggaatctagtggttgaagaaggggaggaatgtgactgtggaaccatacggcagtgtgcaaaagatccctgttgtctgttaaactgtactctacatcctggggctgcttgtgcttttggaatatgttgcaaagactgcaaatttctgccatcaggaactttatgtagacaacaagttggtgaatgtgaccttccagagtggtgcaatgggacatcccatcaatgcccagatgatgtgtatgtgcaggacgggatctcctgtaatgtgaatgccttctgctatgaaaagacgtgtaataaccatgatatacaatgtaaagagatttttggccaagatgcaaggagtgcatctcagagttgctaccaagaaatcaacacccaaggaaaccgtttcggtcactgtggtattgtaggcacaacatatgtaaaatgttggacccctgatatcatgtgtgggagggttcagtgtgaaaatgtgggagtaattcccaatctgatagagcattctacagtgcagcagtttcacctcaatgacaccacttgctggggcactgattatcatttagggatggctatacctgatattggtgaggtgaaagatggcacagtatgtggtccagaaaagatctgcatccgtaagaagtgtgccagtatggttcatctgtcacaagcctgtcagcctaagacctgcaacatgaggggaatctgcaacaacaaacaacactgtcactgcaaccatgaatgggcacccccatactgcaaggacaaaggctatggaggtagtgctgatagtggcccacctcctaagaacaacatggaaggattaaatgtgatgggaaagttgcgttacctgtcactattgtgccttcttcctttggttgcttttttattattttgcttacatgtgctttttaagaaacgcacaaaaagtaaagaagatgaagaaggataagagaaatgggaaaaagaaggagactaaactttatacttcatttttaatatccaattttttaatagaaaaatatgaagccatgtctcactgtttaaataaaacttcatggacatttcatgtcaggattgcaagcattagctatcacagcaaaggattcctagcctattcttacttactctacagtgtcttaagcaatattaaaggttccttttccc

SEQ ID NO: 297733 - DNA, 3872 bp, Homo sapiens
  misc_feature (1547)..(1547): n is a, c, g, or t
  misc_feature (3122)..(3122): n is a, c, g, or t
ctgacttcacatcaaaactcctatactgacctgagacagaggcagcagtgatacccacctgagagatcctgtgtttgaacaactgcttcccaaaacggaaagtatttcaagcctaaacctttgggtgaaaagaactcttgaagtcatgattgcttcacagtttctctcagctctcactttggtgcttctcattaaagagagtggagcctggtcttacaacacctccacggaagctatgacttatgatgaggccagtgcttattgtcagcaaaggtacacacacctggttgcaattcaaaacaaagaagagattgagtacctaaactccatattgagctattcaccaagttattactggattggaatcagaaaagtcaacaatgtgtgggtctgggtaggaacccagaaacctctgacagaagaagccaagaactgggctccaggtgaacccaacaataggcaaaaagatgaggactgcgtggagatctacatcaagagagaaaaagatgtgggcatgtggaatgatgagaggtgcagcaagaagaagcttgccctatgctacacagctgcctgtaccaatacatcctgcagtggccacggtgaatgtgtagagaccatcaataattacacttgcaagtgtgaccctggcttcagtggactcaagtgtgagcaaattgtgaactgtacagccctggaatcccctgagcatggaagcctggtttgcagtcacccactgggaaacttcagctacaattcttcctgctctatcagctgtgataggggttacctgccaagcagcatggagaccatgcagtgtatgtcctctggagaatggagtgctcctattccagcctgcaatgtggttgagtgtgatgctgtgacaaatccagccaatgggttcgtggaatgtttccaaaaccctggaagcttcccatggaacacaacctgtacatttgactgtgaagaaggatttgaactaatgggagcccagagccttcagtgtacctcatctgggaattgggacaacgagaagccaacgtgtaaagctgtgacatgcagggccgtccgccagcctcagaatggctctgtgaggtgcagccattcccctgctggagagttcaccttcaaatcatcctgcaacttcacctgtgaggaaggcttcatgttgcagggaccagcccaggttgaatgcaccactcaagggcagtggacacagcaaatcccagtttgtgaagctttccagtgcacagccttgtccaaccccgagcgaggctacatgaattgtcttcctagtgcttctggcagtttccgttatgggtccagctgtgagttctcctgtgagcagggttttgtgttgaagggatccaaaaggctccaatgtggccccacaggggagtgggacaacgagaagcccacatgtgaagctgtgagatgcgatgctgtccaccagcccccgaagggtttggtgaggtgtgctcattcccctattggagaattcacctacaagtcctcttgtgccttcagctgtgaggagggatttgaattanatggatcaactcaacttgagtgcacatctcagggacaatggacagaagaggttccttcctgccaagtggtaaaatgttcaagcctggcagttccgggaaagatcaacatgagctgcagtggggagcccgtgtttggcactgtgtgcaagttcgcctgtcctgaaggatggacgctcaatggctctgcagctcggacatgtggagccacaggacactggtctggcctgctacctacctgtgaagctcccactgagtccaacattcccttggtagctggactttctgctgctggactctccctcctgacattagcaccatttctcctctggcttcggaaatgcttacggaaagcaaagaaatttgttcctgccagcagctgccaaagccttgaatcagatggaagctaccaaaagccttcttacatcctttaagttcaaaagaatcagaaacaggtgcatctggggaactagagggatacactgaagttaacagagacagataactctcctcgggtctctggcccttcttgcctactatgccagatgcctttatggctgaaaccgcaacacccatcaccacttcaatagatcaaagtccagcaggcaaggacggccttcaactgaaaagactcagtgttccctttcctactctcaggatcaagaaagtgttggctaatgaagggaaaggatattttcttccaagcaaaggtgaagagaccaagactctgaaatctcagaattccttttctaactctcccttgctcgctgtaaaatcttggcacagaaacacaatattttgtggctttctttcttttgcccttcacagtgtttcgacagctgattacacagttgctgtcataagaatgaataataattatccagagtttagaggaaaaaaatgactaaaaatattataacttaaaaaaatgacagatgttgaatgcccacaggcaaatgcatggagggttgttaatggtgcaaatcctactgaatgctctgtgcgagggttactatgcacaatttaatcactttcatccctatgggattcagtgcttcttaaagagttcttaaggattgtgatatttttacttgcattgaatatattataatcttccatacttcttcattcaatacaagtgtggtagggacttaaaaaacttgtaaatgctgtcaactatgatatggtaaaagttacttattctagattaccccctcattgtttattaacaaattatgttacatctgttttaaatttatttcaaaaagggaaactattgtcccctagcaaggcatgatgttaaccagaataaagttctgagtgtttttactacagttgttttttgaaaacatggtagaattggagagtaaaaactgaatggaaggtttgtatattgtcagatattttttcagaaatatgtggtttccacgatgaaaaacttccatgaggccaaacgttttgaactaataaaagcataaatgcaaacacacaaaggtataattttatgaatgtctttgttggaaaagaatacagaaagatggatgtgctttgcattcctacaaagatgtttgtcagatntgatatgtaaacataattcttgtatattatggaagattttaaattcacaatagaaactcaccatgtaaaagagtcatctggtagatttttaacgaatgaagatgtctaatagttattccctatttgttttcttctgtatgttagggtgctctggaagagaggaatgcctgtgtgagcaagcatttatgtttatttataagcagatttaacaattccaaaggaatctccagttttcagttgatcactggcaatgaaaaattctcagtcagtaattgccaaagctgctctagccttgaggagtgtgagaatcaaaactctcctacacttccattaacttagcatgtgttgaaaaaaaagtttcagagaagttctggctgaacactggcaacaacaaagccaacagtcaaaacagagatgtgataaggatcagaacagcagaggttcttttaaaggggcagaaaaactctgggaaataagagagaacaactactgtgatcaggctatgtatggaatacagtgttattttctttgaaattgtttaagtgttgtaaatatttatgtaaactgcattagaaattagctgtgtgaaataccagtgtggtttgtgtttgagttttattgagaattttaaattataacttaaaatattttataatttttaaagtatatatttatttaagcttatgtcagacctatttgacataacactataaaggttgacaataaatgtgcttatgtttaaaaaagtgt

SEQ ID NO: 297734 - DNA, 2075 bp, Homo sapiens
  misc_feature (1325)..(1325): n is a, c, g, or t
ccatgcttgtgctctgattattacagaggccctgaagcatcgagtttgcaacacttgatgaattaagtcatattgtatctggatttaatatatccttaaaagtcatttagtctgaattaatggttgtttgtcttttcttttgcagcaaagaaatttgttcctgccagcagctgccaaagccttgaatcagatggaagctaccaaaagccttcttacatcctttaagttcaaaagaatcagagagacagataactctcctcgggtctctggcccttcttgcctactatgccagatgcctttatggctgaaaccgcaacacccatcaccacttcaatagatcaaagtccagcaggcaaggacggccttcaactgaaaagactcagtgttccctttcctactctcaggatcaagaaagtgttggctaatgaagggaaaggatattttcttccaagcaaaggtgaagagaccaagactctgaaatctcagaattccttttctaactctcccttgctcgctgtaaaatcttggcacagaaacacaatattttgtggctttctttcttttgcccttcacagtgtttcgacagctgattacacagttgctgtcataagaatgaataataattatccagagtttagaggaaaaaaatgactaaaaatattataacttaaaaaaatgacagatgttgaatgcccacaggcaaatgcatggagggttgttaatggtgcaaatcctactgaatgctctgtgcgagggttactatgcacaatttaatcactttcatccctatgggattcagtgcttcttaaagagttcttaaggattgtgatatttttacttgcattgaatatattataatcttccatacttcttcattcaatacaagtgtggtagggacttaaaaaacttgtaaatgctgtcaactatgatatggtaaaagttacttattctagattaccccctcattgtttattaacaaattatgttacatctgttttaaatttatttcaaaaagggaaactattgtcccctagcaaggcatgatgttaaccagaataaagttctgagtgtttttactacagttgttttttgaaaacatggtagaattggagagtaaaaactgaatggaaggtttgtatattgtcagatattttttcagaaatatgtggtttccacgatgaaaaacttccatgaggccaaacgttttgaactaataaaagcataaatgcaaacacacaaaggtataattttatgaatgtctttgttggaaaagaatacagaaagatggatgtgctttgcattcctacaaagatgtttgtcagatntgatatgtaaacataattcttgtatattatggaagattttaaattcacaatagaaactcaccatgtaaaagagtcatctggtagatttttaacgaatgaagatgtctaatagttattccctatttgttttcttctgtatgttagggtgctctggaagagaggaatgcctgtgtgagcaagcatttatgtttatttataagcagatttaacaattccaaaggaatctccagttttcagttgatcactggcaatgaaaaattctcagtcagtaattgccaaagctgctctagccttgaggagtgtgagaatcaaaactctcctacacttccattaacttagcatgtgttgaaaaaaaagtttcagagaagttctggctgaacactggcaacaacaaagccaacagtcaaaacagagatgtgataaggatcagaacagcagaggttcttttaaaggggcagaaaaactctgggaaataagagagaacaactactgtgatcaggctatgtatggaatacagtgttattttctttgaaattgtttaagtgttgtaaatatttatgtaaactgcattagaaattagctgtgtgaaataccagtgtggtttgtgtttgagttttattgagaattttaaattataacttaaaatattttataatttttaaagtatatatttatttaagcttatgtcagacctatttgacataacactataaaggttgacaataaatgtgcttatgtttaaaaaagtgt

SEQ ID NO: 297735 - DNA, 542 bp, Homo sapiens
gtgcagaacgctttataagggcagcctcgggccatgaaacacagatatgcaaaaggccttctaataaaaaccacatctgtacaagctcttattgtattgtagctaaaacctgtcttttctctttgacctaaataatgaaagtcttaaaatttgtttatttatttgattaaactctgaaataaagattattgcactagtgtcctttgcccaaaatcttaggatgctgccttaaacatcatggtagaataatgtaactagctacccacgatttccttctttaattcattttgtgttttatctccccaggaaagtatttcaagcctaaacctttgggtgaaaagaactcttgaagtcatgattgcttcacagtttctctcagctctcactttgggtaagtcagtgccattagaccaagatttctcattctcgcactatagatatttcagactgaaatatccttgcttgtctggggctgtcctgcacaggatatctggcagcatccttgacctctacctgcaatgtgttcttccctgggcttgggg

SEQ ID NO: 297736 - DNA, 2571 bp, Homo sapiens
cagatcagagtgtatcagagaaagctgcacaaaagaggcaggcagcccaggaccctgagtactctggagaaactaggttccttccccaccctttaagaagacattccgtgcattagatgtactagagtggatgtattttgttgttttttaaattaactatttagcctcctcatcccccaccaaaaaagccatttagttattttttggttatattgatccatttgcaaatgagaagccagaaaagggagcagtcagggagggacttacaagttcctttcaagtttgagtacttgatgctcagcaaagatttcaagcttctgcagtagctctgggccaatgcttgactctttcatgaccacaagaaatgcagtttttctgcaaagggatccaaggtgaggtgtgtgtagggtttgaagttatacttctgggaagtgaaaagtcttgttcctttcaacctagaaataggtttgccacttaatgagtgagcagtaagtctgtgtaagaggctgaatgcatgcccctcagataagccagtacactccttgcttagcaacagaacatcagggtgatgtggagaggggcaggatgtggacgccactttggaaatcggcaacatctgagggcaacaacaaacaagtgtgttgggaaataagaaataactcagttttgacaactggctttgtcagcttttgtgatgtttctttagcagtttattggaaagatggtatgagatgacgtgctgcttcattgaattgctctttcccccatctttgccaaatctcaatgtatcgttcttaaccccacctcctgtaaggggctttgctatgcttcagctggttgtctcagcagctgaagtgctgcccacctgtgtgagttgggtccaggaaaccatgtctgcccttctgataagggaagatgaatctagagctgggtgaagatctaaattttaaccaaacccctgggcccaggaaaataacaattgaaaatgtacaaggcagtgttttcaatattaaacttccccaaggaaagcacaaactagtctttttggaaagggagaaaggattaagccacacagtattagtctttgaagcagtactggtctctaggggctggtgccaaaatggagtcccatagtagttacactcgatggcctcatgtactatatactgtgccaaattgtattaaacagtggtggggagttactgggataagaacttgtctaaaagtttacaaaccaaaacagatctgttaggttggtgcaaaagtaagtttttgccatacttaatgtattgccattaagtatggcaaaaaccacaattacttttacaccaacctatgtatttaagaatgtttggtttgccagattccaaatgaggtcttcagtgcagcaaagcccaaaaggtgtagactcagttatgcaattataaggttaaggcgtagaagaaagctgctgctaggtttttgttgcattttacttgactgctctgctgtttttcttgtctctcatgtttggttagctatgacttgagcatcttggtaactgacaaaggtcttccttgggggacttgaacatcttggtaaatgacaggtcttcttggaggactccagcagtatcttgtttaaacgactgaaaggactattaaggttgttgaattgtgttaattgggactcattgaggaaatgcgacattgatcctcctcttattccacagtgtgttttctgatcatataaagaaggttccgaaccatccatccccctcagagtttattcccctggtaagctgtaattgcatatccagtttaaactggactgggactgcatgttggtgaggatcggcaggggttttcccccttttcgaaagatgaaatagattcttgagcactggttgcagaagccaaaatagttcaaatagctttgcataaccattgggttctgcttctgattcaggtgctgggcatcatgtcctccctattcttctcttcttggaaacccagcctatctcataaatacctacttccgccacccatccaacctccctgctcctttcaacacaaatcttggatattgccaaaggaagccattcagcagctgctggggtttttcatccccctgacatgcatacatttgctctgggagaagtgtcttccctctgaccctggtccccagctccgtctgtgcttaattgctcttacctgttgcactaatgaatatgactaggttttaaagggggaatgtgaagcaataggcacatggggcttggatgaattggtcccacagatataccctgccttaagccgctgaggtgatgagtccactgctcatgtgaccctccacctttgtggatccctcttggtttgtgaccagtgtgtctgtttgttgaggttgtacaaacttgacaaaagttaatacttttgtttgtattttctgcactgttgcactctccaaatggccccttgagtatttttattgacttgttacacacatttttgtctttgatgtctacattttttcctttaatgttttttatttggaaggttacctgctgttggatttaataaatttgtttacttg

SEQ ID NO: 297737 - DNA, 2600 bp, Homo sapiens
cagatcagagtgtatcagagaaagctgcacaaaagaggcaggcagcccaggaccctgagtactctggagaaactaggttccttccccaccctttaagaagacattccgtgcattagatgtactagagtggatgtattttgttgttttttaaattaactatttagcctcctcatcccccaccaaaaaagccatttagttattttttggttatattgatccatttgcaaatgagaagccagaaaagggagcagtcagggagggacttacaagttcctttcaagtttgagtacttgatgctcagcaaagatttcaagcttctgcagtagctctgggccaatgcttgactctttcatgaccacaagaaatgcagtttttctgcaaagggatccaaggtgaggtgtgtgtagggtttgaagttatacttctgggaagtgaaaagtcttgttcctttcaacctagaaataggtttgccacttaatgagtgagcagtaagtctgtgtaagaggctgaatgcatgcccctcagataagccagtacactccttgcttagcaacagaacatcagggtgatgtggagaggggcaggatgtggacgccactttggaaatcggcaacatctgagggcaacaacaaacaagtgtgttgggaaataagaaataactcagttttgacaactggctttgtcagcttttgtgatgtttctttagcagtttattggaaagatggtatgagatgacgtgctgcttcattgaattgctctttcccccatctttgccaaatctcaatgtatcgttcttaaccccacctcctgtaaggggctttgctatgcttcagctggttgtctcagcagctgaagtgctgcccacctgtgtgagttgggtccaggaaaccatgtctgcccttctgataagggaagatgaatctagagctgggtgaagatctaaattttaaccaaacccctgggcccaggaaaataacaattgaaaatgtacaaggcagtgttttcaatattaaacttccccaaggaaagcacaaactagtctttttggaaagggagaaaggattaagccacacagtattagtctttgaagcagtactggtctctaggggctggtgccaaaatggagtcccatagtagttacactcgatggcctcatgtactatatactgtgccaaattgtattaaacagtggtggggagttactgggataagaacttgtctaaaagtttacaaaccaaaacagatctgttaggttggtgcaaaagtaagtttttgccatacttaatgtattgccattaagtatggcaaaaaccacaattacttttacaccaacctatgtatttaagaatgtttggtttgccagattccaaatgaggtcttcagtgcagcaaagcccaaaaggtgtagactcagttatgcaattataaggttaaggcgtagaagaaagctgctgctaggtttttgttgcattttacttgactgctctgctgtttttcttgtctctcatgtttggttagctatgacttgagcatcttggtaactgacaaaggtcttccttgggggacttgaacatcttggtaaatgacaggtcttcttggaggactccagcagtatcttgtttaaacgactgaaaggactattaaggttgttgaattgtgttaattgggactcattgaggaaatgcgacattgatcctcctcttattccacagtgtgttttctgatcatataaagaaggttccgaaccatccatccccctcagagtttattcccctggtaagctgtaattgcatatccagtttaaactggactgggactgcatgttggtgaggatcggcaggggttttcccccttttcgaaagatgaaatagattcttgagcactggttgcagaagccaaaatagttcaaatagctttgcataaccattgggttctgcttctgattcaggtgctgggcatcatgtcctccctattcttctcttcttggaaacccagcctatctcataaatacctacttccgccacccatccaacctccctgctcctttcaacacaaatcttggatattgccaaaggaagccattcagcagctgctggggtttttcatccccctgacatgcatacatttgctctgggagaagtgtcttccctctgaccctggtccccagctccgtctgtgcttaattgctcttacctgttgcactaatgaatatgactaggttttaaagggggaatgtgaagcaataggcacatggggcttggatgaattggtcccacagatataccctgccttaagccgctgaggtgatgagtccactgctcatgtgaccctccacctttgtggatccctcttggtttgtgaccagtgtgtctgtttgttgaggttgtacaaacttgacaaaagttaatacttttgtttgtattttctgcactgttgcactctccaaatggccccttgagtatttttattgacttgttacacacatttttgtctttgatgtctacattttttcctttaatgttttttatttggaaggttacctgctgttggatttaataaatttgtttacttgaatattgatatttctacaaaaaaaaaaaa

SEQ ID NO: 297738 - DNA, 2554 bp, Homo sapiens
cagatcagagtgtatcagagaaagctgcacaaaagaggcaggcagcccaggaccctgagtactctggagaaactaggttccttccccaccctttaagaagacattccgtgcattagatgtactagagtggatgtattttgttgttttttaaattaactatttagcctcctcatcccccaccaaaaaagccatttagttattttttggttatattgatccatttgcaaatgagaagccagaaaagggagcagtcagggagggacttacaagttcctttcaagtttgagtacttgatgctcagcaaagatttcaagcttctgcagtagctctgggccaatgcttgactctttcatgaccacaagaaatgcagtttttctgcaaagggatccaaggtgaggtgtgtgtagggtttgaagttatacttctgggaagtgaaaagtcttgttcctttcaacctagaaataggtttgccacttaatgagtgagcagtaagtctgtgtaagaggctgaatgcatgcccctcagataagccagtacactccttgcttagcaacagaacatcagggtgatgtggagaggggcaggatgtggacgccactttggaaatcggcaacatctgagggcaacaacaaacaagtgtgttgggaaataagaaataactcagttttgacaactggctttgtcagcttttgtgatgtttctttagcagtttattggaaagatggtatgagatgacgtgctgcttcattgaattgctctttcccccatctttgccaaatctcaatgtatcgttcttaaccccacctcctgtaaggggctttgctatgcttcagctggttgtctcagcagctgaagtgctgcccacctgtgtgagttgggtccaggaaaccatgtctgcccttctgataagggaagatgaatctagagctgggtgaagatctaaattttaaccaaacccctgggcccaggaaaataacaattgaaaatgtacaaggcagtgttttcaatattaaacttccccaaggaaagcacaaactagtctttttggaaagggagaaaggattaagccacacagtattagtctttgaagcagtactggtctctaggggctggtgccaaaatggagtcccatagtagttacactcgatggcctcatgtactatatactgtgccaaattgtattaaacagtggtggggagttactgggataagaacttgtctaaaagtttacaaaccaaaacagatctgttaggttggtgcaaaaaccacaattacttttacaccaacctatgtatttaagaatgtttggtttgccagattccaaatgaggtcttcagtgcagcaaagcccaaaaggtgtagactcagttatgcaattataaggttaaggcgtagaagaaagctgctgctaggtttttgttgcattttacttgactgctctgctgtttttcttgtctctcatgtttggttagctatgacttgagcatcttggtaactgacaaaggtcttccttgggggacttgaacatcttggtaaatgacaggtcttcttggaggactccagcagtatcttgtttaaacgactgaaaggactattaaggttgttgaattgtgttaattgggactcattgaggaaatgcgacattgatcctcctcttattccacagtgtgttttctgatcatataaagaaggttccgaaccatccatccccctcagagtttattcccctggtaagctgtaattgcatatccagtttaaactggactgggactgcatgttggtgaggatcggcaggggttttcccccttttcgaaagatgaaatagattcttgagcactggttgcagaagccaaaatagttcaaatagctttgcataaccattgggttctgcttctgattcaggtgctgggcatcatgtcctccctattcttctcttcttggaaacccagcctatctcataaatacctacttccgccacccatccaacctccctgctcctttcaacacaaatcttggatattgccaaaggaagccattcagcagctgctggggtttttcatccccctgacatgcatacatttgctctgggagaagtgtcttccctctgaccctggtccccagctccgtctgtgcttaattgctcttacctgttgcactaatgaatatgactaggttttaaagggggaatgtgaagcaataggcacatggggcttggatgaattggtcccacagatataccctgccttaagccgctgaggtgatgagtccactgctcatgtgaccctccacctttgtggatccctcttggtttgtgaccagtgtgtctgtttgttgaggttgtacaaacttgacaaaagttaatacttttgtttgtattttctgcactgttgcactctccaaatggccccttgagtatttttattgacttgttacacacatttttgtctttgatgtctacattttttcctttaatgttttttatttggaaggttacctgctgttggatttaataaatttgtttacttgaatattgatatttctacaaaaaaaaaaaa

SEQ ID NO: 297739 - DNA, 536 bp, Homo sapiens
agcctttagaggctacactgagtcctctttttcatgctcttcctggttttcaagtgtcaattaaaatttgtcttcagaagaaacttgaaaataagtatctgatgccgtcatcaggatagactagtattagctttcgcagctgaagttattgctctcccagccctaataataacttaccaagtgcttattatttatcaggcactggtccaagtccttcaatcagattgtctcacctgatcctcccaacagccctaggaagcaggtcttactacactccccatttcacagggactggggcttggggaggtgatgcggtttcctgggtcactccattactgagtagtgagacaggattcagacgcaagctttgaaaatgttctaattttctttagaaggaagggcccttcttaatagcacactgaataaaatcaaatgaataatcacacattacaagatgcctcctatacgtctctatatttagctacttacataccaggtttcttttttgtttgtttttgtttttgagactcatctca

SEQ ID NO: 297740 - DNA, 1152 bp, Homo sapiens
tccatggttctcagccttctctttgcatcaaattcagctggagttttaaaagatacagatactaagtccctacccctagcaattgtgatataatagatctggggtggggcctgggccatggtgggtattaaaagctctgctgtgcagccagggttgagatcttcagctgcagctcagggggatccaccacgtcacacagggctcctagtccaagagctgctgggagaatcagggacctggctcatagggatcattgagagaataatcctctcagctgctgagcactggtgccccctgccccatctggttgactcttactccagggtgctataaaaatagcattttccatgtgtgccatgaaggcaaaaagatctaagctgagccagagcccctggatcagggatactcacaggatgtaggtgatgacgcctatgctcctgcaaaataaagaacagtcaagtcagggccacctgggtcccatccccgaccagcaagggacaccctcatggatctaaggggaagaggtcacttgcctcctccacagcagaccctggatgccgtctcatgctccacacccatctccatcctgctcttcagcagcagcccggggtgtgtttggagtcatcgagctctgaaccctgagtccgaagacccaagttcaagatcagactcctgcacttgcaggctgtgtgatttagatgacactttttaaaagcttggagatcatggaggcaaaaaagaggacagtagcttgagaaggaggaaggactgagcccattcaactgcgaatggaaaaggtggagagtgggaaagtgtatttgtcttccctgactgctttgtcttggtacccttcagtttcactataatgtgtctaggtaagatttttgtttttttctgcctggtatatattgtcctttctgtgtctgtggatgcatggatgcagttctgaaaattctcagccattctcttcaaatagtgcttctcctttttttctttttgtatctatttcctccttttagaattccaaagagatctatgataagttttctttttatcctcttttgcttatcctctctttcatatttctatgtctttgtcactctatggtgctctagctaatttgtttcagctctttcaattcttcaactctct

SEQ ID NO: 297741 - DNA, 531 bp, Homo sapiens
tccatggttctcagccttctctttgcatcaaattcagctggagttttaaaagatacagatactaagtccctacccctagcaattgtgatataatagatctggggtggggcctgggccatggtgggtattaaaagctctgctgtgcagccagggttgagatcttcagctgcagctcagggggatccaccacgtcacacagggctcctagtccaagagctgctgggagaatcagggacctggctcatagggatcattgagagaataatcctctcagctgctgagcactggtgccccctgccccatctggttgactcttactccagggtgctataaaaatagcattttccatgtgtgccatgaaggcaaaaaggttgggaagggctgatggaatgaatactcactagcccactgtgcatgttccagagtcagggctaggagacttgcgcatgttgacttatttagctttcacaacacacccatggcaggaagtttgtgattcctatttttctcatgagaaaaacaagcccagag

SEQ ID NO: 297742 - DNA, 1163 bp, Homo sapiens
tccatggttctcagccttctctttgcatcaaattcagctggagttttaaaagatacagatactaagtccctacccctagcaattgtgatataatagatctggggtggggcctgggccatggtgggtattaaaagctctgctgtgcagccagggttgagatcttcagctgcagctcagggggatccaccacgtcacacagggctcctagtccaagagctgctgggagaatcagggacctggctcatagggatcattgagagaataatcctctcagctgctgagcactggtgccccctgccccatctggttgactcttactccagggtgctataaaaatagcattttccatgtgtgccatgaaggcaaaaagatctaagctgagccagagcccctggatcagggatactcacaggatgtaggtgatgacgcctatgctcctgcaaaataaagaacagtcaagtcagggccacctgggtcccatccccgaccagcaagggacaccctcatggatctaaggggaagaggtcacttgcctcctccacagcagaccctggatgccgtctcatgctccacacccatctccatcctgctcttcagcagcagcccggggtgtgtttggagtcatcgagctctgaaccctgagtccgaagacccaagttcaagatcagactcctgcacttgcaggctgtgtgatttagatgacactttttaaaagcttggagatcatggaggcaaaaaagaggacagtagcttgagaaggaggaaggactgagcccattcaactgcgaatggaaaaggtggagagtgggaaagtgtgagtttatctaaaacaatatcaaaaccattgcatccacagcctgtgtctgccctcctgtcctcttgcatcctgctactttaagactcagggaactacgctcctggttttgctgctgttttagctttataaaaatgctgtcatactgcatgtgatttatagtcactttattttttcactgaacatttatgcttctagtgttcactgattgttcatccatgctttttacattttcactgctatacggtaatccatcgtgtgaatgtgtatcattttttagtcattctcctctcagagttcatttaaatggctcccattttaaacaattattgaaacgacattgctatga

SEQ ID NO: 297743 - DNA, 424 bp, Homo sapiens
ttcctagtggctgggattacaggtgcgcaccaccacccccaggtaatttttgcatttttaataaggatcccctaggttgaaatgggcacagaaattgtgagcagacagtagtagtgataataataaaagaaggcaatcaaaatttaattttatcatgccctctcacaggtttgtgttataattgtaagcccatattacttgtgttagtagttttgtctctataggtaacataatgacagtggtgtaaagtttctgttcaagaaacatatgttgtaaagttactttatacaagatacctgccaaaggaaatggtcttactttcaaatgactttgaaagcatgtataattgcaaacagagcaggagaagactttaatcagaatttctgtgcccatatacaggggatctctagagcgaccagcagca

SEQ ID NO: 297744 - DNA, 8037 bp, Homo sapiens
cagaggaacagggcaaacctctgacttccggcggcattttgaggcggtcctcctagcggcctggtagtgtttttgttgccttttcttaatctacaatctcttcgttatttttcttcctgcgacccagtttcgcttgaccctggagaggcggcgggcgggttggttctgcttctcagccatcccgggggctcctcgctagccaagagccggttcccgggagccgcgcgcgcatcgctttctcctcgtcgtcgtcctcctgggtccaggcgcggggacagagtcgcctcccccgctcctcggagcggcggcggcggtggtgcctccggactgcacttgcgaagggagcttggggaggaatagtacaaaatgtcaaaaattagaaggaaggtcacagtggaaaataccaagactatatctgatagcacatcccgaagacccagtgtatttgagaggcttggacccagcactggcagtacagcagagacacagtgccgtaactggctgaagactggcaactgcctctatggaaacacatgtagattcgtacatggcccttcacctcgtggtaaaggttatagcagcaattatagaaggtcaccagaaagacctacaggggatcttagagaaagaatgaagaacaagcgccaagacgtggacactgagccccagaaacgaaatacagaggagtcatcctcacctgttaggaaagaatcttcaagagggagacatagggaaaaggaagacataaaaatcactaaggaaagaactccagaaagtgaagaagaaaatgtagaatgggaaactaatagagatgattctgacaatggagatattaattatgattatgttcatgaattgtcattggaaatgaagcgtcagaagatacagagggaattaatgaagctggaacaagaaaacatggagaagagagaagaaattatcattaaaaaggaggtttcaccagaagtggttagatcaaaattgtccccgtcaccttctctaagaaagtctagcaaatctccgaagcgaaaatcaagcccgaagtcgtcttcagctagcaagaaagataggaagacatctgcagtatcttctcccctgttggaccagcagagaaattcaaaaaccaaccaaagtaaaaagaaaggaccacgtactcctagtccaccccctcctataccagaagatatcgctctggggaaaaaatacaaagaaaaatataaagtaaaagacaggatagaagaaaaaacaagagatggaaaggacagaggacgagattttgaacgacaaagagaaaagagagacaagccaaggtctacttccccagcaggacagcatcattctcctatatcttctagacatcactcatcttcctcacaatcaggatcatctattcaaagacattctccttctcctcgtcgaaaaagaactccttcaccatcttatcagcggacactaactccacctttacgacgctctgcctctccttatccttcacattctttgtcgtctccccagagaaagcagagtcctccaagacatcgctctccaatgcgagagaaagggagacatgatcatgaacgaacttcacagtctcatgatcgacgccacgaaaggagggaagatactaggggcaaacgagacagagaaaaggactcaagagaagaacgagaatatgaacaggatcagagctcttctagagaccacagagatgacagagaacctcgagatggtcgggatcggagagatgccagagatactagggaccgaagggaactaagagactccagagacatgcgggactcaagggagatgagagattatagcagagataccaaagagagccgtgatcccagagattctcggtccactcgtgatgcccatgactacagggaccgtgaaggtcgagatactcatcgaaaggaggatacatatccagaagaatcccggagttatggccgaaaccatttgagagaagaaagttctcgtacggaaataaggaatgagtccagaaatgagtctcgaagtgaaattagaaatgaccgaatgggccgaagtagggggagggttcctgagttacctgaaaagggaagtcgaggctcaagaggttctcaaattgatagtcacagtagtaatagcaactatcatgacagctgggaaactcgaagtagctatcctgaaagagatagatatcctgaaagagacaacagagatcaagcaagggattcttcctttgagagaagacatggagagcgagaccgtcgtgacaacagagagagagatcaaagaccaagctcaccaattcgacatcagggaaggaatgacgagcttgagcgtgatgaaagaagagaggaacgaagagtagacagagtggatgataggagagatgaaagggctagagagagagatcgggaacgagaacgagacagggagcgggagagagagagggaacgtgaacgggatcgggaaagagaaaaagagagagaactagaaagagagcgtgctagggaacgggagagagaaagagaaaaagagagagatcgtgaaagggatagagaccgagaccacgatcgagagcgggaaagagagagggaacgagacagggaaaaagaacgggaacgagaaagagaagagagagagagggagagagagcgagaacgggagagagagcgagagcgagaacgggaacgagaaagagcgagagaaagggataaagaacgagaacgccaaagggattgggaagacaaagacaaaggacgagatgaccgcagagaaaagcgagaagagatccgagaagataggaatccaagagatggacatgatgaaagaaaatcaaagaagcgctatagaaatgaagggagtcccagccctagacagtccccgaagcgccggcgtgaacattctccggacagtgatgcctacaacagtggagatgataaaaatgaaaaacacagactcttgagccaagttgtacgacctcaagaatctcgttctcttagtccctcgcacctcacagaagacagacagggtagatggaaagaggaggatcgtaaaccagaaaggaaagagagttcaaggcgctacgaagaacaggaactcaaggagaaagtttcttctgtagataaacagagagaacagacagaaatcctggaaagctcaagaatgcgtgcacaggacattataggacaccaccagtctgaagatcgagagacatctgatcgagctcatgatgaaaacaagaagaaagcaaaaattcaaaagaaaccaattaagaaaaagaaagaggatgatgttggaatagagaggggtaacatagagacaacatctgaagatggtcaagtattttcaccaaaaaaaggacagaaaaagaaaagcattgaaaaaaaacgtaaaaaatccaaaggtgattctgatatttctgatgaagaagcagcccagcaaagtaagaagaaaagaggcccacggactccccctataacaactaaagaggaattggttgaaatgtgcaatggtaagaatggtattctagaggactcccagaaaaaagaagatacagcattcagtgactggtctgatgaggatgtccctgaccgtacagaggtgacagaagcagagcatactgccaccgccacgactcctggtagtaccccttctcctctatcttctcttcttcctcctccaccgcctgtggctactgccactgctacaactgtgcctgcaactcttgctgccactactgctgctgccgccacctctttcagcacatctgccatcactatttccacctctgccacccccaccaataccaccaataatacttttgccaatgaagactcacacagaaaatgccacagaacacgagtagaaaaagtagagacgcctcacgtgactatagaagatgcacagcatcgcaagcctatggatcaaaagaggagcagcagcctcgggagcaatcggagtaaccgtagtcatacgtctggtcgtcttcgctccccatccaatgattcagcccatcgaagtggagatgaccaaagtggtcgaaagagagtactgcacagtggctcaagagatagagaaaaaacaaaaagcctggaaatcacaggagagagaaaatctaggattgatcagttaaagcgtggagaacccagtcgaagtacttcttcagatcgccaggattcaagaagccatagttcaagaagaagttctccagagtcagatcgacaggtccattcaagatctgggtcatttgatagcagagacaggcttcaagaacgagatcgatatgaacacgacagagagcgcgagagagagaggagagatacgaggcagagagaatgggaccgagatgctgataaagattggccacgcaacagggatcgagatagattgcgagaacgagaacgagagagagaacgagacaaaaggagagacttggatagggaaagagagagactaatttctgattctgttgaaagggacagggacagagacagagacagaacttttgagagttctcaaatagagtctgtgaaacgctgtgaagcaaaactggaaggtgaacatgaaagggatctagaaagcacttcccgagactctctagccttggataaagagagaatggataaagatctgggatctgtgcagggatttgaagatacaaataaatccgagagaactgagagtctggaagcaggagatgacgagtccaagttagatgatgcacattcattaggctctggtgctggagaaggatacgagccaatcagtgatgacgaactagatgaaattctggcaggtgatgcagaaaagagggaggaccaacaggatgaggagaagatgccagatcccttagatgtgatagatgtggattggtctggtcttatgccaaagcatccaaaagaaccacgagagcctggggctgcactcttaaaattcacacctggagctgttatgctaagagttgggatttctaaaaagttggcaggttctgaactctttgccaaagtcaaagaaacatgtcagagacttttagaaaaacccaaagatgcagacaatctctttgaacatgaattgggggctctcaatatggctgcattactacgaaaagaagaaagagcaagtcttcttagtaatcttggcccatgttgtaaggcgttgtgcttcagacgggattctgcaattcgaaagcagcttgttaaaaatgagaagggcaccataaaacaagcttacacgagtgctccaatggtagacaatgaattacttcgattgagtcttcggttatttaagcggaagactacttgccatgctccaggacatgaaaagactgaagataataaactttcacagtccagtatccaacaggaactgtgtgtgtcttaagaccgaagttcaatatggtatttttggtactgtcttccttcagcagtgcatattcttttgcaaagttctttggtttgacaagcattagtgacaaaggcagaaaagatttatcagccatgctaaaagagtgaagaattttgatctttagagacactagttttggccaacttaagattttacgttaatttttacatagtatttgacactcatgcaaaataatgtgaaaacatctagatttagtagtttattctgcgccttttgttaaaactgaagattttggaaaatggttgtcactgctcttccagcctatgaatatttttgtgaaatggaaccatggatttatgtctggatcatccatacagaaccaacaattttattcaaaaacaatgtgttcatcaaagtaattgctcacattgtgcagtactatgttgtacagaccacgtgaaagggaatgctggtctagctggcgtggtatgtttataggcgaatttcagcagaaggaagccaaaatagttttttccttttgaaagttttttaaaaattatttcatgggtcttttttttaattaatatgtgtgcattgttacaatgtatgttggatgtcttttgaccctaaatgctttttttgttatcagagattgtgtactatttttatttttaataaatgtatcttccctttccttgttttagatttactttgctcttcgttaatcttattcctgatgatctagaacattagtcatcaacattacatgtttcatgcttcagatattttactgcttgtgtccttattgttggacagctttaaacagagttgatgtacttcaaatatagctcattgatacttaaggcatcttcttggaatgtggcttttgaagaaaaaaattactcaaagcaaatcaagagttaacaaacctaacgtaacctgaggtttaatattctactatcatattttttagagctataacttttgattatattaaactgcctccagctgtactatgtaaaacagatttacttttaaaaattacagtatacctgctttgttctatatgtatatgtttaactcatgaagtggactcttagaaggatttgaaatggactctgggcacagaaattgtgagcagacagtagtagtgataataataaaagaaggcaatcaaaatttaattttatcatgccctctcacaggtttgtgttataattgtaagcccatattacttgtgttagtagttttgtctctataggtaacataatgacagtggtgtaaagtttctgttcaagaaacatatgttgtaaagttactttatacaagatacctgccaaaggaaatggtcttactttcaaatgactttgaaagcatgtataattgcaaacagagcaggagaagactttaatcagaatttccttgtgtccttttcctttactaagtgttttgaataaagaaaaaaaaaatgtatgacctcagagaatgaatacccttcaggaagccacttcctgattttagtgggataatatggttctctgtagcacaaagatttaaagtcctagaatttctaatcctagttctcagaattgtagaatatgacaaaaataatggtttccccatttgtccactgacttcagggatatttcacaagttatttatttatagaatgaaaactatgtagttaaatctgtcattcagttaaacctgtgtctttcagtttgaaatcttttgttatgtatgttgcaaaagaaaatttagaactattcctttgttcactcagtcacagcattcagagctttatgtttccagtggaaatgtactgttcagtctcaatttcttttaattcaaccattctcagtattagtaacatatacctataaaatttttctaaagcaaaatttttgattgaatttctcataaaagctcttggaccataattaaagtctcagttaaactggtattcccgaaaaacaatcttccagtctataaattgtttgctagtacaattaaaaggtcatctatctcataactgacggctcaggtctgtccagttgccataattgcacaactggattccagctgctggtaataaggaattgtgtagatagataaagggcaagagtatgtctgcaatccaaaataaatgagagttaacacataattagccttttgattattttggcagctatcctcaccatttagtaaagggtatactaacaatacccaactttatttaacaaagttttgtaagcatacctaagtagtaacttgatatgctgaaaaatctgacctgtcacttcgcttcactctgaccagtaattgcagattgtcgtcaccatcctagcctatgactacattaggattttatgacttattaacttgaaaatctgttctgtaagtggcattggtagaatctcccactttgctcctcactgtccaattgtgtaaagattaaggtacatactattgttggtgatgcttttacacctcaacttgctattttaaaaggttatatgaacccctcccacttttaaggatattcccttttactgattttcctagctaaaattatatagccatctttctaaatattgtatttaaatctgatctaggacttgccttattttatcatttttctttaataatctccaataaactttctttattcattaa

SEQ ID NO: 297745 - DNA, 8095 bp, Homo sapiens
cagaggaacagggcaaacctctgacttccggcggcattttgaggcggtcctcctagcggcctggtagtgtttttgttgccttttcttaatctacaatctcttcgttatttttcttcctgcgacccagtttcgcttgaccctggagaggcggcgggcgggttggttctgcttctcagccatcccgggggctcctcgctagccaagagccggttcccgggagccgcgcgcgcatcgctttctcctcgtcgtcgtcctcctgggtccaggcgcggggacagagtcgcctcccccgctcctcggagcggcggcggcggtggtgcctccggactgcacttgcgaagggagcttggggaggaacagtgataacgatttaggtcctgggaattgagtgctactttatcttcacaagccttagtagtacaaaatgtcaaaaattagaaggaaggtcacagtggaaaataccaagactatatctgatagcacatcccgaagacccagtgtatttgagaggcttggacccagcactggcagtacagcagagacacagtgccgtaactggctgaagactggcaactgcctctatggaaacacatgtagattcgtacatggcccttcacctcgtggtaaaggttatagcagcaattatagaaggtcaccagaaagacctacaggggatcttagagaaagaatgaagaacaagcgccaagacgtggacactgagccccagaaacgaaatacagaggagtcatcctcacctgttaggaaagaatcttcaagagggagacatagggaaaaggaagacataaaaatcactaaggaaagaactccagaaagtgaagaagaaaatgtagaatgggaaactaatagagatgattctgacaatggagatattaattatgattatgttcatgaattgtcattggaaatgaagcgtcagaagatacagagggaattaatgaagctggaacaagaaaacatggagaagagagaagaaattatcattaaaaaggaggtttcaccagaagtggttagatcaaaattgtccccgtcaccttctctaagaaagtctagcaaatctccgaagcgaaaatcaagcccgaagtcgtcttcagctagcaagaaagataggaagacatctgcagtatcttctcccctgttggaccagcagagaaattcaaaaaccaaccaaagtaaaaagaaaggaccacgtactcctagtccaccccctcctataccagaagatatcgctctggggaaaaaatacaaagaaaaatataaagtaaaagacaggatagaagaaaaaacaagagatggaaaggacagaggacgagattttgaacgacaaagagaaaagagagacaagccaaggtctacttccccagcaggacagcatcattctcctatatcttctagacatcactcatcttcctcacaatcaggatcatctattcaaagacattctccttctcctcgtcgaaaaagaactccttcaccatcttatcagcggacactaactccacctttacgacgctctgcctctccttatccttcacattctttgtcgtctccccagagaaagcagagtcctccaagacatcgctctccaatgcgagagaaagggagacatgatcatgaacgaacttcacagtctcatgatcgacgccacgaaaggagggaagatactaggggcaaacgagacagagaaaaggactcaagagaagaacgagaatatgaacaggatcagagctcttctagagaccacagagatgacagagaacctcgagatggtcgggatcggagagatgccagagatactagggaccgaagggaactaagagactccagagacatgcgggactcaagggagatgagagattatagcagagataccaaagagagccgtgatcccagagattctcggtccactcgtgatgcccatgactacagggaccgtgaaggtcgagatactcatcgaaaggaggatacatatccagaagaatcccggagttatggccgaaaccatttgagagaagaaagttctcgtacggaaataaggaatgagtccagaaatgagtctcgaagtgaaattagaaatgaccgaatgggccgaagtagggggagggttcctgagttacctgaaaagggaagtcgaggctcaagaggttctcaaattgatagtcacagtagtaatagcaactatcatgacagctgggaaactcgaagtagctatcctgaaagagatagatatcctgaaagagacaacagagatcaagcaagggattcttcctttgagagaagacatggagagcgagaccgtcgtgacaacagagagagagatcaaagaccaagctcaccaattcgacatcagggaaggaatgacgagcttgagcgtgatgaaagaagagaggaacgaagagtagacagagtggatgataggagagatgaaagggctagagagagagatcgggaacgagaacgagacagggagcgggagagagagagggaacgtgaacgggatcgggaaagagaaaaagagagagaactagaaagagagcgtgctagggaacgggagagagaaagagaaaaagagagagatcgtgaaagggatagagaccgagaccacgatcgagagcgggaaagagagagggaacgagacagggaaaaagaacgggaacgagaaagagaagagagagagagggagagagagcgagaacgggagagagagcgagagcgagaacgggaacgagaaagagcgagagaaagggataaagaacgagaacgccaaagggattgggaagacaaagacaaaggacgagatgaccgcagagaaaagcgagaagagatccgagaagataggaatccaagagatggacatgatgaaagaaaatcaaagaagcgctatagaaatgaagggagtcccagccctagacagtccccgaagcgccggcgtgaacattctccggacagtgatgcctacaacagtggagatgataaaaatgaaaaacacagactcttgagccaagttgtacgacctcaagaatctcgttctcttagtccctcgcacctcacagaagacagacagggtagatggaaagaggaggatcgtaaaccagaaaggaaagagagttcaaggcgctacgaagaacaggaactcaaggagaaagtttcttctgtagataaacagagagaacagacagaaatcctggaaagctcaagaatgcgtgcacaggacattataggacaccaccagtctgaagatcgagagacatctgatcgagctcatgatgaaaacaagaagaaagcaaaaattcaaaagaaaccaattaagaaaaagaaagaggatgatgttggaatagagaggggtaacatagagacaacatctgaagatggtcaagtattttcaccaaaaaaaggacagaaaaagaaaagcattgaaaaaaaacgtaaaaaatccaaaggtgattctgatatttctgatgaagaagcagcccagcaaagtaagaagaaaagaggcccacggactccccctataacaactaaagaggaattggttgaaatgtgcaatggtaagaatggtattctagaggactcccagaaaaaagaagatacagcattcagtgactggtctgatgaggatgtccctgaccgtacagaggtgacagaagcagagcatactgccaccgccacgactcctggtagtaccccttctcctctatcttctcttcttcctcctccaccgcctgtggctactgccactgctacaactgtgcctgcaactcttgctgccactactgctgctgccgccacctctttcagcacatctgccatcactatttccacctctgccacccccaccaataccaccaataatacttttgccaatgaagactcacacagaaaatgccacagaacacgagtagaaaaagtagagacgcctcacgtgactatagaagatgcacagcatcgcaagcctatggatcaaaagaggagcagcagcctcgggagcaatcggagtaaccgtagtcatacgtctggtcgtcttcgctccccatccaatgattcagcccatcgaagtggagatgaccaaagtggtcgaaagagagtactgcacagtggctcaagagatagagaaaaaacaaaaagcctggaaatcacaggagagagaaaatctaggattgatcagttaaagcgtggagaacccagtcgaagtacttcttcagatcgccaggattcaagaagccatagttcaagaagaagttctccagagtcagatcgacaggtccattcaagatctgggtcatttgatagcagagacaggcttcaagaacgagatcgatatgaacacgacagagagcgcgagagagagaggagagatacgaggcagagagaatgggaccgagatgctgataaagattggccacgcaacagggatcgagatagattgcgagaacgagaacgagagagagaacgagacaaaaggagagacttggatagggaaagagagagactaatttctgattctgttgaaagggacagggacagagacagagacagaacttttgagagttctcaaatagagtctgtgaaacgctgtgaagcaaaactggaaggtgaacatgaaagggatctagaaagcacttcccgagactctctagccttggataaagagagaatggataaagatctgggatctgtgcagggatttgaagatacaaataaatccgagagaactgagagtctggaagcaggagatgacgagtccaagttagatgatgcacattcattaggctctggtgctggagaaggatacgagccaatcagtgatgacgaactagatgaaattctggcaggtgatgcagaaaagagggaggaccaacaggatgaggagaagatgccagatcccttagatgtgatagatgtggattggtctggtcttatgccaaagcatccaaaagaaccacgagagcctggggctgcactcttaaaattcacacctggagctgttatgctaagagttgggatttctaaaaagttggcaggttctgaactctttgccaaagtcaaagaaacatgtcagagacttttagaaaaacccaaagatgcagacaatctctttgaacatgaattgggggctctcaatatggctgcattactacgaaaagaagaaagagcaagtcttcttagtaatcttggcccatgttgtaaggcgttgtgcttcagacgggattctgcaattcgaaagcagcttgttaaaaatgagaagggcaccataaaacaagcttacacgagtgctccaatggtagacaatgaattacttcgattgagtcttcggttatttaagcggaagactacttgccatgctccaggacatgaaaagactgaagataataaactttcacagtccagtatccaacaggaactgtgtgtgtcttaagaccgaagttcaatatggtatttttggtactgtcttccttcagcagtgcatattcttttgcaaagttctttggtttgacaagcattagtgacaaaggcagaaaagatttatcagccatgctaaaagagtgaagaattttgatctttagagacactagttttggccaacttaagattttacgttaatttttacatagtatttgacactcatgcaaaataatgtgaaaacatctagatttagtagtttattctgcgccttttgttaaaactgaagattttggaaaatggttgtcactgctcttccagcctatgaatatttttgtgaaatggaaccatggatttatgtctggatcatccatacagaaccaacaattttattcaaaaacaatgtgttcatcaaagtaattgctcacattgtgcagtactatgttgtacagaccacgtgaaagggaatgctggtctagctggcgtggtatgtttataggcgaatttcagcagaaggaagccaaaatagttttttccttttgaaagttttttaaaaattatttcatgggtcttttttttaattaatatgtgtgcattgttacaatgtatgttggatgtcttttgaccctaaatgctttttttgttatcagagattgtgtactatttttatttttaataaatgtatcttccctttccttgttttagatttactttgctcttcgttaatcttattcctgatgatctagaacattagtcatcaacattacatgtttcatgcttcagatattttactgcttgtgtccttattgttggacagctttaaacagagttgatgtacttcaaatatagctcattgatacttaaggcatcttcttggaatgtggcttttgaagaaaaaaattactcaaagcaaatcaagagttaacaaacctaacgtaacctgaggtttaatattctactatcatattttttagagctataacttttgattatattaaactgcctccagctgtactatgtaaaacagatttacttttaaaaattacagtatacctgctttgttctatatgtatatgtttaactcatgaagtggactcttagaaggatttgaaatggactctgggcacagaaattgtgagcagacagtagtagtgataataataaaagaaggcaatcaaaatttaattttatcatgccctctcacaggtttgtgttataattgtaagcccatattacttgtgttagtagttttgtctctataggtaacataatgacagtggtgtaaagtttctgttcaagaaacatatgttgtaaagttactttatacaagatacctgccaaaggaaatggtcttactttcaaatgactttgaaagcatgtataattgcaaacagagcaggagaagactttaatcagaatttccttgtgtccttttcctttactaagtgttttgaataaagaaaaaaaaaatgtatgacctcagagaatgaatacccttcaggaagccacttcctgattttagtgggataatatggttctctgtagcacaaagatttaaagtcctagaatttctaatcctagttctcagaattgtagaatatgacaaaaataatggtttccccatttgtccactgacttcagggatatttcacaagttatttatttatagaatgaaaactatgtagttaaatctgtcattcagttaaacctgtgtctttcagtttgaaatcttttgttatgtatgttgcaaaagaaaatttagaactattcctttgttcactcagtcacagcattcagagctttatgtttccagtggaaatgtactgttcagtctcaatttcttttaattcaaccattctcagtattagtaacatatacctataaaatttttctaaagcaaaatttttgattgaatttctcataaaagctcttggaccataattaaagtctcagttaaactggtattcccgaaaaacaatcttccagtctataaattgtttgctagtacaattaaaaggtcatctatctcataactgacggctcaggtctgtccagttgccataattgcacaactggattccagctgctggtaataaggaattgtgtagatagataaagggcaagagtatgtctgcaatccaaaataaatgagagttaacacataattagccttttgattattttggcagctatcctcaccatttagtaaagggtatactaacaatacccaactttatttaacaaagttttgtaagcatacctaagtagtaacttgatatgctgaaaaatctgacctgtcacttcgcttcactctgaccagtaattgcagattgtcgtcaccatcctagcctatgactacattaggattttatgacttattaacttgaaaatctgttctgtaagtggcattggtagaatctcccactttgctcctcactgtccaattgtgtaaagattaaggtacatactattgttggtgatgcttttacacctcaacttgctattttaaaaggttatatgaacccctcccacttttaaggatattcccttttactgattttcctagctaaaattatatagccatctttctaaatattgtatttaaatctgatctaggacttgccttattttatcatttttctttaataatctccaataaactttctttattcattaa

SEQ ID NO: 297746 - DNA, 7743 bp, Homo sapiens
cagaggaacagggcaaacctctgacttccggcggcattttgaggcggtcctcctagcggcctgtagtacaaaatgtcaaaaattagaaggaaggtcacagtggaaaataccaagactatatctgatagcacatcccgaagacccagtgtatttgagaggcttggacccagcactggcagtacagcagagacacagtgccgtaactggctgaagactggcaactgcctctatggaaacacatgtagattcgtacatggcccttcacctcgtggtaaaggttatagcagcaattatagaaggtcaccagaaagacctacaggggatcttagagaaagaatgaagaacaagcgccaagacgtggacactgagccccagaaacgaaatacagaggagtcatcctcacctgttaggaaagaatcttcaagagggagacatagggaaaaggaagacataaaaatcactaaggaaagaactccagaaagtgaagaagaaaatgtagaatgggaaactaatagagatgattctgacaatggagatattaattatgattatgttcatgaattgtcattggaaatgaagcgtcagaagatacagagggaattaatgaagctggaacaagaaaacatggagaagagagaagaaattatcattaaaaaggaggtttcaccagaagtggttagatcaaaattgtccccgtcaccttctctaagaaagtctagcaaatctccgaagcgaaaatcaagcccgaagtcgtcttcagctagcaagaaagataggaagacatctgcagtatcttctcccctgttggaccagcagagaaattcaaaaaccaaccaaagtaaaaagaaaggaccacgtactcctagtccaccccctcctataccagaagatatcgctctggggaaaaaatacaaagaaaaatataaagtaaaagacaggatagaagaaaaaacaagagatggaaaggacagaggacgagattttgaacgacaaagagaaaagagagacaagccaaggtctacttccccagcaggacagcatcattctcctatatcttctagacatcactcatcttcctcacaatcaggatcatctattcaaagacattctccttctcctcgtcgaaaaagaactccttcaccatcttatcagcggacactaactccacctttacgacgctctgcctctccttatccttcacattctttgtcgtctccccagagaaagcagagtcctccaagacatcgctctccaatgcgagagaaagggagacatgatcatgaacgaacttcacagtctcatgatcgacgccacgaaaggagggaagatactaggggcaaacgagacagagaaaaggactcaagagaagaacgagaatatgaacaggatcagagctcttctagagaccacagagatgacagagaacctcgagatggtcgggatcggagagatgccagagatactagggaccgaagggaactaagagactccagagacatgcgggactcaagggagatgagagattatagcagagataccaaagagagccgtgatcccagagattctcggtccactcgtgatgcccatgactacagggaccgtgaaggtcgagatactcatcgaaaggaggatacatatccagaagaatcccggagttatggccgaaaccatttgagagaagaaagttctcgtacggaaataaggaatgagtccagaaatgagtctcgaagtgaaattagaaatgaccgaatgggccgaagtagggggagggttcctgagttacctgaaaagggaagtcgaggctcaagaggttctcaaattgatagtcacagtagtaatagcaactatcatgacagctgggaaactcgaagtagctatcctgaaagagatagatatcctgaaagagacaacagagatcaagcaagggattcttcctttgagagaagacatggagagcgagaccgtcgtgacaacagagagagagatcaaagaccaagctcaccaattcgacatcagggaaggaatgacgagcttgagcgtgatgaaagaagagaggaacgaagagtagacagagtggatgataggagagatgaaagggctagagagagagatcgggaacgagaacgagacagggagcgggagagagagagggaacgtgaacgggatcgggaaagagaaaaagagagagaactagaaagagagcgtgctagggaacgggagagagaaagagaaaaagagagagatcgtgaaagggatagagaccgagaccacgatcgagagcgggaaagagagagggaacgagacagggaaaaagaacgggaacgagaaagagaagagagagagagggagagagagcgagaacgggagagagagcgagagcgagaacgggaacgagaaagagcgagagaaagggataaagaacgagaacgccaaagggattgggaagacaaagacaaaggacgagatgaccgcagagaaaagcgagaagagatccgagaagataggaatccaagagatggacatgatgaaagaaaatcaaagaagcgctatagaaatgaagggagtcccagccctagacagtccccgaagcgccggcgtgaacattctccggacagtgatgcctacaacagtggagatgataaaaatgaaaaacacagactcttgagccaagttgtacgacctcaagaatctcgttctcttagtccctcgcacctcacagaagacagacagggtagatggaaagaggaggatcgtaaaccagaaaggaaagagagttcaaggcgctacgaagaacaggaactcaaggagaaagtttcttctgtagataaacagagagaacagacagaaatcctggaaagctcaagaatgcgtgcacaggacattataggacaccaccagtctgaagatcgagagacatctgatcgagctcatgatgaaaacaagaagaaagcaaaaattcaaaagaaaccaattaagaaaaagaaagaggatgatgttggaatagagaggggtaacatagagacaacatctgaagatggtcaagtattttcaccaaaaaaaggacagaaaaagaaaagcattgaaaaaaaacgtaaaaaatccaaaggtgattctgatatttctgatgaagaagcagcccagcaaagtaagaagaaaagaggcccacggactccccctataacaactaaagaggaattggttgaaatgtgcaatggtaagaatggtattctagaggactcccagaaaaaagaagatacagcattcagtgactggtctgatgaggatgtccctgaccgtacagaggtgacagaagcagagcatactgccaccgccacgactcctggtagtaccccttctcctctatcttctcttcttcctcctccaccgcctgtggctactgccactgctacaactgtgcctgcaactcttgctgccactactgctgctgccgccacctctttcagcacatctgccatcactatttccacctctgccacccccaccaataccaccaataatacttttgccaatgaagactcacacagaaaatgccacagaacacgagtagaaaaagtagagacgcctcacgtgactatagaagatgcacagcatcgcaagcctatggatcaaaagaggagcagcagcctcgggagcaatcggagtaaccgtagtcatacgtctggtcgtcttcgctccccatccaatgattcagcccatcgaagtggagatgaccaaagtggtcgaaagagagtactgcacagtggctcaagagatagagaaaaaacaaaaagcctggaaatcacaggagagagaaaatctaggattgatcagttaaagcgtggagaacccagtcgaagtacttcttcagatcgccaggattcaagaagccatagttcaagaagaagttctccagagtcagatcgacaggtccattcaagatctgggtcatttgatagcagagacaggcttcaagaacgagatcgatatgaacacgacagagagcgcgagagagagaggagagatacgaggcagagagaatgggaccgagatgctgataaagattggccacgcaacagggatcgagatagattgcgagaacgagaacgagagagagaacgagacaaaaggagagacttggatagggaaagagagagactaatttctgattctgttgaaagggacagggacagagacagagacagaacttttgagagttctcaaatagagtctgtgaaacgctgtgaagcaaaactggaaggtgaacatgaaagggatctagaaagcacttcccgagactctctagccttggataaagagagaatggataaagatctgggatctgtgcagggatttgaagatacaaataaatccgagagaactgagagtctggaagcaggagatgacgagtccaagttagatgatgcacattcattaggctctggtgctggagaaggatacgagccaatcagtgatgacgaactagatgaaattctggcaggtgatgcagaaaagagggaggaccaacaggatgaggagaagatgccagatcccttagatgtgatagatgtggattggtctggtcttatgccaaagcatccaaaagaaccacgagagcctggggctgcactcttaaaattcacacctggagctgttatgctaagagttgggatttctaaaaagttggcaggttctgaactctttgccaaagtcaaagaaacatgtcagagacttttagaaaaacccaaagatgcagacaatctctttgaacatgaattgggggctctcaatatggctgcattactacgaaaagaagaaagagcaagtcttcttagtaatcttggcccatgttgtaaggcgttgtgcttcagacgggattctgcaattcgaaagcagcttgttaaaaatgagaagggcaccataaaacaagcttacacgagtgctccaatggtagacaatgaattacttcgattgagtcttcggttatttaagcggaagactacttgccatgctccaggacatgaaaagactgaagataataaactttcacagtccagtatccaacaggaactgtgtgtgtcttaagaccgaagttcaatatggtatttttggtactgtcttccttcagcagtgcatattcttttgcaaagttctttggtttgacaagcattagtgacaaaggcagaaaagatttatcagccatgctaaaagagtgaagaattttgatctttagagacactagttttggccaacttaagattttacgttaatttttacatagtatttgacactcatgcaaaataatgtgaaaacatctagatttagtagtttattctgcgccttttgttaaaactgaagattttggaaaatggttgtcactgctcttccagcctatgaatatttttgtgaaatggaaccatggatttatgtctggatcatccatacagaaccaacaattttattcaaaaacaatgtgttcatcaaagtaattgctcacattgtgcagtactatgttgtacagaccacgtgaaagggaatgctggtctagctggcgtggtatgtttataggcgaatttcagcagaaggaagccaaaatagttttttccttttgaaagttttttaaaaattatttcatgggtcttttttttaattaatatgtgtgcattgttacaatgtatgttggatgtcttttgaccctaaatgctttttttgttatcagagattgtgtactatttttatttttaataaatgtatcttccctttccttgttttagatttactttgctcttcgttaatcttattcctgatgatctagaacattagtcatcaacattacatgtttcatgcttcagatattttactgcttgtgtccttattgttggacagctttaaacagagttgatgtacttcaaatatagctcattgatacttaaggcatcttcttggaatgtggcttttgaagaaaaaaattactcaaagcaaatcaagagttaacaaacctaacgtaacctgaggtttaatattctactatcatattttttagagctataacttttgattatattaaactgcctccagctgtactatgtaaaacagatttacttttaaaaattacagtatacctgctttgttctatatgtatatgtttaactcatgaagtggactcttagaaggatttgaaatggactctgggcacagaaattgtgagcagacagtagtagtgataataataaaagaaggcaatcaaaatttaattttatcatgccctctcacaggtttgtgttataattgtaagcccatattacttgtgttagtagttttgtctctataggtaacataatgacagtggtgtaaagtttctgttcaagaaacatatgttgtaaagttactttatacaagatacctgccaaaggaaatggtcttactttcaaatgactttgaaagcatgtataattgcaaacagagcaggagaagactttaatcagaatttccttgtgtccttttcctttactaagtgttttgaataaagaaaaaaaaaatgtatgacctcagagaatgaatacccttcaggaagccacttcctgattttagtgggataatatggttctctgtagcacaaagatttaaagtcctagaatttctaatcctagttctcagaattgtagaatatgacaaaaataatggtttccccatttgtccactgacttcagggatatttcacaagttatttatttatagaatgaaaactatgtagttaaatctgtcattcagttaaacctgtgtctttcagtttgaaatcttttgttatgtatgttgcaaaagaaaatttagaactattcctttgttcactcagtcacagcattcagagctttatgtttccagtggaaatgtactgttcagtctcaatttcttttaattcaaccattctcagtattagtaacatatacctataaaatttttctaaagcaaaatttttgattgaatttctcataaaagctcttggaccataattaaagtctcagttaaactggtattcccgaaaaacaatcttccagtctataaattgtttgctagtacaattaaaaggtcatctatctcataactgacggctcaggtctgtccagttgccataattgcacaactggattccagctgctggtaataaggaattgtgtagatagataaagggcaagagtatgtctgcaatccaaaataaatgagagttaacacataattagccttttgattattttggcagctatcctcaccatttagtaaagggtatactaacaatacccaactttatttaacaaagttttgtaagcatacctaagtagtaacttgatatgctgaaaaatctgacctgtcacttcgcttcactctgaccagtaattgcagattgtcgtcaccatcctagcctatgactacattaggattttatgacttattaacttgaaaatctgttctgtaagtggcattggtagaatctcccactttgctcctcactgtccaattgtgtaaagattaaggtacatactattgttggtgatgcttttacacctcaacttgctattttaaaaggttatatgaacccctcccacttttaaggatattcccttttactgattttcctagctaaaattatatagccatctttctaaatattgtatttaaatctgatctaggacttgccttattttatcatttttctttaataatctccaataaactttctttattcattaa

SEQ ID NO: 297747 - DNA, 6039 bp, Homo sapiens
cagagaaagatcaaagattgatcagtgggaggggggaagggggttgacggggagcaggaaacatggtcgttagagggcaaataaaaattatctttaaaaaatttaaggtctaggggcgattgttacttggatattaagttaaaattaaatatgcttacttggtttgtaatttgttgccagtgtgaccctatacacagataaaatttaagatttaccatgctgtcttaccaataggttatctgtcaaattaatcactgacaaaacttgattttcattgtagatcaaagaccaagctcaccaattcgacatcagggaaggaatgacgagcttgagcgtgatgaaagaagagaggaacgaagagtagacagagtggatgataggagagatgaaagggctagagagagagatcgggaacgagaacgagacagggagcgggagagagagagggaacgtgaacgggatcgggaaagagaaaaagagagagaactagaaagagagcgtgctagggaacgggagagagaaagagaaaaagagagagatcgtgaaagggatagagaccgagaccacgatcgagagcgggaaagagagagggaacgagacagggaaaaagaacgggaacgagaaagagaagagagagagagggagagagagcgagaacgggagagagagcgagagcgagaacgggaacgagaaagagcgagagaaagggataaagaacgagaacgccaaagggattgggaagacaaagacaaaggacgagatgaccgcagagaaaagcgagaagagatccgagaagataggaatccaagagatggacatgatgaaagaaaatcaaagaagcgctatagaaatgaagggagtcccagccctagacagtccccgaagcgccggcgtgaacattctccggacagtgatgcctacaacagtggagatgataaaaatgaaaaacacagactcttgagccaagttgtacgacctcaagaatctcgttctcttagtccctcgcacctcacagaagacagacagggtagatggaaagaggaggatcgtaaaccagaaaggaaagagagttcaaggcgctacgaagaacaggaactcaaggagaaagtttcttctgtagataaacagagagaacagacagaaatcctggaaagctcaagaatgcgtgcacaggacattataggacaccaccagtctgaagatcgagagacatctgatcgagctcatgatgaaaacaagaagaaagcaaaaattcaaaagaaaccaattaagaaaaagaaagaggatgatgttggaatagagaggggtaacatagagacaacatctgaagatggtcaagtattttcaccaaaaaaaggacagaaaaagaaaagcattgaaaaaaaacgtaaaaaatccaaaggtgattctgatatttctgatgaagaagcagcccagcaaagtaagaagaaaagaggcccacggactccccctataacaactaaagaggaattggttgaaatgtgcaatggtaagaatggtattctagaggactcccagaaaaaagaagatacagcattcagtgactggtctgatgaggatgtccctgaccgtacagaggtgacagaagcagagcatactgccaccgccacgactcctggtagtaccccttctcctctatcttctcttcttcctcctccaccgcctgtggctactgccactgctacaactgtgcctgcaactcttgctgccactactgctgctgccgccacctctttcagcacatctgccatcactatttccacctctgccacccccaccaataccaccaataatacttttgccaatgaagactcacacagaaaatgccacagaacacgagtagaaaaagtagagacgcctcacgtgactatagaagatgcacagcatcgcaagcctatggatcaaaagaggagcagcagcctcgggagcaatcggagtaaccgtagtcatacgtctggtcgtcttcgctccccatccaatgattcagcccatcgaagtggagatgaccaaagtggtcgaaagagagtactgcacagtggctcaagagatagagaaaaaacaaaaagcctggaaatcacaggagagagaaaatctaggattgatcagttaaagcgtggagaacccagtcgaagtacttcttcagatcgccaggattcaagaagccatagttcaagaagaagttctccagagtcagatcgacaggtccattcaagatctgggtcatttgatagcagagacaggcttcaagaacgagatcgatatgaacacgacagagagcgcgagagagagaggagagatacgaggcagagagaatgggaccgagatgctgataaagattggccacgcaacagggatcgagatagattgcgagaacgagaacgagagagagaacgagacaaaaggagagacttggatagggaaagagagagactaatttctgattctgttgaaagggacagggacagagacagagacagaacttttgagagttctcaaatagagtctgtgaaacgctgtgaagcaaaactggaaggtgaacatgaaagggatctagaaagcacttcccgagactctctagccttggataaagagagaatggataaagatctgggatctgtgcagggatttgaagatacaaataaatccgagagaactgagagtctggaagcaggagatgacgagtccaagttagatgatgcacattcattaggctctggtgctggagaaggatacgagccaatcagtgatgacgaactagatgaaattctggcaggtgatgcagaaaagagggaggaccaacaggatgaggagaagatgccagatcccttagatgtgatagatgtggattggtctggtcttatgccaaagcatccaaaagaaccacgagagcctggggctgcactcttaaaattcacacctggagctgttatgctaagagttgggatttctaaaaagttggcaggttctgaactctttgccaaagtcaaagaaacatgtcagagacttttagaaaaacccaaagatgcagacaatctctttgaacatgaattgggggctctcaatatggctgcattactacgaaaagaagaaagagcaagtcttcttagtaatcttggcccatgttgtaaggcgttgtgcttcagacgggattctgcaattcgaaagcagcttgttaaaaatgagaagggcaccataaaacaagcttacacgagtgctccaatggtagacaatgaattacttcgattgagtcttcggttatttaagcggaagactacttgccatgctccaggacatgaaaagactgaagataataaactttcacagtccagtatccaacaggaactgtgtgtgtcttaagaccgaagttcaatatggtatttttggtactgtcttccttcagcagtgcatattcttttgcaaagttctttggtttgacaagcattagtgacaaaggcagaaaagatttatcagccatgctaaaagagtgaagaattttgatctttagagacactagttttggccaacttaagattttacgttaatttttacatagtatttgacactcatgcaaaataatgtgaaaacatctagatttagtagtttattctgcgccttttgttaaaactgaagattttggaaaatggttgtcactgctcttccagcctatgaatatttttgtgaaatggaaccatggatttatgtctggatcatccatacagaaccaacaattttattcaaaaacaatgtgttcatcaaagtaattgctcacattgtgcagtactatgttgtacagaccacgtgaaagggaatgctggtctagctggcgtggtatgtttataggcgaatttcagcagaaggaagccaaaatagttttttccttttgaaagttttttaaaaattatttcatgggtcttttttttaattaatatgtgtgcattgttacaatgtatgttggatgtcttttgaccctaaatgctttttttgttatcagagattgtgtactatttttatttttaataaatgtatcttccctttccttgttttagatttactttgctcttcgttaatcttattcctgatgatctagaacattagtcatcaacattacatgtttcatgcttcagatattttactgcttgtgtccttattgttggacagctttaaacagagttgatgtacttcaaatatagctcattgatacttaaggcatcttcttggaatgtggcttttgaagaaaaaaattactcaaagcaaatcaagagttaacaaacctaacgtaacctgaggtttaatattctactatcatattttttagagctataacttttgattatattaaactgcctccagctgtactatgtaaaacagatttacttttaaaaattacagtatacctgctttgttctatatgtatatgtttaactcatgaagtggactcttagaaggatttgaaatggactctgggcacagaaattgtgagcagacagtagtagtgataataataaaagaaggcaatcaaaatttaattttatcatgccctctcacaggtttgtgttataattgtaagcccatattacttgtgttagtagttttgtctctataggtaacataatgacagtggtgtaaagtttctgttcaagaaacatatgttgtaaagttactttatacaagatacctgccaaaggaaatggtcttactttcaaatgactttgaaagcatgtataattgcaaacagagcaggagaagactttaatcagaatttccttgtgtccttttcctttactaagtgttttgaataaagaaaaaaaaaatgtatgacctcagagaatgaatacccttcaggaagccacttcctgattttagtgggataatatggttctctgtagcacaaagatttaaagtcctagaatttctaatcctagttctcagaattgtagaatatgacaaaaataatggtttccccatttgtccactgacttcagggatatttcacaagttatttatttatagaatgaaaactatgtagttaaatctgtcattcagttaaacctgtgtctttcagtttgaaatcttttgttatgtatgttgcaaaagaaaatttagaactattcctttgttcactcagtcacagcattcagagctttatgtttccagtggaaatgtactgttcagtctcaatttcttttaattcaaccattctcagtattagtaacatatacctataaaatttttctaaagcaaaatttttgattgaatttctcataaaagctcttggaccataattaaagtctcagttaaactggtattcccgaaaaacaatcttccagtctataaattgtttgctagtacaattaaaaggtcatctatctcataactgacggctcaggtctgtccagttgccataattgcacaactggattccagctgctggtaataaggaattgtgtagatagataaagggcaagagtatgtctgcaatccaaaataaatgagagttaacacataattagccttttgattattttggcagctatcctcaccatttagtaaagggtatactaacaatacccaactttatttaacaaagttttgtaagcatacctaagtagtaacttgatatgctgaaaaatctgacctgtcacttcgcttcactctgaccagtaattgcagattgtcgtcaccatcctagcctatgactacattaggattttatgacttattaacttgaaaatctgttctgtaagtggcattggtagaatctcccactttgctcctcactgtccaattgtgtaaagattaaggtacatactattgttggtgatgcttttacacctcaacttgctattttaaaaggttatatgaacccctcccacttttaaggatattcccttttactgattttcctagctaaaattatatagccatctttctaaatattgtatttaaatctgatctaggacttgccttattttatcatttttctttaataatctccaataaactttctttattcattaa

SEQ ID NO: 297748 - DNA, 6051 bp, Homo sapiens
ctcccttccaccagcctcccttccaccagtctcccttccaccagtcgtccctgccaccagccgtcccgtcgtcccttccactagccgcccttccaccagcctcccttccaccagcctcccttctcccttccaccagtctcctttccaccagcgtatcatgacagctgggaaactcgaagtagctatcctgaaagagatagatatcctgaaagagacaacagagatcaagcaagggattcttcctttgagagaagacatggagagcgagaccgtcgtgacaacagagagagagatcaaagaccaagctcaccaattcgacatcagggaaggaatgacgagcttgagcgtgatgaaagaagagaggaacgaagagtagacagagtggatgataggagagatgaaagggctagagagagagatcgggaacgagaacgagacagggagcgggagagagagagggaacgtgaacgggatcgggaaagagaaaaagagagagaactagaaagagagcgtgctagggaacgggagagagaaagagaaaaagagagagatcgtgaaagggatagagaccgagaccacgatcgagagcgggaaagagagagggaacgagacagggaaaaagaacgggaacgagaaagagaagagagagagagggagagagagcgagaacgggagagagagcgagagcgagaacgggaacgagaaagagcgagagaaagggataaagaacgagaacgccaaagggattgggaagacaaagacaaaggacgagatgaccgcagagaaaagcgagaagagatccgagaagataggaatccaagagatggacatgatgaaagaaaatcaaagaagcgctatagaaatgaagggagtcccagccctagacagtccccgaagcgccggcgtgaacattctccggacagtgatgcctacaacagtggagatgataaaaatgaaaaacacagactcttgagccaagttgtacgacctcaagaatctcgttctcttagtccctcgcacctcacagaagacagacagggtagatggaaagaggaggatcgtaaaccagaaaggaaagagagttcaaggcgctacgaagaacaggaactcaaggagaaagtttcttctgtagataaacagagagaacagacagaaatcctggaaagctcaagaatgcgtgcacaggacattataggacaccaccagtctgaagatcgagagacatctgatcgagctcatgatgaaaacaagaagaaagcaaaaattcaaaagaaaccaattaagaaaaagaaagaggatgatgttggaatagagaggggtaacatagagacaacatctgaagatggtcaagtattttcaccaaaaaaaggacagaaaaagaaaagcattgaaaaaaaacgtaaaaaatccaaaggtgattctgatatttctgatgaagaagcagcccagcaaagtaagaagaaaagaggcccacggactccccctataacaactaaagaggaattggttgaaatgtgcaatggtaagaatggtattctagaggactcccagaaaaaagaagatacagcattcagtgactggtctgatgaggatgtccctgaccgtacagaggtgacagaagcagagcatactgccaccgccacgactcctggtagtaccccttctcctctatcttctcttcttcctcctccaccgcctgtggctactgccactgctacaactgtgcctgcaactcttgctgccactactgctgctgccgccacctctttcagcacatctgccatcactatttccacctctgccacccccaccaataccaccaataatacttttgccaatgaagactcacacagaaaatgccacagaacacgagtagaaaaagtagagacgcctcacgtgactatagaagatgcacagcatcgcaagcctatggatcaaaagaggagcagcagcctcgggagcaatcggagtaaccgtagtcatacgtctggtcgtcttcgctccccatccaatgattcagcccatcgaagtggagatgaccaaagtggtcgaaagagagtactgcacagtggctcaagagatagagaaaaaacaaaaagcctggaaatcacaggagagagaaaatctaggattgatcagttaaagcgtggagaacccagtcgaagtacttcttcagatcgccaggattcaagaagccatagttcaagaagaagttctccagagtcagatcgacaggtccattcaagatctgggtcatttgatagcagagacaggcttcaagaacgagatcgatatgaacacgacagagagcgcgagagagagaggagagatacgaggcagagagaatgggaccgagatgctgataaagattggccacgcaacagggatcgagatagattgcgagaacgagaacgagagagagaacgagacaaaaggagagacttggatagggaaagagagagactaatttctgattctgttgaaagggacagggacagagacagagacagaacttttgagagttctcaaatagagtctgtgaaacgctgtgaagcaaaactggaaggtgaacatgaaagggatctagaaagcacttcccgagactctctagccttggataaagagagaatggataaagatctgggatctgtgcagggatttgaagatacaaataaatccgagagaactgagagtctggaagcaggagatgacgagtccaagttagatgatgcacattcattaggctctggtgctggagaaggatacgagccaatcagtgatgacgaactagatgaaattctggcaggtgatgcagaaaagagggaggaccaacaggatgaggagaagatgccagatcccttagatgtgatagatgtggattggtctggtcttatgccaaagcatccaaaagaaccacgagagcctggggctgcactcttaaaattcacacctggagctgttatgctaagagttgggatttctaaaaagttggcaggttctgaactctttgccaaagtcaaagaaacatgtcagagacttttagaaaaacccaaagatgcagacaatctctttgaacatgaattgggggctctcaatatggctgcattactacgaaaagaagaaagagcaagtcttcttagtaatcttggcccatgttgtaaggcgttgtgcttcagacgggattctgcaattcgaaagcagcttgttaaaaatgagaagggcaccataaaacaagcttacacgagtgctccaatggtagacaatgaattacttcgattgagtcttcggttatttaagcggaagactacttgccatgctccaggacatgaaaagactgaagataataaactttcacagtccagtatccaacaggaactgtgtgtgtcttaagaccgaagttcaatatggtatttttggtactgtcttccttcagcagtgcatattcttttgcaaagttctttggtttgacaagcattagtgacaaaggcagaaaagatttatcagccatgctaaaagagtgaagaattttgatctttagagacactagttttggccaacttaagattttacgttaatttttacatagtatttgacactcatgcaaaataatgtgaaaacatctagatttagtagtttattctgcgccttttgttaaaactgaagattttggaaaatggttgtcactgctcttccagcctatgaatatttttgtgaaatggaaccatggatttatgtctggatcatccatacagaaccaacaattttattcaaaaacaatgtgttcatcaaagtaattgctcacattgtgcagtactatgttgtacagaccacgtgaaagggaatgctggtctagctggcgtggtatgtttataggcgaatttcagcagaaggaagccaaaatagttttttccttttgaaagttttttaaaaattatttcatgggtcttttttttaattaatatgtgtgcattgttacaatgtatgttggatgtcttttgaccctaaatgctttttttgttatcagagattgtgtactatttttatttttaataaatgtatcttccctttccttgttttagatttactttgctcttcgttaatcttattcctgatgatctagaacattagtcatcaacattacatgtttcatgcttcagatattttactgcttgtgtccttattgttggacagctttaaacagagttgatgtacttcaaatatagctcattgatacttaaggcatcttcttggaatgtggcttttgaagaaaaaaattactcaaagcaaatcaagagttaacaaacctaacgtaacctgaggtttaatattctactatcatattttttagagctataacttttgattatattaaactgcctccagctgtactatgtaaaacagatttacttttaaaaattacagtatacctgctttgttctatatgtatatgtttaactcatgaagtggactcttagaaggatttgaaatggactctgggcacagaaattgtgagcagacagtagtagtgataataataaaagaaggcaatcaaaatttaattttatcatgccctctcacaggtttgtgttataattgtaagcccatattacttgtgttagtagttttgtctctataggtaacataatgacagtggtgtaaagtttctgttcaagaaacatatgttgtaaagttactttatacaagatacctgccaaaggaaatggtcttactttcaaatgactttgaaagcatgtataattgcaaacagagcaggagaagactttaatcagaatttccttgtgtccttttcctttactaagtgttttgaataaagaaaaaaaaaatgtatgacctcagagaatgaatacccttcaggaagccacttcctgattttagtgggataatatggttctctgtagcacaaagatttaaagtcctagaatttctaatcctagttctcagaattgtagaatatgacaaaaataatggtttccccatttgtccactgacttcagggatatttcacaagttatttatttatagaatgaaaactatgtagttaaatctgtcattcagttaaacctgtgtctttcagtttgaaatcttttgttatgtatgttgcaaaagaaaatttagaactattcctttgttcactcagtcacagcattcagagctttatgtttccagtggaaatgtactgttcagtctcaatttcttttaattcaaccattctcagtattagtaacatatacctataaaatttttctaaagcaaaatttttgattgaatttctcataaaagctcttggaccataattaaagtctcagttaaactggtattcccgaaaaacaatcttccagtctataaattgtttgctagtacaattaaaaggtcatctatctcataactgacggctcaggtctgtccagttgccataattgcacaactggattccagctgctggtaataaggaattgtgtagatagataaagggcaagagtatgtctgcaatccaaaataaatgagagttaacacataattagccttttgattattttggcagctatcctcaccatttagtaaagggtatactaacaatacccaactttatttaacaaagttttgtaagcatacctaagtagtaacttgatatgctgaaaaatctgacctgtcacttcgcttcactctgaccagtaattgcagattgtcgtcaccatcctagcctatgactacattaggattttatgacttattaacttgaaaatctgttctgtaagtggcattggtagaatctcccactttgctcctcactgtccaattgtgtaaagattaaggtacatactattgttggtgatgcttttacacctcaacttgctattttaaaaggttatatgaacccctcccacttttaaggatattcccttttactgattttcctagctaaaattatatagccatctttctaaatattgtatttaaatctgatctaggacttgccttattttatcatttttctttaataatctccaataaactttctttattcattaa

SEQ ID NO: 297749 - DNA, 6706 bp, Homo sapiens
cagaggaacagggcaaacctctgacttccggcggcattttgaggcggtcctcctagcggcctggtagtgtttttgttgccttttcttaatctacaatctcttcgttatttttcttcctgcgacccagtttcgcttgaccctggagaggcggcgggcgggttggttctgcttctcagccatcccgggggctcctcgctagccaagagccggttcccgggagccgcgcgcgcatcgctttctcctcgtcgtcgtcctcctgggtccaggcgcggggacagagtcgcctcccccgctcctcggagcggcggcggcggtggtgcctccggactgcacttgcgaagggagcttggggaggaatagtacaaaatgtcaaaaattagaaggaaggtcacagtggaaaataccaagactatatctgatagcacatcccgaagacccagtgtatttgagaggcttggacccagcactggcagtacagcagagacacagtgccgtaactggctgaagactggcaactgcctctatggaaacacatgtagattcgtacatggcccttcacctcgtggtaaaggttatagcagcaattatagaaggtcaccagaaagacctacaggggatcttagagaaagaatgaagaacaagcgccaagacgtggacactgagccccagaaacgaaatacagaggagtcatcctcacctgttaggaaagaatcttcaagagggagacatagggaaaaggaagacataaaaatcactaaggaaagaactccagaaagtgaagaagaaaatgtagaatgggaaactaatagagatgattctgacaatggagatattaattatgattatgttcatgaattgtcattggaaatgaagcgtcagaagatacagagggaattaatgaagctggaacaagaaaacatggagaagagagaagaaattatcattaaaaaggaggtttcaccagaagtggttagatcaaaattgtccccgtcaccttctctaagaaagtctagcaaatctccgaagcgaaaatcaagcccgaagtcgtcttcagctagcaagaaagataggaagacatctgcagtatcttctcccctgttggaccagcagagaaattcaaaaaccaaccaaagtaaaaagaaaggaccacgtactcctagtccaccccctcctataccagaagatatcgctctggggaaaaaatacaaagaaaaatataaagtaaaagacaggatagaagaaaaaacaagagatggaaaggacagaggacgagattttgaacgacaaagagaaaagagagacaagccaaggtctacttccccagcaggacagcatcattctcctatatcttctagacatcactcatcttcctcacaatcaggatcatctattcaaagacattctccttctcctcgtcgaaaaagaactccttcaccatcttatcagcggacactaactccacctttacgacgctctgcctctccttatccttcacattctttgtcgtctccccagagaaagcagagtcctccaagacatcgctctccaatgcgagagaaagggagacatgatcatgaacgaacttcacagtctcatgatcgacgccacgaaaggagggaagatactaggggcaaacgagacagagaaaaggactcaagagaagaacgagaatatgaacaggatcagagctcttctagagaccacagagatgacagagaacctcgagatggtcgggatcggagagatgccagagatactagggaccgaagggaactaagagactccagagacatgcgggactcaagggagatgagagattatagcagagataccaaagagagccgtgatcccagagattctcggtccactcgtgatgcccatgactacagggaccgtgaaggtcgagatactcatcgaaaggaggatacatatccagaagaatcccggagttatggccgaaaccatttgagagaagaaagttctcgtacggaaataaggaatgagtccagaaatgagtctcgaagtgaaattagaaatgaccgaatgggccgaagtagggggagggttcctgagttacctgaaaagggaagtcgaggctcaagaggttctcaaattgatagtcacagtagtaatagcaactatcatgacagctgggaaactcgaagtagctatcctgaaagagatagatatcctgaaagagacaacagagatcaagcaagggattcttcctttgagagaagacatggagagcgagaccgtcgtgacaacagagagagagatcaaagaccaagctcaccaattcgacatcagggaaggaatgacgagcttgagcgtgatgaaagaagagaggaacgaagagtagacagagtggatgataggagagatgaaagggctagagagagagatcgggaacgagaacgagacagggagcgggagagagagagggaacgtgaacgggatcgggaaagagaaaaagagagagaactagaaagagagcgtgctagggaacgggagagagaaagagaaaaagagagagatcgtgaaagggatagagaccgagaccacgatcgagagcgggaaagagagagggaacgagacagggaaaaagaacgggaacgagaaagagaagagagagagagggagagagagcgagaacgggagagagagcgagagcgagaacgggaacgagaaagagcgagagaaagggataaagaacgagaacgccaaagggattgggaagacaaagacaaaggacgagatgaccgcagagaaaagcgagaagagatccgagaagataggaatccaagagatggacatgatgaaagaaaatcaaagaagcgctatagaaatgaagggagtcccagccctagacagtccccgaagcgccggcgtgaacattctccggacagtgatgcctacaacagtggagatgataaaaatgaaaaacacagactcttgagccaagttgtacgacctcaagaatctcgttctcttagtccctcgcacctcacagaagacagacagggtagatggaaagaggaggatcgtaaaccagaaaggaaagagagttcaaggcgctacgaagaacaggaactcaaggagaaagtttcttctgtagataaacagagagaacagacagaaatcctggaaagctcaagaatgcgtgcacaggacattataggacaccaccagtctgaagatcgagagacatctgatcgagctcatgatgaaaacaagaagaaagcaaaaattcaaaagaaaccaattaagaaaaagaaagaggatgatgttggaatagagaggggtaacatagagacaacatctgaagatggtcaagtattttcaccaaaaaaaggacagaaaaagaaaagcattgaaaaaaaacgtaaaaaatccaaaggtgattctgatatttctgatgaagaagcagcccagcaaagtaagaagaaaagaggcccacggactccccctataacaactaaagaggaattggttgaaatgtgcaatggtaagaatggtattctagaggactcccagaaaaaagaagatacagcattcagtgactggtctgatgaggatgtccctgaccgtacagaggtgacagaagcagagcatactgccaccgccacgactcctggtagtaccccttctcctctatcttctcttcttcctcctccaccgcctgtggctactgccactgctacaactgtgcctgcaactcttgctgccactactgctgctgccgccacctctttcagcacatctgccatcactatttccacctctgccacccccaccaataccaccaataatacttttgccaatgaagactcacacagaaaatgccacagaacacgagtagaaaaagtagagacgcctcacgtgactatagaagatgcacagcatcgcaagcctatggatcaaaagaggagcagcagcctcgggagcaatcggagtaaccgtagtcatacgtctggtcgtcttcgctccccatccaatgattcagcccatcgaagtggagatgaccaaagtggtcgaaagagagtactgcacagtggctcaagagatagagaaaaaacaaaaagcctggaaatcacaggagagagaaaatctaggattgatcagttaaagcgtggagaacccagtcgaagtacttcttcagatcgccaggattcaagaagccatagttcaagaagaagttctccagagtcagatcgacaggtccattcaagatctgggtcatttgatagcagagacaggcttcaagaacgagatcgatatgaacacgacagagagcgcgagagagagaggagagatacgaggcagagagaatgggaccgagatgctgataaagattggccacgcaacagggatcgagatagattgcgagaacgagaacgagagagagaacgagacaaaaggagagacttggatagggaaagagagagactaatttctgattctgttgaaagggacagggacagagacagagacagaacttttgagagttctcaaatagagtctgtgaaacgctgtgaagcaaaactggaaggtgaacatgaaagggatctagaaagcacttcccgagactctctagccttggataaagagagaatggataaagatctgggatctgtgcagggatttgaagatacaaataaatccgagagaactgagagtctggaagcaggagatgacgagtccaagttagatgatgcacattcattaggctctggtgctggagaaggatacgagccaatcagtgatgacgaactagatgaaattctggcaggtgatgcagaaaagagggaggaccaacaggatgaggagaagatgccagatcccttagatgtgatagatgtggattggtctggtcttatgccaaagcatccaaaagaaccacgagagcctggggctgcactcttaaaattcacacctggagctgttatgctaagagttgggatttctaaaaagttggcaggttctgaactctttgccaaagtcaaagaaacatgtcagagacttttagaaaaacccaaaggtagtttcattttactttaactatataatgtctgttaaccatttaagatgccatctgaaggggattctgatctgttcttatgtagcacttaacactgtgtagaaactattttttgagaaatcattttataatcattatttaaccctcatggtcaaagtttctctttaaaatttattttgagaagaagagttatcccacagaaaagttgggaaaagagtacaatgacctttttgtatgaaaattacttattaacaggccaggcgtggtgttgcatgtctgtagtcacagctactcagggaggttgaggcagcaggattgctggagcccaggaaattgaggctgcagtgagccatgattgagccaccacactccaacctaggtgacagagcaagaccctgtctcaaaaaaaaaaaaacaaattaaccaataagttctaatatcaaagtgctcagtggtttgcccttggctaaatgaagcagagccaggaaaaacagactacatatttttcatgtctaaagaaattgggtattttggcagccctttcccctagacatctacccaaatgcaggtgtgtaggttgagtctttaacaaagtgattaagagcttggtctgtaaggccggatgatctggatttcagtaggcacaccacttactggctattacttaatctgtgtgttagtgtcatcatctgtaagtcaggaataatcataccaccaacttcctatggtaattaggagcaaatgagttattacaggcaaaacacttagaacagttcctggcatatagtaatacccaataaatattaactgctactttgaaaatatcctatcacgctgatttttgacctcactgcagcaattttcagttattccagattatctagcttatggattctggtggtaggggttgtttggttttggttttcactgtctctgtctcatctagtacctaccttagtttattttgcaacttactaatactttattaatggggagggacgagtagatggtaaaaagaaggaaaaggaggtaaaaggtgaaaggaacaacattaattaacaattttacgtcatgtccctggacataaaagtttagttagtattaaatttttcactaatacaaaataaaaaaatattgttttatgagttttatgaattcatgcccttcctttactctattagcataagcagtaaatttttttattttaatatagcccaataaacctagagtatacatgtacaaaatacatataattgttaacgtgtattaaccgaaaaatgacccaagacttagttcttgccctactgtatctgccttgtttggttggttctgtgaccttaagcaaataactcctgtgagcctcaattttatttgtaaagtgatggaataaaacccctaaaatcttacccacctctaaagatatttgtttctgtgaccttttgctagtagcatttcaagttaaaatctggtttgattttgctacccatgaaatacagttcggcccttacttattgatgacttaacctaaacagtgaaaatatgcactgtaaagggtggggtgatgtggcttaacaatcagacttcttctatttttgctgctatggtggttgtattagagaactgatgtattatcttgaataaagactttgtcttgtttactgccct

SEQ ID NO: 297750 - DNA, 7999 bp, Homo sapiens
cagaggaacagggcaaacctctgacttccggcggcattttgaggcggtcctcctagcggcctggtagtgtttttgttgccttttcttaatctacaatctcttcgttatttttcttcctgcgacccagtttcgcttgaccctggagaggcggcgggcgggttggttctgcttctcagccatcccgggggctcctcgctagccaagagccggttcccgggagccgcgcgcgcatcgctttctcctcgtcgtcgtcctcctgggtccaggcgcggggacagagtcgcctcccccgctcctcggagcggcggcggcggtggtgcctccggactgcacttgcgaagggagcttggggaggaatagtacaaaatgtcaaaaattagaaggaaggtcacagtggaaaataccaagactatatctgatagcacatcccgaagacccagtgtatttgagaggcttggacccagcactggcagtacagcagagacacagtgccgtaactggctgaagactggcaactgcctctatggaaacacatgtagattcgtacatggcccttcacctcgtggtaaaggttatagcagcaattatagaaggtcaccagaaagacctacaggggatcttagagaaagaatgaagaacaagcgccaagacgtggacactgagccccagaaacgaaatacagaggagtcatcctcacctgttaggaaagaatcttcaagagggagacatagggaaaaggaagacataaaaatcactaaggaaagaactccagaaagtgaagaagaaaatgtagaatgggaaactaatagagatgattctgacaatggagatattaattatgattatgttcatgaattgtcattggaaatgaagcgtcagaagatacagagggaattaatgaagctggaacaagaaaacatggagaagagagaagaaattatcattaaaaaggaggtttcaccagaagtggttagatcaaaattgtccccgtcaccttctctaagaaagtctagcaaatctccgaagcgaaaatcaagcccgaagtcgtcttcagctagcaagaaagataggaagacatctgcagtatcttctcccctgttggaccagcagagaaattcaaaaaccaaccaaagtaaaaagaaaggaccacgtactcctagtccaccccctcctataccagaagatatcgctctggggaaaaaatacaaagaaaaatataaagtaaaagacaggatagaagaaaaaacaagagatggaaaggacagaggacgagattttgaacgacaaagagaaaagagagacaagccaaggtctacttccccagcaggacagcatcattctcctatatcttctagacatcactcatcttcctcacaatcaggatcatctattcaaagacattctccttctcctcgtcgaaaaagaactccttcaccatcttatcagcggacactaactccacctttacgacgctctgcctctccttatccttcacattctttgtcgtctccccagagaaagcagagtcctccaagacatcgctctccaatgcgagagaaagggagacatgatcatgaacgaacttcacagtctcatgatcgacgccacgaaaggagggaagatactaggggcaaacgagacagagaaaaggactcaagagaagaacgagaatatgaacaggatcagagctcttctagagaccacagagatgacagagaacctcgagatggtcgggatcggagagatgccagagatactagggaccgaagggaactaagagactccagagacatgcgggactcaagggagatgagagattatagcagagataccaaagagagccgtgatcccagagattctcggtccactcgtgatgcccatgactacagggaccgtgaaggtcgagatactcatcgaaaggaggatacatatccagaagaatcccggagttatggccgaaaccatttgagagaagaaagttctcgtacggaaataaggaatgagtccagaaatgagtctcgaagtgaaattagaaatgaccgaatgggccgaagtagggggagggttcctgagttacctgaaaagggaagtcgaggctcaagaggttctcaaattgatagtcacagtagtaatagcaactatcatgacagctgggaaactcgaagtagctatcctgaaagagatagatatcctgaaagagacaacagagatcaagcaagggattcttcctttgagagaagacatggagagcgagaccgtcgtgacaacagagagagagatcaaagaccaagctcaccaattcgacatcagggaaggaatgacgagcttgagcgtgatgaaagaagagaggaacgaagagtagacagagtggatgataggagagatgaaagggctagagagagagatcgggaacgagaacgagacagggagcgggagagagagagggaacgtgaacgggatcgggaaagagaaaaagagagagaactagaaagagagcgtgctagggaacgggagagagaaagagaaaaagagagagatcgtgaaagggatagagaccgagaccacgatcgagagcgggaaagagagagggaacgagacagggaaaaagaacgggaacgagaaagagaagagagagagagggagagagagcgagaacgggagagagagcgagagcgagaacgggaacgagaaagagcgagagaaagggataaagaacgagaacgccaaagggattgggaagacaaagacaaaggacgagatgaccgcagagaaaagcgagaagagatccgagaagataggaatccaagagatggacatgatgaaagaaaatcaaagaagcgctatagaaatgaagggagtcccagccctagacagtccccgaagcgccggcgtgaacattctccggacagtgatgcctacaacagtggagatgataaaaatgaaaaacacagactcttgagccaagttgtacgacctcaagaatctcgttctcttagtccctcgcacctcacagaagacagacagggtagatggaaagaggaggatcgtaaaccagaaaggaaagagagttcaaggcgctacgaagaacaggaactcaaggagaaagtttcttctgtagataaacagagagaacagacagaaatcctggaaagctcaagaatgcgtgcacaggacattataggacaccaccagtctgaagatcgagagacatctgatcgagctcatgatgaaaacaagaagaaagcaaaaattcaaaagaaaccaattaagaaaaagaaagaggatgatgttggaatagagaggggtaacatagagacaacatctgaagatggtcaagtattttcaccaaaaaaaggacagaaaaagaaaagcattgaaaaaaaacgtaaaaaatccaaaggtgattctgatatttctgatgaagaagcagcccagcaaagtaagaagaaaagaggcccacggactccccctataacaactaaagaggaattggttgaaatgtgcaatggtaagaatggtattctagaggactcccagaaaaaagaagatacagcattcagtgacagaagcagagcatactgccaccgccacgactcctggtagtaccccttctcctctatcttctcttcttcctcctccaccgcctgtggctactgccactgctacaactgtgcctgcaactcttgctgccactactgctgctgccgccacctctttcagcacatctgccatcactatttccacctctgccacccccaccaataccaccaataatacttttgccaatgaagactcacacagaaaatgccacagaacacgagtagaaaaagtagagacgcctcacgtgactatagaagatgcacagcatcgcaagcctatggatcaaaagaggagcagcagcctcgggagcaatcggagtaaccgtagtcatacgtctggtcgtcttcgctccccatccaatgattcagcccatcgaagtggagatgaccaaagtggtcgaaagagagtactgcacagtggctcaagagatagagaaaaaacaaaaagcctggaaatcacaggagagagaaaatctaggattgatcagttaaagcgtggagaacccagtcgaagtacttcttcagatcgccaggattcaagaagccatagttcaagaagaagttctccagagtcagatcgacaggtccattcaagatctgggtcatttgatagcagagacaggcttcaagaacgagatcgatatgaacacgacagagagcgcgagagagagaggagagatacgaggcagagagaatgggaccgagatgctgataaagattggccacgcaacagggatcgagatagattgcgagaacgagaacgagagagagaacgagacaaaaggagagacttggatagggaaagagagagactaatttctgattctgttgaaagggacagggacagagacagagacagaacttttgagagttctcaaatagagtctgtgaaacgctgtgaagcaaaactggaaggtgaacatgaaagggatctagaaagcacttcccgagactctctagccttggataaagagagaatggataaagatctgggatctgtgcagggatttgaagatacaaataaatccgagagaactgagagtctggaagcaggagatgacgagtccaagttagatgatgcacattcattaggctctggtgctggagaaggatacgagccaatcagtgatgacgaactagatgaaattctggcaggtgatgcagaaaagagggaggaccaacaggatgaggagaagatgccagatcccttagatgtgatagatgtggattggtctggtcttatgccaaagcatccaaaagaaccacgagagcctggggctgcactcttaaaattcacacctggagctgttatgctaagagttgggatttctaaaaagttggcaggttctgaactctttgccaaagtcaaagaaacatgtcagagacttttagaaaaacccaaagatgcagacaatctctttgaacatgaattgggggctctcaatatggctgcattactacgaaaagaagaaagagcaagtcttcttagtaatcttggcccatgttgtaaggcgttgtgcttcagacgggattctgcaattcgaaagcagcttgttaaaaatgagaagggcaccataaaacaagcttacacgagtgctccaatggtagacaatgaattacttcgattgagtcttcggttatttaagcggaagactacttgccatgctccaggacatgaaaagactgaagataataaactttcacagtccagtatccaacaggaactgtgtgtgtcttaagaccgaagttcaatatggtatttttggtactgtcttccttcagcagtgcatattcttttgcaaagttctttggtttgacaagcattagtgacaaaggcagaaaagatttatcagccatgctaaaagagtgaagaattttgatctttagagacactagttttggccaacttaagattttacgttaatttttacatagtatttgacactcatgcaaaataatgtgaaaacatctagatttagtagtttattctgcgccttttgttaaaactgaagattttggaaaatggttgtcactgctcttccagcctatgaatatttttgtgaaatggaaccatggatttatgtctggatcatccatacagaaccaacaattttattcaaaaacaatgtgttcatcaaagtaattgctcacattgtgcagtactatgttgtacagaccacgtgaaagggaatgctggtctagctggcgtggtatgtttataggcgaatttcagcagaaggaagccaaaatagttttttccttttgaaagttttttaaaaattatttcatgggtcttttttttaattaatatgtgtgcattgttacaatgtatgttggatgtcttttgaccctaaatgctttttttgttatcagagattgtgtactatttttatttttaataaatgtatcttccctttccttgttttagatttactttgctcttcgttaatcttattcctgatgatctagaacattagtcatcaacattacatgtttcatgcttcagatattttactgcttgtgtccttattgttggacagctttaaacagagttgatgtacttcaaatatagctcattgatacttaaggcatcttcttggaatgtggcttttgaagaaaaaaattactcaaagcaaatcaagagttaacaaacctaacgtaacctgaggtttaatattctactatcatattttttagagctataacttttgattatattaaactgcctccagctgtactatgtaaaacagatttacttttaaaaattacagtatacctgctttgttctatatgtatatgtttaactcatgaagtggactcttagaaggatttgaaatggactctgggcacagaaattgtgagcagacagtagtagtgataataataaaagaaggcaatcaaaatttaattttatcatgccctctcacaggtttgtgttataattgtaagcccatattacttgtgttagtagttttgtctctataggtaacataatgacagtggtgtaaagtttctgttcaagaaacatatgttgtaaagttactttatacaagatacctgccaaaggaaatggtcttactttcaaatgactttgaaagcatgtataattgcaaacagagcaggagaagactttaatcagaatttccttgtgtccttttcctttactaagtgttttgaataaagaaaaaaaaaatgtatgacctcagagaatgaatacccttcaggaagccacttcctgattttagtgggataatatggttctctgtagcacaaagatttaaagtcctagaatttctaatcctagttctcagaattgtagaatatgacaaaaataatggtttccccatttgtccactgacttcagggatatttcacaagttatttatttatagaatgaaaactatgtagttaaatctgtcattcagttaaacctgtgtctttcagtttgaaatcttttgttatgtatgttgcaaaagaaaatttagaactattcctttgttcactcagtcacagcattcagagctttatgtttccagtggaaatgtactgttcagtctcaatttcttttaattcaaccattctcagtattagtaacatatacctataaaatttttctaaagcaaaatttttgattgaatttctcataaaagctcttggaccataattaaagtctcagttaaactggtattcccgaaaaacaatcttccagtctataaattgtttgctagtacaattaaaaggtcatctatctcataactgacggctcaggtctgtccagttgccataattgcacaactggattccagctgctggtaataaggaattgtgtagatagataaagggcaagagtatgtctgcaatccaaaataaatgagagttaacacataattagccttttgattattttggcagctatcctcaccatttagtaaagggtatactaacaatacccaactttatttaacaaagttttgtaagcatacctaagtagtaacttgatatgctgaaaaatctgacctgtcacttcgcttcactctgaccagtaattgcagattgtcgtcaccatcctagcctatgactacattaggattttatgacttattaacttgaaaatctgttctgtaagtggcattggtagaatctcccactttgctcctcactgtccaattgtgtaaagattaaggtacatactattgttggtgatgcttttacacctcaacttgctattttaaaaggttatatgaacccctcccacttttaaggatattcccttttactgattttcctagctaaaattatatagccatctttctaaatattgtatttaaatctgatctaggacttgccttattttatcatttttctttaataatctccaataaactttctttattcattaa

SEQ ID NO: 297751 - DNA, 7368 bp, Homo sapiens
cagaggaacagggcaaacctctgacttccggcggcattttgaggcggtcctcctagcggcctggtagtgtttttgttgccttttcttaatctacaatctcttcgttatttttcttcctgcgacccagtttcgcttgaccctggagaggcggcgggcgggttggttctgcttctcagccatcccgggggctcctcgctagccaagagccggttcccgggagccgcgcgcgcatcgctttctcctcgtcgtcgtcctcctgggtccaggcgcggggacagagtcgcctcccccgctcctcggagcggcggcggcggtggtgcctccggactgcacttgcgaagggagcttggggaggaatagtacaaaatgtcaaaaattagaaggaaggtcacagtggaaaataccaagactatatctgatagcacatcccgaagacccagtgtatttgagaggcttggacccagcactggcagtacagcagagacacagtgccgtaactggctgaagactggcaactgcctctatggaaacacatgtagattcgtacatggcccttcacctcgtggtaaaggttatagcagcaattatagaaggtcaccagaaagacctacaggggatcttagagaaagaatgaagaacaagcgccaagacgtggacactgagccccagaaacgaaatacagaggagtcatcctcacctgttaggaaagaatcttcaagagggagacatagggaaaaggaagacataaaaatcactaaggaaagaactccagaaagtgaagaagaaaatgtagaatgggaaactaatagagatgattctgacaatggagatattaattatgattatgttcatgaattgtcattggaaatgaagcgtcagaagatacagagggaattaatgaagctggaacaagaaaacatggagaagagagaagaaattatcattaaaaaggaggtttcaccagaagtggttagatcaaaattgtccccgtcaccttctctaagaaagtctagcaaatctccgaagcgaaaatcaagcccgaagtcgtcttcagctagcaagaaagataggaagacatctgcagtatcttctcccctgttggaccagcagagaaattcaaaaaccaaccaaagtaaaaagaaaggaccacgtactcctagtccaccccctcctataccagaagatatcgctctggggaaaaaatacaaagaaaaatataaagtaaaagacaggatagaagaaaaaacaagagatggaaaggacagaggacgagattttgaacgacaaagagaaaagagagacaagccaaggtctacttccccagcaggacagcatcattctcctatatcttctagacatcactcatcttcctcacaatcaggatcatctattcaaagacattctccttctcctcgtcgaaaaagaactccttcaccatcttatcagcggacactaactccacctttacgacgctctgcctctccttatccttcacattctttgtcgtctccccagagaaagcagagtcctccaagacatcgctctccaatgcgagagaaagggagacatgatcatgaacgaacttcacagtctcatgatcgacgccacgaaaggagggaagatactaggggcaaacgagacagagaaaaggactcaagagaagaacgagaatatgaacaggatcagagctcttctagagaccacagagatgacagagaacctcgagatggtcgggatcggagagatgccagagatactagggaccgaagggaactaagagactccagagacatgcgggactcaagggagatgagagattatagcagagataccaaagagagccgtgatcccagagattctcggtccactcgtgatgcccatgactacagggaccgtgaaggtcgagatactcatcgaaaggaggatacatatccagaagaatcccggagttatggccgaaaccatttgagagaagaaagttctcgtacggaaataaggaatgagtccagaaatgagtctcgaagtgaaattagaaatgaccgaatgggccgaagtagggggagggttcctgagttacctgaaaagggaagtcgaggctcaagaggttctcaaattgatagtcacagtagtaatagcaactatcatgacagctgggaaactcgaagtagctatcctgaaagagatagatatcctgaaagagacaacagagatcaagcaagggattcttcctttgagagaagacatggagagcgagaccgtcgtgacaacagagagagagatcaaagaccaagctcaccaattcgacatcagggaaggaatgacgagcttgagcgtgatgaaagaagagaggaacgaagagtagacagagtggatgataggagagatgaaagggctagagagagagatcgggaacgagaacgagacagggagcgggagagagagagggaacgtgaacgggatcgggaaagagaaaacctggaaagctcaagaatgcgtgcacaggacattataggacaccaccagtctgaagatcgagagacatctgatcgagctcatgatgaaaacaagaagaaagcaaaaattcaaaagaaaccaattaagaaaaagaaagaggatgatgttggaatagagaggggtaacatagagacaacatctgaagatggtcaagtattttcaccaaaaaaaggacagaaaaagaaaagcattgaaaaaaaacgtaaaaaatccaaaggtgattctgatatttctgatgaagaagcagcccagcaaagtaagaagaaaagaggcccacggactccccctataacaactaaagaggaattggttgaaatgtgcaatggtaagaatggtattctagaggactcccagaaaaaagaagatacagcattcagtgactggtctgatgaggatgtccctgaccgtacagaggtgacagaagcagagcatactgccaccgccacgactcctggtagtaccccttctcctctatcttctcttcttcctcctccaccgcctgtggctactgccactgctacaactgtgcctgcaactcttgctgccactactgctgctgccgccacctctttcagcacatctgccatcactatttccacctctgccacccccaccaataccaccaataatacttttgccaatgaagactcacacagaaaatgccacagaacacgagtagaaaaagtagagacgcctcacgtgactatagaagatgcacagcatcgcaagcctatggatcaaaagaggagcagcagcctcgggagcaatcggagtaaccgtagtcatacgtctggtcgtcttcgctccccatccaatgattcagcccatcgaagtggagatgaccaaagtggtcgaaagagagtactgcacagtggctcaagagatagagaaaaaacaaaaagcctggaaatcacaggagagagaaaatctaggattgatcagttaaagcgtggagaacccagtcgaagtacttcttcagatcgccaggattcaagaagccatagttcaagaagaagttctccagagtcagatcgacaggtccattcaagatctgggtcatttgatagcagagacaggcttcaagaacgagatcgatatgaacacgacagagagcgcgagagagagaggagagatacgaggcagagagaatgggaccgagatgctgataaagattggccacgcaacagggatcgagatagattgcgagaacgagaacgagagagagaacgagacaaaaggagagacttggatagggaaagagagagactaatttctgattctgttgaaagggacagggacagagacagagacagaacttttgagagttctcaaatagagtctgtgaaacgctgtgaagcaaaactggaaggtgaacatgaaagggatctagaaagcacttcccgagactctctagccttggataaagagagaatggataaagatctgggatctgtgcagggatttgaagatacaaataaatccgagagaactgagagtctggaagcaggagatgacgagtccaagttagatgatgcacattcattaggctctggtgctggagaaggatacgagccaatcagtgatgacgaactagatgaaattctggcaggtgatgcagaaaagagggaggaccaacaggatgaggagaagatgccagatcccttagatgtgatagatgtggattggtctggtcttatgccaaagcatccaaaagaaccacgagagcctggggctgcactcttaaaattcacacctggagctgttatgctaagagttgggatttctaaaaagttggcaggttctgaactctttgccaaagtcaaagaaacatgtcagagacttttagaaaaacccaaagatgcagacaatctctttgaacatgaattgggggctctcaatatggctgcattactacgaaaagaagaaagagcaagtcttcttagtaatcttggcccatgttgtaaggcgttgtgcttcagacgggattctgcaattcgaaagcagcttgttaaaaatgagaagggcaccataaaacaagcttacacgagtgctccaatggtagacaatgaattacttcgattgagtcttcggttatttaagcggaagactacttgccatgctccaggacatgaaaagactgaagataataaactttcacagtccagtatccaacaggaactgtgtgtgtcttaagaccgaagttcaatatggtatttttggtactgtcttccttcagcagtgcatattcttttgcaaagttctttggtttgacaagcattagtgacaaaggcagaaaagatttatcagccatgctaaaagagtgaagaattttgatctttagagacactagttttggccaacttaagattttacgttaatttttacatagtatttgacactcatgcaaaataatgtgaaaacatctagatttagtagtttattctgcgccttttgttaaaactgaagattttggaaaatggttgtcactgctcttccagcctatgaatatttttgtgaaatggaaccatggatttatgtctggatcatccatacagaaccaacaattttattcaaaaacaatgtgttcatcaaagtaattgctcacattgtgcagtactatgttgtacagaccacgtgaaagggaatgctggtctagctggcgtggtatgtttataggcgaatttcagcagaaggaagccaaaatagttttttccttttgaaagttttttaaaaattatttcatgggtcttttttttaattaatatgtgtgcattgttacaatgtatgttggatgtcttttgaccctaaatgctttttttgttatcagagattgtgtactatttttatttttaataaatgtatcttccctttccttgttttagatttactttgctcttcgttaatcttattcctgatgatctagaacattagtcatcaacattacatgtttcatgcttcagatattttactgcttgtgtccttattgttggacagctttaaacagagttgatgtacttcaaatatagctcattgatacttaaggcatcttcttggaatgtggcttttgaagaaaaaaattactcaaagcaaatcaagagttaacaaacctaacgtaacctgaggtttaatattctactatcatattttttagagctataacttttgattatattaaactgcctccagctgtactatgtaaaacagatttacttttaaaaattacagtatacctgctttgttctatatgtatatgtttaactcatgaagtggactcttagaaggatttgaaatggactctgggcacagaaattgtgagcagacagtagtagtgataataataaaagaaggcaatcaaaatttaattttatcatgccctctcacaggtttgtgttataattgtaagcccatattacttgtgttagtagttttgtctctataggtaacataatgacagtggtgtaaagtttctgttcaagaaacatatgttgtaaagttactttatacaagatacctgccaaaggaaatggtcttactttcaaatgactttgaaagcatgtataattgcaaacagagcaggagaagactttaatcagaatttccttgtgtccttttcctttactaagtgttttgaataaagaaaaaaaaaatgtatgacctcagagaatgaatacccttcaggaagccacttcctgattttagtgggataatatggttctctgtagcacaaagatttaaagtcctagaatttctaatcctagttctcagaattgtagaatatgacaaaaataatggtttccccatttgtccactgacttcagggatatttcacaagttatttatttatagaatgaaaactatgtagttaaatctgtcattcagttaaacctgtgtctttcagtttgaaatcttttgttatgtatgttgcaaaagaaaatttagaactattcctttgttcactcagtcacagcattcagagctttatgtttccagtggaaatgtactgttcagtctcaatttcttttaattcaaccattctcagtattagtaacatatacctataaaatttttctaaagcaaaatttttgattgaatttctcataaaagctcttggaccataattaaagtctcagttaaactggtattcccgaaaaacaatcttccagtctataaattgtttgctagtacaattaaaaggtcatctatctcataactgacggctcaggtctgtccagttgccataattgcacaactggattccagctgctggtaataaggaattgtgtagatagataaagggcaagagtatgtctgcaatccaaaataaatgagagttaacacataattagccttttgattattttggcagctatcctcaccatttagtaaagggtatactaacaatacccaactttatttaacaaagttttgtaagcatacctaagtagtaacttgatatgctgaaaaatctgacctgtcacttcgcttcactctgaccagtaattgcagattgtcgtcaccatcctagcctatgactacattaggattttatgacttattaacttgaaaatctgttctgtaagtggcattggtagaatctcccactttgctcctcactgtccaattgtgtaaagattaaggtacatactattgttggtgatgcttttacacctcaacttgctattttaaaaggttatatgaacccctcccacttttaaggatattcccttttactgattttcctagctaaaattatatagccatctttctaaatattgtatttaaatctgatctaggacttgccttattttatcatttttctttaataatctccaataaactttctttattcattaa

SEQ ID NO: 297752 - DNA, 6183 bp, Homo sapiens
cagaggaacagggcaaacctctgacttccggcggcattttgaggcggtcctcctagcggcctggtagtgtttttgttgccttttcttaatctacaatctcttcgttatttttcttcctgcgacccagtttcgcttgaccctggagaggcggcgggcgggttggttctgcttctcagccatcccgggggctcctcgctagccaagagccggttcccgggagccgcgcgcgcatcgctttctcctcgtcgtcgtcctcctgggtccaggcgcggggacagagtcgcctcccccgctcctcggagcggcggcggcggtggtgcctccggactgcacttgcgaagggagcttggggaggaatagtacaaaatgtcaaaaattagaaggaaggtcacagtggaaaataccaagactatatctgatagcacatcccgaagacccagtgtatttgagaggcttggacccagcactggcagtacagcagagacacagtgccgtaactggctgaagactggcaactgcctctatggaaacacatgtagattcgtacatggcccttcacctcgtggtaaaggttatagcagcaattatagaaggtcaccagaaagacctacaggggatcttagagaaagaatgaagaacaagcgccaagacgtggacactgagccccagaaacgaaatacagaggagtcatcctcacctgttaggaaagaatcttcaagagggagacatagggaaaaggaagacataaaaatcactaaggaaagaactccagaaagtgaagaagaaaatgtagaatgggaaactaatagagatgattctgacaatggagatattaattatgattatgttcatgaattgtcattggaaatgaagcgtcagaagatacagagggaattaatgaagctggaacaagaaaacatggagaagagagaagaaattatcattaaaaaggaggtttcaccagaagtggttagatcaaaattgtccccgtcaccttctctaagaaagtctagcaaatctccgaagcgaaaatcaagcccgaagtcgtcttcagctagcaagaaagataggaagacatctgcagtatcttctcccctgttggaccagcagagaaattcaaaaaccaaccaaagtaaaaagaaaggaccacgtactcctagtccaccccctcctataccagaagatatcgctctggggaaaaaatacaaagaaaaatataaagtaaaagacaggatagaagaaaaaacaagagatggaaaggacagaggacgagattttgaacgacaaagagaaaagagagacaagccaaggtctacttccccagcaggacagcatcattctcctatatcttctagacatcactcatcttcctcacaatcaggatcatctattcaaagacattctccttctcctcgtcgaaaaagaactccttcaccatcttatcagcggacactaactccacctttacgacgctctgcctctccttatccttcacattctttgtcgtctccccagagaaagcagagtcctccaagacatcgctctccaatgcgagagaaagggagacatgatcatgaacgaacttcacagtctcatgatcgacgccacgaaaggagggaagatactaggggcaaacgagacagagaaaaggactcaagagaagaacgagaatatgaacaggatcagagctcttctagagaccacagagatgacagagaacctcgagatggtcgggatcggagagatgccagagatactagggaccgaagggaactaagagactccagagacatgcgggactcaagggagatgagagattatagcagagataccaaagagagccgtgatcccagagattctcggtccactcgtgatgcccatgactacagggaccgtgaaggtcgagatactcatcgaaaggaggatacatatccagaagaatcccggagttatggccgaaaccatttgagagaagaaagttctcgtacggaaataaggaatgagtccagaaatgagtctcgaagtgaaattagaaatgaccgaatgggccgaagtagggggagggttcctgagttacctgaaaagggaagtcgaggctcaagaggttctcaaattgatagtcacagtagtaatagcaactatcatgacagctgggaaactcgaagtagctatcctgaaagagatagatatcctgaaagagacaacagagatcaagcaagggattcttcctttgagagaagacatggagagcgagaccgtcgtgacaacagagagagagatcaaagaccaagctcaccaattcgacatcagggaaggaatgacgagcttgagcgtgatgaaagaagagaggaacgaagagtagacagagtccattcaagatctgggtcatttgatagcagagacaggcttcaagaacgagatcgatatgaacacgacagagagcgcgagagagagaggagagatacgaggcagagagaatgggaccgagatgctgataaagattggccacgcaacagggatcgagatagattgcgagaacgagaacgagagagagaacgagacaaaaggagagacttggatagggaaagagagagactaatttctgattctgttgaaagggacagggacagagacagagacagaacttttgagagttctcaaatagagtctgtgaaacgctgtgaagcaaaactggaaggtgaacatgaaagggatctagaaagcacttcccgagactctctagccttggataaagagagaatggataaagatctgggatctgtgcagggatttgaagatacaaataaatccgagagaactgagagtctggaagcaggagatgacgagtccaagttagatgatgcacattcattaggctctggtgctggagaaggatacgagccaatcagtgatgacgaactagatgaaattctggcaggtgatgcagaaaagagggaggaccaacaggatgaggagaagatgccagatcccttagatgtgatagatgtggattggtctggtcttatgccaaagcatccaaaagaaccacgagagcctggggctgcactcttaaaattcacacctggagctgttatgctaagagttgggatttctaaaaagttggcaggttctgaactctttgccaaagtcaaagaaacatgtcagagacttttagaaaaacccaaagatgcagacaatctctttgaacatgaattgggggctctcaatatggctgcattactacgaaaagaagaaagagcaagtcttcttagtaatcttggcccatgttgtaaggcgttgtgcttcagacgggattctgcaattcgaaagcagcttgttaaaaatgagaagggcaccataaaacaagcttacacgagtgctccaatggtagacaatgaattacttcgattgagtcttcggttatttaagcggaagactacttgccatgctccaggacatgaaaagactgaagataataaactttcacagtccagtatccaacaggaactgtgtgtgtcttaagaccgaagttcaatatggtatttttggtactgtcttccttcagcagtgcatattcttttgcaaagttctttggtttgacaagcattagtgacaaaggcagaaaagatttatcagccatgctaaaagagtgaagaattttgatctttagagacactagttttggccaacttaagattttacgttaatttttacatagtatttgacactcatgcaaaataatgtgaaaacatctagatttagtagtttattctgcgccttttgttaaaactgaagattttggaaaatggttgtcactgctcttccagcctatgaatatttttgtgaaatggaaccatggatttatgtctggatcatccatacagaaccaacaattttattcaaaaacaatgtgttcatcaaagtaattgctcacattgtgcagtactatgttgtacagaccacgtgaaagggaatgctggtctagctggcgtggtatgtttataggcgaatttcagcagaaggaagccaaaatagttttttccttttgaaagttttttaaaaattatttcatgggtcttttttttaattaatatgtgtgcattgttacaatgtatgttggatgtcttttgaccctaaatgctttttttgttatcagagattgtgtactatttttatttttaataaatgtatcttccctttccttgttttagatttactttgctcttcgttaatcttattcctgatgatctagaacattagtcatcaacattacatgtttcatgcttcagatattttactgcttgtgtccttattgttggacagctttaaacagagttgatgtacttcaaatatagctcattgatacttaaggcatcttcttggaatgtggcttttgaagaaaaaaattactcaaagcaaatcaagagttaacaaacctaacgtaacctgaggtttaatattctactatcatattttttagagctataacttttgattatattaaactgcctccagctgtactatgtaaaacagatttacttttaaaaattacagtatacctgctttgttctatatgtatatgtttaactcatgaagtggactcttagaaggatttgaaatggactctgggcacagaaattgtgagcagacagtagtagtgataataataaaagaaggcaatcaaaatttaattttatcatgccctctcacaggtttgtgttataattgtaagcccatattacttgtgttagtagttttgtctctataggtaacataatgacagtggtgtaaagtttctgttcaagaaacatatgttgtaaagttactttatacaagatacctgccaaaggaaatggtcttactttcaaatgactttgaaagcatgtataattgcaaacagagcaggagaagactttaatcagaatttccttgtgtccttttcctttactaagtgttttgaataaagaaaaaaaaaatgtatgacctcagagaatgaatacccttcaggaagccacttcctgattttagtgggataatatggttctctgtagcacaaagatttaaagtcctagaatttctaatcctagttctcagaattgtagaatatgacaaaaataatggtttccccatttgtccactgacttcagggatatttcacaagttatttatttatagaatgaaaactatgtagttaaatctgtcattcagttaaacctgtgtctttcagtttgaaatcttttgttatgtatgttgcaaaagaaaatttagaactattcctttgttcactcagtcacagcattcagagctttatgtttccagtggaaatgtactgttcagtctcaatttcttttaattcaaccattctcagtattagtaacatatacctataaaatttttctaaagcaaaatttttgattgaatttctcataaaagctcttggaccataattaaagtctcagttaaactggtattcccgaaaaacaatcttccagtctataaattgtttgctagtacaattaaaaggtcatctatctcataactgacggctcaggtctgtccagttgccataattgcacaactggattccagctgctggtaataaggaattgtgtagatagataaagggcaagagtatgtctgcaatccaaaataaatgagagttaacacataattagccttttgattattttggcagctatcctcaccatttagtaaagggtatactaacaatacccaactttatttaacaaagttttgtaagcatacctaagtagtaacttgatatgctgaaaaatctgacctgtcacttcgcttcactctgaccagtaattgcagattgtcgtcaccatcctagcctatgactacattaggattttatgacttattaacttgaaaatctgttctgtaagtggcattggtagaatctcccactttgctcctcactgtccaattgtgtaaagattaaggtacatactattgttggtgatgcttttacacctcaacttgctattttaaaaggttatatgaacccctcccacttttaaggatattcccttttactgattttcctagctaaaattatatagccatctttctaaatattgtatttaaatctgatctaggacttgccttattttatcatttttctttaataatctccaataaactttctttattcattaa

SEQ ID NO: 297753 - DNA, 6056 bp, Homo sapiens
cagaggaacagggcaaacctctgacttccggcggcattttgaggcggtcctcctagcggcctggtagtgtttttgttgccttttcttaatctacaatctcttcgttatttttcttcctgcgacccagtttcgcttgaccctggagaggcggcgggcgggttggttctgcttctcagccatcccgggggctcctcgctagccaagagccggttcccgggagccgcgcgcgcatcgctttctcctcgtcgtcgtcctcctgggtccaggcgcggggacagagtcgcctcccccgctcctcggagcggcggcggcggtggtgcctccggactgcacttgcgaagggagcttggggaggaatagtacaaaatgtcaaaaattagaaggaaggtcacagtggaaaataccaagactatatctgatagcacatcccgaagacccagtgtatttgagaggcttggacccagcactggcagtacagcagagacacagtgccgtaactggctgaagactggcaactgcctctatggaaacacatgtagattcgtacatggcccttcacctcgtggtaaaggttatagcagcaattatagaaggtcaccagaaagacctacaggggatcttagagaaagaatgaagaacaagcgccaagacgtggacactgagccccagaaacgaaatacagaggagtcatcctcacctgttaggaaagaatcttcaagagggagacatagggaaaaggaagacataaaaatcactaaggaaagaactccagaaagtgaagaagaaaatgtagaatgggaaactaatagagatgattctgacaatggagatattaattatgattatgttcatgaattgtcattggaaatgaagcgtcagaagatacagagggaattaatgaagctggaacaagaaaacatggagaagagagaagaaattatcattaaaaaggaggtttcaccagaagtggttagatcaaaattgtccccgtcaccttctctaagaaagtctagcaaatctccgaagcgaaaatcaagcccgaagtcgtcttcagctagcaagaaagataggaagacatctgcagtatcttctcccctgttggaccagcagagaaattcaaaaaccaaccaaagtaaaaagaaaggaccacgtactcctagtccaccccctcctataccagaagatatcgctctggggaaaaaatacaaagaaaaatataaagtaaaagacaggatagaagaaaaaacaagagatggaaaggacagaggacgagattttgaacgacaaagagaaaagagagacaagccaaggtctacttccccagcaggacagcatcattctcctatatcttctagacatcactcatcttcctcacaatcaggatcatctattcaaagacattctccttctcctcgtcgaaaaagaactccttcaccatcttatcagcggacactaactccacctttacgacgctctgcctctccttatccttcacattctttgtcgtctccccagagaaagcagagtcctccaagacatcgctctccaatgcgagagaaagggagacatgatcatgaacgaacttcacagtctcatgatcgacgccacgaaaggagggaagatactaggggcaaacgagacagagaaaaggactcaagagaagaacgagaatatgaacaggatcagagctcttctagagaccacagagatgacagagaacctcgagatggtcgggatcggagagatgccagagatactagggaccgaagggaactaagagactccagagacatgcgggactcaagggagatgagagattatagcagagataccaaagagagccgtgatcccagagattctcggtccactcgtgatgcccatgactacagggaccgtgaaggtcgagatactcatcgaaaggaggatacatatccagaagaatcccggagttatggccgaaaccatttgagagaagaaagttctcgtacggaaataaggaatgagtccagaaatgagtctcgaagtgaaattagaaatgaccgaatgggccgaagtagggggagggttcctgagttacctgaaaagggaagtcgaggctcaagaggttctcaaattgatagtcacagtagtaatagcaactatcatgacagctgggaaactcgaagtagctatcctgaaagagatagatatcctgaaagagacaacagagatcaagcaagggattcttcctttgagagaagacatggagagcgagaccgtcgtgacaacagagagagagatcaaagaccaagctcaccaattcgacatcagggaaggaatgacgagcttgagcgtgatgaaagaagagaggaacgaagagtagacagagtggatgataggagagatgaaagggctagagagagagatcgggaacgagaacgagacagggagcgggagagagagagggaacgtgaacgggatcgggaaagagaaaaagagagagaactagaaagagagcgtgctagggaacgggagagagaaagagaaaaagagagagatcgtgaaagggatagagaccgagaccacgatcgagagcgggaaagagagagggaacgagacagggaaaaagaacgggaacgagaaagagaagagagagagagggagagagagcgagaacgggagagagagcgagagcgagaacgggaacgagaaagagcgagagaaagggataaagaacgagaacgccaaagggattgggaagacaaagacaaaggacgagatgaccgcagagaaaagcgagaagagatccgagaagataggaatccaagagatggacatgatgaaagaaaatcaaagaagcgctatagaaatgaagggagtcccagccctagacagtccccgaagcgccggcgtgaacattctccggacagtgatgcctacaacagtggagatgataaaaatgaaaaacacagactcttgagccaagttgtacgacctcaagaatctcgttctcttagtccctcgcacctcacagaagacagacagggtagatggaaagaggaggatcgtaaaccagaaaggaaagagagttcaaggcgctacgaagaacaggaactcaaggagaaagtttcttctgtagataaacagagagaacagacagaaatcctggaaagctcaagaatgcgtgcacaggacattataggacaccaccagtctgaagatcgagagacatctgatcgagctcatgatgaaaacaagaagaaagcaaaaattcaaaagaaaccaattaagaaaaagaaagaggatgatgttggaatagagaggggtaacatagagacaacatctgaagatggtcaagtattttcaccaaaaaaaggacagaaaaagaaaagcattgaaaaaaaacgtaaaaaatccaaaggtgattctgatatttctgatgaagaagcagcccagcaaagtaagaagaaaagaggcccacggactccccctataacaactaaagaggaattggttgaaatgtgcaatggtaagaatggtattctagaggactcccagaaaaaagaagatacagcattcagtgactggtctgatgaggatgtccctgaccgtacagaggtgacagaagcagagcatactgccaccgccacgactcctggtagtaccccttctcctctatcttctcttcttcctcctccaccgcctgtggctactgccactgctacaactgtgcctgcaactcttgctgccactactgctgctgccgccacctctttcagcacatctgccatcactatttccacctctgccacccccaccaataccaccaataatacttttgccaatgaagactcacacagaaaatgccacagaacacgagtagaaaaagtagagacgcctcacgtgactatagaagatgcacagcatcgcaagcctatggatcaaaagaggagcagcagcctcgggagcaatcggagtaaccgtagtcatacgtctggtcgtcttcgctccccatccaatgattcagcccatcgaagtggagatgaccaaagtggtcgaaagagagtactgcacagtggctcaagagatagagaaaaaacaaaaagcctggaaatcacaggagagagaaaatctaggattgatcagttaaagcgtggagaacccagtcgaagtacttcttcagatcgccaggattcaagaagccatagttcaagaagaagttctccagagtcagatcgacaggtccattcaagatctgggtcatttgatagcagagacaggcttcaagaacgagatcgatatgaacacgacagagagcgcgagagagagaggagagatacgaggcagagagaatgggaccgagatgctgataaagattggccacgcaacagggatcgagatagattgcgagaacgagaacgagagagagaacgagacaaaaggagagacttggatagggaaagagagagactaatttctgattctgttgaaagggacagggacagagacagagacagaacttttgagagttctcaaatagagtctgtgaaacgctgtgaagcaaaactggaaggtgaacatgaaagggatctagaaagcacttcccgagactctctagccttggataaagagagaatggataaagatctgggatctgtgcagggatttgaagatacaaataaatccgagagaactgagagtctggaagcaggagatgacgagtccaagttagatgatgcacattcattaggctctggtgctggagaaggatacgagccaatcagtgatgacgaactagatgaaattctggcaggtgatgcagaaaagagggaggaccaacaggatgaggagaagatgccagatcccttagatgtgatagatgtggattggtctggtcttatgccaaagcatccaaaagaaccacgagagcctggggctgcactcttaaaattcacacctggagctgttatgctaagagttgggatttctaaaaagttggcaggttctgaactctttgccaaagtcaaagaaacatgtcagagacttttagaaaaacccaaagatgcagacaatctctttgaacatgaattgggggctctcaatatggctgcattactacgaaaagaagaaagagcaagtcttcttagtaatcttggcccatgttgtaaggcgttgtgcttcagacgggattctgcaattcgaaagcagcttgttaaaaatgagaagggcaccataaaacaagcttacacgagtgctccaatggtagacaatgaattacttcgattgagtcttcggttatttaagcggaagactacttgccatgctccaggacatgaaaagactgaagataataaactttcacagtccagtatccaacaggaactgtgtgtgtcttaagaccgaagttcaatatggtatttttggtactgtcttccttcagcagtgcatattcttttgcaaagttctttggtttgacaagcattagtgacaaaggcagaaaagatttatcagccatgctaaaagagtgaagaattttgatctttagagacactagttttggccaacttaagattttacgttaatttttacatagtatttgacactcatgcaaaataatgtgaaaacatctagatttagtagtttattctgcgccttttgttaaaactgaagattttggaaaatggttgtcactgctcttccagcctatgaatatttttgtgaaatggaaccatggatttatgtctggatcatccatacagaaccaacaattttattcaaaaacaatgtgttcatcaaagtaattgctcacattgtgcagtactatgttgtacagaccacgtgaaagggaatgctggtctagctggcgtggtatgtttataggcgaatttcagcagaaggaagccaaaatagttttttccttttgaaagttttttaaaaattatttcatgggtcttttttttaattaatatgtgtgcattgttacaatgtatgttggatgtcttttgaccctaaatgctttttttgttatcagagattgtgtactatttttatttttaataaatgtatcttccctttcc

SEQ ID NO: 297754 - DNA, 4884 bp, Homo sapiens
gcggccgctactactaaattcgcggccgcgtcccaccagtctgaagatcgagagacatctgatcgagctcatgatgaaaacaagaagaaagcaaaaattcaaaagaaaccaattaagaaaaagaaagaggatgatgttggaatagagaggggtaacatagagacaacatctgaagatggtcaagtattttcaccaaaaaaaggacagaaaaagaaaagcattgaaaaaaaacgtaaaaaatccaaaggtgattctgatatttctgatgaagaagcagcccagcaaagtaagaagaaaagaggcccacggactccccctataacaactaaagaggaattggttgaaatgtgcaatggtaagaatggtattctagaggactcccagaaaaaagaagatacagcattcagtgactggtctgatgaggatgtccctgaccgtacagaggtgacagaagcagagcatactgccaccgccacgactcctggtagtaccccttctcctctatcttctcttcttcctcctccaccgcctgtggctactgccactgctacaactgtgcctgcaactcttgctgccactactgctgctgccgccacctctttcagcacatctgccatcactatttccacctctgccacccccaccaataccaccaataatacttttgccaatgaagactcacacagaaaatgccacagaacacgagtagaaaaagtagagacgcctcacgtgactatagaagatgcacagcatcgcaagcctatggatcaaaagaggagcagcagcctcgggagcaatcggagtaaccgtagtcatacgtctggtcgtcttcgctccccatccaatgattcagcccatcgaagtggagatgaccaaagtggtcgaaagagagtactgcacagtggctcaagagatagagaaaaaacaaaaagcctggaaatcacaggagagagaaaatctaggattgatcagttaaagcgtggagaacccagtcgaagtacttcttcagatcgccaggattcaagaagccatagttcaagaagaagttctccagagtcagatcgacaggtccattcaagatctgggtcatttgatagcagagacaggcttcaagaacgagatcgatatgaacacgacagagagcgcgagagagagaggagagatacgaggcagagagaatgggaccgagatgctgataaagattggccacgcaacagggatcgagatagattgcgagaacgagaacgagagagagaacgagacaaaaggagagacttggatagggaaagagagagactaatttctgattctgttgaaagggacagggacagagacagagacagaacttttgagagttctcaaatagagtctgtgaaacgctgtgaagcaaaactggaaggtgaacatgaaagggatctagaaagcacttcccgagactctctagccttggataaagagagaatggataaagatctgggatctgtgcagggatttgaagatacaaataaatccgagagaactgagagtctggaagcaggagatgacgagtccaagttagatgatgcacattcattaggctctggtgctggagaaggatacgagccaatcagtgatgacgaactagatgaaattctggcaggtgatgcagaaaagagggaggaccaacaggatgaggagaagatgccagatcccttagatgtgatagatgtggattggtctggtcttatgccaaagcatccaaaagaaccacgagagcctggggctgcactcttaaaattcacacctggagctgttatgctaagagttgggatttctaaaaagttggcaggttctgaactctttgccaaagtcaaagaaacatgtcagagacttttagaaaaacccaaagatgcagacaatctctttgaacatgaattgggggctctcaatatggctgcattactacgaaaagaagaaagagcaagtcttcttagtaatcttggcccatgttgtaaggcgttgtgcttcagacgggattctgcaattcgaaagcagcttgttaaaaatgagaagggcaccataaaacaagcttacacgagtgctccaatggtagacaatgaattacttcgattgagtcttcggttatttaagcggaagactacttgccatgctccaggacatgaaaagactgaagataataaactttcacagtccagtatccaacaggaactgtgtgtgtcttaagaccgaagttcaatatggtatttttggtactgtcttccttcagcagtgcatattcttttgcaaagttctttggtttgacaagcattagtgacaaaggcagaaaagatttatcagccatgctaaaagagtgaagaattttgatctttagagacactagttttggccaacttaagattttacgttaatttttacatagtatttgacactcatgcaaaataatgtgaaaacatctagatttagtagtttattctgcgccttttgttaaaactgaagattttggaaaatggttgtcactgctcttccagcctatgaatatttttgtgaaatggaaccatggatttatgtctggatcatccatacagaaccaacaattttattcaaaaacaatgtgttcatcaaagtaattgctcacattgtgcagtactatgttgtacagaccacgtgaaagggaatgctggtctagctggcgtggtatgtttataggcgaatttcagcagaaggaagccaaaatagttttttccttttgaaagttttttaaaaattatttcatgggtcttttttttaattaatatgtgtgcattgttacaatgtatgttggatgtcttttgaccctaaatgctttttttgttatcagagattgtgtactatttttatttttaataaatgtatcttccctttccttgttttagatttactttgctcttcgttaatcttattcctgatgatctagaacattagtcatcaacattacatgtttcatgcttcagatattttactgcttgtgtccttattgttggacagctttaaacagagttgatgtacttcaaatatagctcattgatacttaaggcatcttcttggaatgtggcttttgaagaaaaaaattactcaaagcaaatcaagagttaacaaacctaacgtaacctgaggtttaatattctactatcatattttttagagctataacttttgattatattaaactgcctccagctgtactatgtaaaacagatttacttttaaaaattacagtatacctgctttgttctatatgtatatgtttaactcatgaagtggactcttagaaggatttgaaatggactctgggcacagaaattgtgagcagacagtagtagtgataataataaaagaaggcaatcaaaatttaattttatcatgccctctcacaggtttgtgttataattgtaagcccatattacttgtgttagtagttttgtctctataggtaacataatgacagtggtgtaaagtttctgttcaagaaacatatgttgtaaagttactttatacaagatacctgccaaaggaaatggtcttactttcaaatgactttgaaagcatgtataattgcaaacagagcaggagaagactttaatcagaatttccttgtgtccttttcctttactaagtgttttgaataaagaaaaaaaaaatgtatgacctcagagaatgaatacccttcaggaagccacttcctgattttagtgggataatatggttctctgtagcacaaagatttaaagtcctagaatttctaatcctagttctcagaattgtagaatatgacaaaaataatggtttccccatttgtccactgacttcagggatatttcacaagttatttatttatagaatgaaaactatgtagttaaatctgtcattcagttaaacctgtgtctttcagtttgaaatcttttgttatgtatgttgcaaaagaaaatttagaactattcctttgttcactcagtcacagcattcagagctttatgtttccagtggaaatgtactgttcagtctcaatttcttttaattcaaccattctcagtattagtaacatatacctataaaatttttctaaagcaaaatttttgattgaatttctcataaaagctcttggaccataattaaagtctcagttaaactggtattcccgaaaaacaatcttccagtctataaattgtttgctagtacaattaaaaggtcatctatctcataactgacggctcaggtctgtccagttgccataattgcacaactggattccagctgctggtaataaggaattgtgtagatagataaagggcaagagtatgtctgcaatccaaaataaatgagagttaacacataattagccttttgattattttggcagctatcctcaccatttagtaaagggtatactaacaatacccaactttatttaacaaagttttgtaagcatacctaagtagtaacttgatatgctgaaaaatctgacctgtcacttcgcttcactctgaccagtaattgcagattgtcgtcaccatcctagcctatgactacattaggattttatgacttattaacttgaaaatctgttctgtaagtggcattggtagaatctcccactttgctcctcactgtccaattgtgtaaagattaaggtacatactattgttggtgatgcttttacacctcaacttgctattttaaaaggttatatgaacccctcccacttttaaggatattcccttttactgattttcctagctaaaattatatagccatctttctaaatattgtatttaaatctgatctaggacttgccttattttatcatttttctttaataatctccaataaactttctttattcattaa

SEQ ID NO: 297755 - DNA, 4196 bp, Homo sapiens
agcgaaaacggcatcttcatcggacgaaaacggcatcttcatcggccgatgaagatgcacagcatcgcaagcctatggatcaaaagaggagcagcagcctcgggagcaatcggagtaaccgtagtcatacgtctggtcgtcttcgctccccatccaatgattcagcccatcgaagtggagatgaccaaagtggtcgaaagagagtactgcacagtggctcaagagatagagaaaaaacaaaaagcctggaaatcacaggagagagaaaatctaggattgatcagttaaagcgtggagaacccagtcgaagtacttcttcagatcgccaggattcaagaagccatagttcaagaagaagttctccagagtcagatcgacaggtccattcaagatctgggtcatttgatagcagagacaggcttcaagaacgagatcgatatgaacacgacagagagcgcgagagagagaggagagatacgaggcagagagaatgggaccgagatgctgataaagattggccacgcaacagggatcgagatagattgcgagaacgagaacgagagagagaacgagacaaaaggagagacttggatagggaaagagagagactaatttctgattctgttgaaagggacagggacagagacagagacagaacttttgagagttctcaaatagagtctgtgaaacgctgtgaagcaaaactggaaggtgaacatgaaagggatctagaaagcacttcccgagactctctagccttggataaagagagaatggataaagatctgggatctgtgcagggatttgaagatacaaataaatccgagagaactgagagtctggaagcaggagatgacgagtccaagttagatgatgcacattcattaggctctggtgctggagaaggatacgagccaatcagtgatgacgaactagatgaaattctggcaggtgatgcagaaaagagggaggaccaacaggatgaggagaagatgccagatcccttagatgtgatagatgtggattggtctggtcttatgccaaagcatccaaaagaaccacgagagcctggggctgcactcttaaaattcacacctggagctgttatgctaagagttgggatttctaaaaagttggcaggttctgaactctttgccaaagtcaaagaaacatgtcagagacttttagaaaaacccaaagatgcagacaatctctttgaacatgaattgggggctctcaatatggctgcattactacgaaaagaagaaagagcaagtcttcttagtaatcttggcccatgttgtaaggcgttgtgcttcagacgggattctgcaattcgaaagcagcttgttaaaaatgagaagggcaccataaaacaagcttacacgagtgctccaatggtagacaatgaattacttcgattgagtcttcggttatttaagcggaagactacttgccatgctccaggacatgaaaagactgaagataataaactttcacagtccagtatccaacaggaactgtgtgtgtcttaagaccgaagttcaatatggtatttttggtactgtcttccttcagcagtgcatattcttttgcaaagttctttggtttgacaagcattagtgacaaaggcagaaaagatttatcagccatgctaaaagagtgaagaattttgatctttagagacactagttttggccaacttaagattttacgttaatttttacatagtatttgacactcatgcaaaataatgtgaaaacatctagatttagtagtttattctgcgccttttgttaaaactgaagattttggaaaatggttgtcactgctcttccagcctatgaatatttttgtgaaatggaaccatggatttatgtctggatcatccatacagaaccaacaattttattcaaaaacaatgtgttcatcaaagtaattgctcacattgtgcagtactatgttgtacagaccacgtgaaagggaatgctggtctagctggcgtggtatgtttataggcgaatttcagcagaaggaagccaaaatagttttttccttttgaaagttttttaaaaattatttcatgggtcttttttttaattaatatgtgtgcattgttacaatgtatgttggatgtcttttgaccctaaatgctttttttgttatcagagattgtgtactatttttatttttaataaatgtatcttccctttccttgttttagatttactttgctcttcgttaatcttattcctgatgatctagaacattagtcatcaacattacatgtttcatgcttcagatattttactgcttgtgtccttattgttggacagctttaaacagagttgatgtacttcaaatatagctcattgatacttaaggcatcttcttggaatgtggcttttgaagaaaaaaattactcaaagcaaatcaagagttaacaaacctaacgtaacctgaggtttaatattctactatcatattttttagagctataacttttgattatattaaactgcctccagctgtactatgtaaaacagatttacttttaaaaattacagtatacctgctttgttctatatgtatatgtttaactcatgaagtggactcttagaaggatttgaaatggactctgggcacagaaattgtgagcagacagtagtagtgataataataaaagaaggcaatcaaaatttaattttatcatgccctctcacaggtttgtgttataattgtaagcccatattacttgtgttagtagttttgtctctataggtaacataatgacagtggtgtaaagtttctgttcaagaaacatatgttgtaaagttactttatacaagatacctgccaaaggaaatggtcttactttcaaatgactttgaaagcatgtataattgcaaacagagcaggagaagactttaatcagaatttccttgtgtccttttcctttactaagtgttttgaataaagaaaaaaaaaatgtatgacctcagagaatgaatacccttcaggaagccacttcctgattttagtgggataatatggttctctgtagcacaaagatttaaagtcctagaatttctaatcctagttctcagaattgtagaatatgacaaaaataatggtttccccatttgtccactgacttcagggatatttcacaagttatttatttatagaatgaaaactatgtagttaaatctgtcattcagttaaacctgtgtctttcagtttgaaatcttttgttatgtatgttgcaaaagaaaatttagaactattcctttgttcactcagtcacagcattcagagctttatgtttccagtggaaatgtactgttcagtctcaatttcttttaattcaaccattctcagtattagtaacatatacctataaaatttttctaaagcaaaatttttgattgaatttctcataaaagctcttggaccataattaaagtctcagttaaactggtattcccgaaaaacaatcttccagtctataaattgtttgctagtacaattaaaaggtcatctatctcataactgacggctcaggtctgtccagttgccataattgcacaactggattccagctgctggtaataaggaattgtgtagatagataaagggcaagagtatgtctgcaatccaaaataaatgagagttaacacataattagccttttgattattttggcagctatcctcaccatttagtaaagggtatactaacaatacccaactttatttaacaaagttttgtaagcatacctaagtagtaacttgatatgctgaaaaatctgacctgtcacttcgcttcactctgaccagtaattgcagattgtcgtcaccatcctagcctatgactacattaggattttatgacttattaacttgaaaatctgttctgtaagtggcattggtagaatctcccactttgctcctcactgtccaattgtgtaaagattaaggtacatactattgttggtgatgcttttacacctcaacttgctattttaaaaggttatatgaacccctcccacttttaaggatattcccttttactgattttcctagctaaaattatatagccatctttctaaatattgtatttaaatctgatctaggacttgccttattttatcatttttctttaataatctccaataaactttctttattcattaa

SEQ ID NO: 297756 - DNA, 2318 bp, Homo sapiens
ggcaggcgatctagaggatcccaatcagttacacaaaaaaacaatgtgttcatcaaagtaattgctcacattgtgcagtactatgttgtacagaccacgtgaaagggaatgctggtctagctggcgtggtatgtttataggcgaatttcagcagaaggaagccaaaatagttttttccttttgaaagttttttaaaaattatttcatgggtcttttttttaattaatatgtgtgcattgttacaatgtatgttggatgtcttttgaccctaaatgctttttttgttatcagagattgtgtactatttttatttttaataaatgtatcttccctttccttgttttagatttactttgctcttcgttaatcttattcctgatgatctagaacattagtcatcaacattacatgtttcatgcttcagatattttactgcttgtgtccttattgttggacagctttaaacagagttgatgtacttcaaatatagctcattgatacttaaggcatcttcttggaatgtggcttttgaagaaaaaaattactcaaagcaaatcaagagttaacaaacctaacgtaacctgaggtttaatattctactatcatattttttagagctataacttttgattatattaaactgcctccagctgtactatgtaaaacagatttacttttaaaaattacagtatacctgctttgttctatatgtatatgtttaactcatgaagtggactcttagaaggatttgaaatggactctgggcacagaaattgtgagcagacagtagtagtgataataataaaagaaggcaatcaaaatttaattttatcatgccctctcacaggtttgtgttataattgtaagcccatattacttgtgttagtagttttgtctctataggtaacataatgacagtggtgtaaagtttctgttcaagaaacatatgttgtaaagttactttatacaagatacctgccaaaggaaatggtcttactttcaaatgactttgaaagcatgtataattgcaaacagagcaggagaagactttaatcagaatttccttgtgtccttttcctttactaagtgttttgaataaagaaaaaaaaaatgtatgacctcagagaatgaatacccttcaggaagccacttcctgattttagtgggataatatggttctctgtagcacaaagatttaaagtcctagaatttctaatcctagttctcagaattgtagaatatgacaaaaataatggtttccccatttgtccactgacttcagggatatttcacaagttatttatttatagaatgaaaactatgtagttaaatctgtcattcagttaaacctgtgtctttcagtttgaaatcttttgttatgtatgttgcaaaagaaaatttagaactattcctttgttcactcagtcacagcattcagagctttatgtttccagtggaaatgtactgttcagtctcaatttcttttaattcaaccattctcagtattagtaacatatacctataaaatttttctaaagcaaaatttttgattgaatttctcataaaagctcttggaccataattaaagtctcagttaaactggtattcccgaaaaacaatcttccagtctataaattgtttgctagtacaattaaaaggtcatctatctcataactgacggctcaggtctgtccagttgccataattgcacaactggattccagctgctggtaataaggaattgtgtagatagataaagggcaagagtatgtctgcaatccaaaataaatgagagttaacacataattagccttttgattattttggcagctatcctcaccatttagtaaagggtatactaacaatacccaactttatttaacaaagttttgtaagcatacctaagtagtaacttgatatgctgaaaaatctgacctgtcacttcgcttcactctgaccagtaattgcagattgtcgtcaccatcctagcctatgactacattaggattttatgacttattaacttgaaaatctgttctgtaagtggcattggtagaatctcccactttgctcctcactgtccaattgtgtaaagattaaggtacatactattgttggtgatgcttttacacctcaacttgctattttaaaaggttatatgaacccctcccacttttaaggatattcccttttactgattttcctagctaaaattatatagccatctttctaaatattgtatttaaatctgatctaggacttgccttattttatcatttttctttaataatctccaataaactttctttattcattaa

SEQ ID NO: 297757 - DNA, 1641 bp, Homo sapiens
aactgatttttcctcctacatagttgtatgttgttattttagcttgcttttttatgacaatttctgtgcccatttcaattgaaatgggcacagaaattgtgagcagacagtagtagtgataataataaaagaaggcaatcaaaatttaattttatcatgccctctcacaggtttgtgttataattgtaagcccatattacttgtgttagtagttttgtctctataggtaacataatgacagtggtgtaaagtttctgttcaagaaacatatgttgtaaagttactttatacaagatacctgccaaaggaaatggtcttactttcaaatgactttgaaagcatgtataattgcaaacagagcaggagaagactttaatcagaatttccttgtgtccttttcctttactaagtgttttgaataaagaaaaaaaaaatgtatgacctcagagaatgaatacccttcaggaagccacttcctgattttagtgggataatatggttctctgtagcacaaagatttaaagtcctagaatttctaatcctagttctcagaattgtagaatatgacaaaaataatggtttccccatttgtccactgacttcagggatatttcacaagttatttatttatagaatgaaaactatgtagttaaatctgtcattcagttaaacctgtgtctttcagtttgaaatcttttgttatgtatgttgcaaaagaaaatttagaactattcctttgttcactcagtcacagcattcagagctttatgtttccagtggaaatgtactgttcagtctcaatttcttttaattcaaccattctcagtattagtaacatatacctataaaatttttctaaagcaaaatttttgattgaatttctcataaaagctcttggaccataattaaagtctcagttaaactggtattcccgaaaaacaatcttccagtctataaattgtttgctagtacaattaaaaggtcatctatctcataactgacggctcaggtctgtccagttgccataattgcacaactggattccagctgctggtaataaggaattgtgtagatagataaagggcaagagtatgtctgcaatccaaaataaatgagagttaacacataattagccttttgattattttggcagctatcctcaccatttagtaaagggtatactaacaatacccaactttatttaacaaagttttgtaagcatacctaagtagtaacttgatatgctgaaaaatctgacctgtcacttcgcttcactctgaccagtaattgcagattgtcgtcaccatcctagcctatgactacattaggattttatgacttattaacttgaaaatctgttctgtaagtggcattggtagaatctcccactttgctcctcactgtccaattgtgtaaagattaaggtacatactattgttggtgatgcttttacacctcaacttgctattttaaaaggttatatgaacccctcccacttttaaggatattcccttttactgattttcctagctaaaattatatagccatctttctaaatattgtatttaaatctgatctaggacttgccttattttatcatttttctttaataatctccaataaactttctttattcattaa

SEQ ID NO: 297758 - DNA, 2456 bp, Homo sapiens
cagaggaacagggcaaacctctgacttccggcggcattttgaggcggtcctcctagcggcctggtagtgtttttgttgccttttcttaatctacaatctcttcgttatttttcttcctgcgacccagtttcgcttgaccctggagaggcggcgggcgggttggttctgcttctcagccatcccgggggctcctcgctagccaagagccggttcccgggagccgcgcgcgcatcgctttctcctcgtcgtcgtcctcctgggtccaggcgcggggacagagtcgcctcccccgctcctcggagcggcggcggcggtggtgcctccggactgcacttgcgaagggagcttggggaggaatagtacaaaatgtcaaaaattagaaggaaggtcacagtggaaaataccaagactatatctgatagcacatcccgaagacccagtgtatttgagaggcttggacccagcactggcagtacagcagagacacagtgccgtaactggctgaagactggcaactgcctctatggaaacacatgtagattcgtacatggcccttcacctcgtggtaaaggttatagcagcaattatagaaggtcaccagaaagacctacaggggatcttagagaaagaatgaagaacaagcgccaagacgtggacactgagccccagaaacgaaatacagaggagtcatcctcacctgttaggaaagaatcttcaagagggagacatagggaaaaggaagacataaaaatcactaaggaaagaactccagaaagtgaagaagaaaatgtagaatgggaaactaatagagatgattctgacaatggagatattaattatgattatgttcatgaattgtcattggaaatgaagcgtcagaagatacagagggaattaatgaagctggaacaagaaaacatggagaagagagaagaaattatcattaaaaaggaggtttcaccagaagtggttagatcaaaattgtccccgtcaccttctctaagaaagtctagcaaatctccgaagcgaaaatcaagcccgaagtcgtcttcagctagcaagaaagataggaagacatctgcagtatcttctcccctgttggaccagcagagaaattcaaaaaccaaccaaagtaaaaagaaaggaccacgtactcctagtccaccccctcctataccagaagatatcgctctggggaaaaaatacaaagaaaaatataaagtaaaagacaggatagaagaaaaaacaagagatggaaaggacagaggacgagattttgaacgacaaagagaaaagagagacaagccaaggtctacttccccagcaggacagcatcattctcctatatcttctagacatcactcatcttcctcacaatcaggatcatctattcaaagacattctccttctcctcgtcgaaaaagaactccttcaccatcttatcagcggacactaactccacctttacgacgctctgcctctccttatccttcacattctttgtcgtctccccagagaaagcagagtcctccaagacatcgctctccaatgcgagagaaagggagacatgatcatgaacgaacttcacagtctcatgatcgacgccacgaaaggagggaagatactaggggcaaacgagacagagaaaaggactcaagagaagaacgagaatatgaacaggatcagagctcttctagagaccacagagatgacagagaacctcgagatggtcgggatcggagagatgccagagatactagggaccgaagggaactaagagactccagagacatgcgggactcaagggagatgagagattatagcagagataccaaagagagccgtgatcccagagattctcggtccactcgtgatgcccatgactacagggaccgtgaaggtcgagatactcatcgaaaggaggatacatatccagaagaatcccggagttatggccgaaaccatttgagagaagaaagttctcgtacggaaataaggaatgagtccagaaatgagtctcgaagtgaaattagaaatgaccgaatgggccgaagtagggggagggttcctgagttacctgaaaagggaagtcgaggctcaagaggttctcaaattgatagtcacagtagtaatagcaactatcatgacagctgggaaactcgaagtagctatcctgaaagagatagatatcctgaaagagacaacagagatcaagcaagggattcttcctttgagagaagacatggagagcgagaccgtcgtgacaacagagagagagatcaaagaccaagctcaccaattcgacatcagggaaggaatgacgagcttgagcgtgatgaaagaagagaggaacgaagagtagacagagtggatgataggagagatgaaagggctagagagagagatcgggaacgagaacgagacaatccagcagcccaggaggtcgacgcggccgc

SEQ ID NO: 297759 - DNA, 2006 bp, Homo sapiens
cagaggaacagggcaaacctctgacttccggcggcattttgaggcggtcctcctagcggcctggtagtgtttttgttgccttttcttaatctacaatctcttcgttatttttcttcctgcgacccagtttcgcttgaccctggagaggcggcgggcgggttggttctgcttctcagccatcccgggggctcctcgctagccaagagccggttcccgggagccgcgcgcgcatcgctttctcctcgtcgtcgtcctcctgggtccaggcgcggggacagagtcgcctcccccgctcctcggagcggcggcggcggtggtgcctccggactgcacttgcgaagggagcttggggaggaatagtacaaaatgtcaaaaattagaaggaaggtcacagtggaaaataccaagactatatctgatagcacatcccgaagacccagtgtatttgagaggcttggacccagcactggcagtacagcagagacacagtgccgtaactggctgaagactggcaactgcctctatggaaacacatgtagattcgtacatggcccttcacctcgtggtaaaggttatagcagcaattatagaaggtcaccagaaagacctacaggggatcttagagaaagaatgaagaacaagcgccaagacgtggacactgagccccagaaacgaaatacagaggagtcatcctcacctgttaggaaagaatcttcaagagggagacatagggaaaaggaagacataaaaatcactaaggaaagaactccagaaagtgaagaagaaaatgtagaatgggaaactaatagagatgattctgacaatggagatattaattatgattatgttcatgaattgtcattggaaatgaagcgtcagaagatacagagggaattaatgaagctggaacaagaaaacatggagaagagagaagaaattatcattaaaaaggaggtttcaccagaagtggttagatcaaaattgtccccgtcaccttctctaagaaagtctagcaaatctccgaagcgaaaatcaagcccgaagtcgtcttcagctagcaagaaagataggaagacatctgcagtatcttctcccctgttggaccagcagagaaattcaaaaaccaaccaaagtaaaaagaaaggaccacgtactcctagtccaccccctcctataccagaagatatcgctctggggaaaaaatacaaagaaaaatataaagtaaaagacaggatagaagaaaaaacaagagatggaaaggacagaggacgagattttgaacgacaaagagaaaagagagacaagccaaggtctacttccccagcaggacagcatcattctcctatatcttctagacatcactcatcttcctcacaatcaggatcatctattcaaagacattctccttctcctcgtcgaaaaagaactccttcaccatcttatcagcggacactaactccacctttacgacgctctgcctctccttatccttcacattctttgtcgtctccccagagaaagcagagtcctccaagacatcgctctccaatgcgagagaaagggagacatgatcatgaacgaacttcacagtctcatgatcgacgccacgaaaggagggaagatactaggggcaaacgagacagagaaaaggactcaagagaagaacgagaatatgaacaggatcagagctcttctagagaccacagagatgacagagaacctcgagatggtcgggatcggagagatgccagagatactagggaccgaagggaactaagagactccagaagatatcgctctggggaaaaaatacaaagaaaaatataaagtaaaagacaggatagaagaaaaaacaagagatggaaaggacagcagagaaattcaaaaaccaaccaaagtaaaaagaaaggaccacgtactcctagtccaccccctcctataccagaagatatcgctctggggaaaaaatacaaagaaaaatataaagtaaaagacaggatagaaga

SEQ ID NO: 297760 - DNA, 1314 bp, Homo sapiens
cagaggaacagggcaaacctctgacttccggcggcattttgaggcggtcctcctagcggcctggtagtgtttttgttgccttttcttaatctacaatctcttcgttatttttcttcctgcgacccagtttcgcttgaccctggagaggcggcgggcgggttggttctgcttctcagccatcccgggggctcctcgctagccaagagccggttcccgggagccgcgcgcgcatcgctttctcctcgtcgtcgtcctcctgggtccaggcgcggggacagagtcgcctcccccgctcctcggagcggcggcggcggtggtgcctccggactgcacttgcgaagggagcttggggaggaatagtacaaaatgtcaaaaattagaaggaaggtcacagtggaaaataccaagactatatctgatagcacatcccgaagacccagtgtatttgagaggcttggacccagcactggcagtacagcagagacacagtgccgtaactggctgaagactggcaactgcctctatggaaacacatgtagattcgtacatggcccttcacctcgtggtaaaggttatagcagcaattatagaaggtcaccagaaagacctacaggggatcttagagaaagaatgaagaacaagcgccaagacgtggacactgagccccagaaacgaaatacagaggagtcatcctcacctgttaggaaagaatcttcaagagggagacatagggaaaaggaagacataaaaatcactaaggaaagaactccagaaagtgaagaagaaaatgtagaatgggaaactaatagagatgattctgacaatggagatattaattatgattatgttcatgaattgtcattggaaatgaagcgtcagaagatacagagggaattaatgaagctggaacaagaaaacatggagaagagagaagaaattatcattaaaaaggaggtttcaccagaagtggttagatcaaaattgtccccgtcaccttctctaagaaagtctagcaaatctccgaagcgaaaatcaagcccgaagtcgtcttcagctagcaagaaagataggaagacatctgcagtatcttctcccctgttggaccagcagaggtcagtagggtgataaatagtatcgagaaaatagctttttctgaagtgatactaaaaagaattagtaggttataaaagggtacttttagtacattttatatttaatgtaagcttttttgttctaaaaagaaatttgaaatgtttcaattaaaaagacaattatagagaacaataaaacaaacatctgtgtaacatccacata

SEQ ID NO: 297761 - DNA, 657 bp, Homo sapiens
cagaggaacagggcaaacctctgacttccggcggcattttgaggcggtcctcctagcggcctggtagtgtttttgttgccttttcttaatctacaatctcttcgttatttttcttcctgcgacccagtttcgcttgaccctggagaggcggcgggcgggttggttctgcttctcagccatcccgggggctcctcgctagccaagagccggttcccgggagccgcgcgcgcatcgctttctcctcgtcgtcgtcctcctgggtccaggcgcggggacagagtcgcctcccccgctcctcggagcggcggcggcggtggtgcctccggactgcacttgcgaagggagcttggggaggaagtaagcgttctgtgaattggtgtgggtatctggggaaggcattgagcggacccgtaatgcggaggcccgggttacccacccccgtctttgcttgagtcactgggattttgagctttccttgagcatcccacccttaactctgcaatagccccctgtgctcaggcgtaatttctcactctgattatgattctggcatttgtctaagggcgataagtagactcagacaataggctgtacccctcgttaccatttgatgtaagcacgggaacccttgtatggtgttcgtatttgtgtgcgatg

SEQ ID NO: 297762 - DNA, 214 bp, Homo sapiens
aatctgaagtttggtgtgattctaaaatactgtaagtcttgttgtaccataagtggaggaatttctgaattgacttactgaatttttttaaaggtttcaccagaagtggttagatcaaaattgtccccgtcaccttctctaagaaagtctagcaaatctccgaagcgaaaatcaagcccgaagtcgtcttcagctagcaagaaagataggaaga

SEQ ID NO: 297763 - DNA, 482 bp, Homo sapiens
tattataatctatatgtaccatgcagtggttactaacctggtgagagtgtgattgcttttatcttttatatagatgaaaaacacagactcttgagccaagttgtacgacctcaagaatctcgttctcttagtccctcgcacctcacagaagacagacagggtagatggaaagaggaggatcgtaaaccagaaaggaaagagagttcaaggcgctacgaagaacaggaactcaaggagaaagtttcttctgtagataaacagagagaacagacagaaatcctggaaagctcaagaatgcgtgcacaggacattataggacaccaccagtctgaagatcgagagacatctgatcgagctcatgatgaaaacaagaagaaagcaaaaattcaaaagaaaccaattaagaaaaagaaagaggatgatgttggaatagagaggggtaacatagagacaacatctgaagatggtcaagtattttcacc

SEQ ID NO: 297764 - DNA, 5722 bp, Homo sapiens
gcggccgctactactaaattcgcggccgcgtcaggaacgaagagtagacagagtggatgataggagagatgaaagggctagagagagagatcgggaacgagaacgagacagggagcgggagagagagagggaacgtgaacgggatcgggaaagagaaaaagagagagaactagaaagagagcgtgctagggaacgggagagagaaagagaaaaagagagagatcgtgaaagggatagagaccgagaccacgatcgagagcgggaaagagagagggaacgagacagggaaaaagaacgggaacgagaaagagaagagagagagagggagagagagcgagaacgggagagagagcgagagcgagaacgggaacgagaaagagcgagagaaagggataaagaacgagaacgccaaagggattgggaagacaaagacaaaggacgagatgaccgcagagaaaagcgagaagagatccgagaagataggaatccaagagatggacatgatgaaagaaaatcaaagaagcgctatagaaatgaagggagtcccagccctagacagtccccgaagcgccggcgtgaacattctccggacagtgatgcctacaacagtggagatgataaaaatgaaaaacacagactcttgagccaagttgtacgacctcaagaatctcgttctcttagtccctcgcacctcacagaagacagacagggtagatggaaagaggaggatcgtaaaccagaaaggaaagagagttcaaggcgctacgaagaacaggaactcaaggagaaagtttcttctgtagataaacagagagaacagacagaaatcctggaaagctcaagaatgcgtgcacaggacattataggacaccaccagtctgaagatcgagagacatctgatcgagctcatgatgaaaacaagaagaaagcaaaaattcaaaagaaaccaattaagaaaaagaaagaggatgatgttggaatagagaggggtaacatagagacaacatctgaagatggtcaagtattttcaccaaaaaaaggacagaaaaagaaaagcattgaaaaaaaacgtaaaaaatccaaaggtgattctgatatttctgatgaagaagcagcccagcaaagtaagaagaaaagaggcccacggactccccctataacaactaaagaggaattggttgaaatgtgcaatggtaagaatggtattctagaggactcccagaaaaaagaagatacagcattcagtgactggtctgatgaggatgtccctgaccgtacagaggtgacagaagcagagcatactgccaccgccacgactcctggtagtaccccttctcctctatcttctcttcttcctcctccaccgcctgtggctactgccactgctacaactgtgcctgcaactcttgctgccactactgctgctgccgccacctctttcagcacatctgccatcactatttccacctctgccacccccaccaataccaccaataatacttttgccaatgaagactcacacagaaaatgccacagaacacgagtagaaaaagtagagacgcctcacgtgactatagaagatgcacagcatcgcaagcctatggatcaaaagaggagcagcagcctcgggagcaatcggagtaaccgtagtcatacgtctggtcgtcttcgctccccatccaatgattcagcccatcgaagtggagatgaccaaagtggtcgaaagagagtactgcacagtggctcaagagatagagaaaaaacaaaaagcctggaaatcacaggagagagaaaatctaggattgatcagttaaagcgtggagaacccagtcgaagtacttcttcagatcgccaggattcaagaagccatagttcaagaagaagttctccagagtcagatcgacaggtccattcaagatctgggtcatttgatagcagagacaggcttcaagaacgagatcgatatgaacacgacagagagcgcgagagagagaggagagatacgaggcagagagaatgggaccgagatgctgataaagattggccacgcaacagggatcgagatagattgcgagaacgagaacgagagagagaacgagacaaaaggagagacttggatagggaaagagagagactaatttctgattctgttgaaagggacagggacagagacagagacagaacttttgagagttctcaaatagagtctgtgaaacgctgtgaagcaaaactggaaggtgaacatgaaagggatctagaaagcacttcccgagactctctagccttggataaagagagaatggataaagatctgggatctgtgcagggatttgaagatacaaataaatccgagagaactgagagtctggaagcaggagatgacgagtccaagttagatgatgcacattcattaggctctggtgctggagaaggatacgagccaatcagtgatgacgaactagatgaaattctggcaggtgatgcagaaaagagggaggaccaacaggatgaggagaagatgccagatcccttagatgtgatagatgtggattggtctggtcttatgccaaagcatccaaaagaaccacgagagcctggggctgcactcttaaaattcacacctggagctgttatgctaagagttgggatttctaaaaagttggcaggttctgaactctttgccaaagtcaaagaaacatgtcagagacttttagaaaaacccaaagatgcagacaatctctttgaacatgaattgggggctctcaatatggctgcattactacgaaaagaagaaagagcaagtcttcttagtaatcttggcccatgttgtaaggcgttgtgcttcagacgggattctgcaattcgaaagcagcttgttaaaaatgagaagggcaccataaaacaagcttacacgagtgctccaatggtagacaatgaattacttcgattgagtcttcggttatttaagcggaagactacttgccatgctccaggacatgaaaagactgaagataataaactttcacagtccagtatccaacaggaactgtgtgtgtcttaagaccgaagttcaatatggtatttttggtactgtcttccttcagcagtgcatattcttttgcaaagttctttggtttgacaagcattagtgacaaaggcagaaaagatttatcagccatgctaaaagagtgaagaattttgatctttagagacactagttttggccaacttaagattttacgttaatttttacatagtatttgacactcatgcaaaataatgtgaaaacatctagatttagtagtttattctgcgccttttgttaaaactgaagattttggaaaatggttgtcactgctcttccagcctatgaatatttttgtgaaatggaaccatggatttatgtctggatcatccatacagaaccaacaattttattcaaaaacaatgtgttcatcaaagtaattgctcacattgtgcagtactatgttgtacagaccacgtgaaagggaatgctggtctagctggcgtggtatgtttataggcgaatttcagcagaaggaagccaaaatagttttttccttttgaaagttttttaaaaattatttcatgggtcttttttttaattaatatgtgtgcattgttacaatgtatgttggatgtcttttgaccctaaatgctttttttgttatcagagattgtgtactatttttatttttaataaatgtatcttccctttccttgttttagatttactttgctcttcgttaatcttattcctgatgatctagaacattagtcatcaacattacatgtttcatgcttcagatattttactgcttgtgtccttattgttggacagctttaaacagagttgatgtacttcaaatatagctcattgatacttaaggcatcttcttggaatgtggcttttgaagaaaaaaattactcaaagcaaatcaagagttaacaaacctaacgtaacctgaggtttaatattctactatcatattttttagagctataacttttgattatattaaactgcctccagctgtactatgtaaaacagatttacttttaaaaattacagtatacctgctttgttctatatgtatatgtttaactcatgaagtggactcttagaaggatttgaaatggactctgggcacagaaattgtgagcagacagtagtagtgataataataaaagaaggcaatcaaaatttaattttatcatgccctctcacaggtttgtgttataattgtaagcccatattacttgtgttagtagttttgtctctataggtaacataatgacagtggtgtaaagtttctgttcaagaaacatatgttgtaaagttactttatacaagatacctgccaaaggaaatggtcttactttcaaatgactttgaaagcatgtataattgcaaacagagcaggagaagactttaatcagaatttccttgtgtccttttcctttactaagtgttttgaataaagaaaaaaaaaatgtatgacctcagagaatgaatacccttcaggaagccacttcctgattttagtgggataatatggttctctgtagcacaaagatttaaagtcctagaatttctaatcctagttctcagaattgtagaatatgacaaaaataatggtttccccatttgtccactgacttcagggatatttcacaagttatttatttatagaatgaaaactatgtagttaaatctgtcattcagttaaacctgtgtctttcagtttgaaatcttttgttatgtatgttgcaaaagaaaatttagaactattcctttgttcactcagtcacagcattcagagctttatgtttccagtggaaatgtactgttcagtctcaatttcttttaattcaaccattctcagtattagtaacatatacctataaaatttttctaaagcaaaatttttgattgaatttctcataaaagctcttggaccataattaaagtctcagttaaactggtattcccgaaaaacaatcttccagtctataaattgtttgctagtacaattaaaaggtcatctatctcataactgacggctcaggtctgtccagttgccataattgcacaactggattccagctgctggtaataaggaattgtgtagatagataaagggcaagagtatgtctgcaatccaaaataaatgagagttaacacataattagccttttgattattttggcagctatcctcaccatttagtaaagggtatactaacaatacccaactttatttaacaaagttttgtaagcatacctaagtagtaacttgatatgctgaaaaatctgacctgtcacttcgcttcactctgaccagtaattgcagattgtcgtcaccatcctagcctatgactacattaggattttatgacttattaacttgaaaatctgttctgtaagtggcattggtagaatctcccactttgctcctcactgtccaattgtgtaaagattaaggtacatactattgttggtgatgcttttacacctcaacttgctattttaaaaggttatatgaacccctcccacttttaaggatattcccttttactgattttcctagctaaaattatatagccatctttctaaatattgtatttaaatctgatctaggacttgccttattttatcatttttctttaataatctccaataaactttctttattcattaa

SEQ ID NO: 297765 - DNA, 8135 bp, Homo sapiens
  misc_feature (3148)..(3148): n is a, c, g, or t
  misc_feature (3152)..(3152): n is a, c, g, or t
  misc_feature (3158)..(3158): n is a, c, g, or t
  misc_feature (3160)..(3160): n is a, c, g, or t
  misc_feature (3162)..(3162): n is a, c, g, or t
  misc_feature (3164)..(3165): n is a, c, g, or t
  misc_feature (3167)..(3167): n is a, c, g, or t
  misc_feature (3170)..(3171): n is a, c, g, or t
  misc_feature (3203)..(3203): n is a, c, g, or t
cagaggaacagggcaaacctctgacttccggcggcattttgaggcggtcctcctagcggcctggtagtgtttttgttgccttttcttaatctacaatctcttcgttatttttcttcctgcgacccagtttcgcttgaccctggagaggcggcgggcgggttggttctgcttctcagccatcccgggggctcctcgctagccaagagccggttcccgggagccgcgcgcgcatcgctttctcctcgtcgtcgtcctcctgggtccaggcgcggggacagagtcgcctcccccgctcctcggagcggcggcggcggtggtgcctccggactgcacttgcgaagggagcttggggaggaatagtacaaaatgtcaaaaattagaaggaaggtcacagtggaaaataccaagactatatctgatagcacatcccgaagacccagtgtatttgagaggcttggacccagcactggcagtacagcagagacacagtgccgtaactggctgaagactggcaactgcctctatggaaacacatgtagattcgtacatggcccttcacctcgtggtaaaggttatagcagcaattatagaaggtcaccagaaagacctacaggggatcttagagaaagaatgaagaacaagcgccaagacgtggacactgagccccagaaacgaaatacagaggagtcatcctcacctgttaggaaagaatcttcaagagggagacatagggaaaaggaagacataaaaatcactaaggaaagaactccagaaagtgaagaagaaaatgtagaatgggaaactaatagagatgattctgacaatggagatattaattatgattatgttcatgaattgtcattggaaatgaagcgtcagaagatacagagggaattaatgaagctggaacaagaaaacatggagaagagagaagaaattatcattaaaaaggaggtttcaccagaagtggttagatcaaaattgtccccgtcaccttctctaagaaagtctagcaaatctccgaagcgaaaatcaagcccgaagtcgtcttcagctagcaagaaagataggaagacatctgcagtatcttctcccctgttggaccagcagagaaattcaaaaaccaaccaaagtaaaaagaaaggaccacgtactcctagtccaccccctcctataccagaagatatcgctctggggaaaaaatacaaagaaaaatataaagtaaaagacaggatagaagaaaaaacaagagatggaaaggacagaggacgagattttgaacgacaaagagaaaagagagacaagccaaggtctacttccccagcaggacagcatcattctcctatatcttctagacatcactcatcttcctcacaatcaggatcatctattcaaagacattctccttctcctcgtcgaaaaagaactccttcaccatcttatcagcggacactaactccacctttacgacgctctgcctctccttatccttcacattctttgtcgtctccccagagaaagcagagtcctccaagacatcgctctccaatgcgagagaaagggagacatgatcatgaacgaacttcacagtctcatgatcgacgccacgaaaggagggaagatactaggggcaaacgagacagagaaaaggactcaagagaagaacgagaatatgaacaggatcagagctcttctagagaccacagagatgacagagaacctcgagatggtcgggatcggagagatgccagagatactagggaccgaagggaactaagagactccagagacatgcgggactcaagggagatgagagattatagcagagataccaaagagagccgtgatcccagagattctcggtccactcgtgatgcccatgactacagggaccgtgaaggtcgagatactcatcgaaaggaggatacatatccagaagaatcccggagttatggccgaaaccatttgagagaagaaagttctcgtacggaaataaggaatgagtccagaaatgagtctcgaagtgaaattagaaatgaccgaatgggccgaagtagggggagggttcctgagttacctgaaaagggaagtcgaggctcaagaggttctcaaattgatagtcacagtagtaatagcaactatcatgacagctgggaaactcgaagtagctatcctgaaagagatagatatcctgaaagagacaacagagatcaagcaagggattcttcctttgagagaagacatggagagcgagaccgtcgtgacaacagagagagagatcaaagaccaagctcaccaattcgacatcagggaaggaatgacgagcttgagcgtgatgaaagaagagaggaacgaagagtagacagagtggatgataggagagatgaaagggctagagagagagatcgggaacgagaacgagacagggagcgggagagagagagggaacgtgaacgggatcgggaaagagaaaaagagagagaactagaaagagagcgtgctagggaacgggagagagaaagagaaaaagagagagatcgtgaaagggatagagaccgagaccacgatcgagagcgggaaagagagagggaacgagacagggaaaaagaacgggaacgagaaagagaagagagagagagggagagagagcgagaacgggagagagagcgagagcgagaacgggaacgagaaagagcgagagaaagggataaagaacgagaacgccaaagggattgggaagacaaagacaaaggacgagatgaccgcagagaaaagcgagaagagatccgagaagataggaatccaagagatggacatgatgaaagaaaatcaaagaagcgctatagaaatgaagggagtcccagccctagacagtccccgaagcgccggcgtgaacattctccggacagtgatgcctacaacagtggagatgataaaaatgaaaaacacagactcttgagccaagttgtacgacctcaagaatctcgttctcttagtccctcgcacctcacagaagacagacagggtagatggaaagaggaggatcgtaaaccagaaaggaaagagaaaaagagagagaactagaaagagagcgtgctagggaacgggagagagaaagagaaaaagagagagatcgtgaaagggatanagancgagancncnanngnganngggaaagagagagggaacgagacagggaaaangaacgggaacgagaaagagaagagagagagagggaaagcctggaaagctcaagaatgcgtgcacaggacattataggacaccaccagtctgaagatcgagagacatctgatcgagctcatgatgaaaacaagaagaaagcaaaaattcaaaagaaaccaattaagaaaaagaaagaggatgatgttggaatagagaggggtaacatagagacaacatctgaagatggtcaagtattttcaccaaaaaaaggacagaaaaagaaaagcattgaaaaaaaacgtaaaaaatccaaaggtgattctgatatttctgatgaagaagcagcccagcaaagtaagaagaaaagaggcccacggactccccctataacaactaaagaggaattggttgaaatgtgcaatggtaagaatggtattctagaggactcccagaaaaaagaagatacagcattcagtgactggtctgatgaggatgtccctgaccgtacagaggtgacagaagcagagcatactgccaccgccacgactcctggtagtaccccttctcctctatcttctcttcttcctcctccaccgcctgtggctactgccactgctacaactgtgcctgcaactcttgctgccactactgctgctgccgccacctctttcagcacatctgccatcactatttccacctctgccacccccaccaataccaccaataatacttttgccaatgaagactcacacagaaaatgccacagaacacgagtagaaaaagtagagacgcctcacgtgactatagaagatgcacagcatcgcaagcctatggatcaaaagaggagcagcagcctcgggagcaatcggagtaaccgtagtcatacgtctggtcgtcttcgctccccatccaatgattcagcccatcgaagtggagatgaccaaagtggtcgaaagagagtactgcacagtggctcaagagatagagaaaaaacaaaaagcctggaaatcacaggagagagaaaatctaggattgatcagttaaagcgtggagaacccagtcgaagtacttcttcagatcgccaggattcaagaagccatagttcaagaagaagttctccagagtcagatcgacaggtccattcaagatctgggtcatttgatagcagagacaggcttcaagaacgagatcgatatgaacacgacagagagcgcgagagagagaggagagatacgaggcagagagaatgggaccgagatgctgataaagattggccacgcaacagggatcgagatagattgcgagaacgagaacgagagagagaacgagacaaaaggagagacttggatagggaaagagagagactaatttctgattctgttgaaagggacagggacagagacagagacagaacttttgagagttctcaaatagagtctgtgaaacgctgtgaagcaaaactggaaggtgaacatgaaagggatctagaaagcacttcccgagactctctagccttggataaagagagaatggataaagatctgggatctgtgcagggatttgaagatacaaataaatccgagagaactgagagtctggaagcaggagatgacgagtccaagttagatgatgcacattcattaggctctggtgctggagaaggatacgagccaatcagtgatgacgaactagatgaaattctggcaggtgatgcagaaaagagggaggaccaacaggatgaggagaagatgccagatcccttagatgtgatagatgtggattggtctggtcttatgccaaagcatccaaaagaaccacgagagcctggggctgcactcttaaaattcacacctggagctgttatgctaagagttgggatttctaaaaagttggcaggttctgaactctttgccaaagtcaaagaaacatgtcagagacttttagaaaaacccaaagatgcagacaatctctttgaacatgaattgggggctctcaatatggctgcattactacgaaaagaagaaagagcaagtcttcttagtaatcttggcccatgttgtaaggcgttgtgcttcagacgggattctgcaattcgaaagcagcttgttaaaaatgagaagggcaccataaaacaagcttacacgagtgctccaatggtagacaatgaattacttcgattgagtcttcggttatttaagcggaagactacttgccatgctccaggacatgaaaagactgaagataataaactttcacagtccagtatccaacaggaactgtgtgtgtcttaagaccgaagttcaatatggtatttttggtactgtcttccttcagcagtgcatattcttttgcaaagttctttggtttgacaagcattagtgacaaaggcagaaaagatttatcagccatgctaaaagagtgaagaattttgatctttagagacactagttttggccaacttaagattttacgttaatttttacatagtatttgacactcatgcaaaataatgtgaaaacatctagatttagtagtttattctgcgccttttgttaaaactgaagattttggaaaatggttgtcactgctcttccagcctatgaatatttttgtgaaatggaaccatggatttatgtctggatcatccatacagaaccaacaattttattcaaaaacaatgtgttcatcaaagtaattgctcacattgtgcagtactatgttgtacagaccacgtgaaagggaatgctggtctagctggcgtggtatgtttataggcgaatttcagcagaaggaagccaaaatagttttttccttttgaaagttttttaaaaattatttcatgggtcttttttttaattaatatgtgtgcattgttacaatgtatgttggatgtcttttgaccctaaatgctttttttgttatcagagattgtgtactatttttatttttaataaatgtatcttccctttccttgttttagatttactttgctcttcgttaatcttattcctgatgatctagaacattagtcatcaacattacatgtttcatgcttcagatattttactgcttgtgtccttattgttggacagctttaaacagagttgatgtacttcaaatatagctcattgatacttaaggcatcttcttggaatgtggcttttgaagaaaaaaattactcaaagcaaatcaagagttaacaaacctaacgtaacctgaggtttaatattctactatcatattttttagagctataacttttgattatattaaactgcctccagctgtactatgtaaaacagatttacttttaaaaattacagtatacctgctttgttctatatgtatatgtttaactcatgaagtggactcttagaaggatttgaaatggactctgggcacagaaattgtgagcagacagtagtagtgataataataaaagaaggcaatcaaaatttaattttatcatgccctctcacaggtttgtgttataattgtaagcccatattacttgtgttagtagttttgtctctataggtaacataatgacagtggtgtaaagtttctgttcaagaaacatatgttgtaaagttactttatacaagatacctgccaaaggaaatggtcttactttcaaatgactttgaaagcatgtataattgcaaacagagcaggagaagactttaatcagaatttccttgtgtccttttcctttactaagtgttttgaataaagaaaaaaaaaatgtatgacctcagagaatgaatacccttcaggaagccacttcctgattttagtgggataatatggttctctgtagcacaaagatttaaagtcctagaatttctaatcctagttctcagaattgtagaatatgacaaaaataatggtttccccatttgtccactgacttcagggatatttcacaagttatttatttatagaatgaaaactatgtagttaaatctgtcattcagttaaacctgtgtctttcagtttgaaatcttttgttatgtatgttgcaaaagaaaatttagaactattcctttgttcactcagtcacagcattcagagctttatgtttccagtggaaatgtactgttcagtctcaatttcttttaattcaaccattctcagtattagtaacatatacctataaaatttttctaaagcaaaatttttgattgaatttctcataaaagctcttggaccataattaaagtctcagttaaactggtattcccgaaaaacaatcttccagtctataaattgtttgctagtacaattaaaaggtcatctatctcataactgacggctcaggtctgtccagttgccataattgcacaactggattccagctgctggtaataaggaattgtgtagatagataaagggcaagagtatgtctgcaatccaaaataaatgagagttaacacataattagccttttgattattttggcagctatcctcaccatttagtaaagggtatactaacaatacccaactttatttaacaaagttttgtaagcatacctaagtagtaacttgatatgctgaaaaatctgacctgtcacttcgcttcactctgaccagtaattgcagattgtcgtcaccatcctagcctatgactacattaggattttatgacttattaacttgaaaatctgttctgtaagtggcattggtagaatctcccactttgctcctcactgtccaattgtgtaaagattaaggtacatactattgttggtgatgcttttacacctcaacttgctattttaaaaggttatatgaacccctcccacttttaaggatattcccttttactgattttcctagctaaaattatatagccatctttctaaatattgtatttaaatctgatctaggacttgccttattttatcatttttctttaataatctccaataaactttctttattcattaa

SEQ ID NO: 297766 - DNA, 6822 bp, Homo sapiens
cagaggaacagggcaaacctctgacttccggcggcattttgaggcggtcctcctagcggcctggtagtgtttttgttgccttttcttaatctacaatctcttcgttatttttcttcctgcgacccagtttcgcttgaccctggagaggcggcgggcgggttggttctgcttctcagccatcccgggggctcctcgctagccaagagccggttcccgggagccgcgcgcgcatcgctttctcctcgtcgtcgtcctcctgggtccaggcgcggggacagagtcgcctcccccgctcctcggagcggcggcggcggtggtgcctccggactgcacttgcgaagggagcttggggaggaatagtacaaaatgtcaaaaattagaaggaaggtcacagtggaaaataccaagactatatctgatagcacatcccgaagacccagtgtatttgagaggcttggacccagcactggcagtacagcagagacacagtgccgtaactggctgaagactggcaactgcctctatggaaacacatgtagattcgtacatggcccttcacctcgtggtaaaggttatagcagcaattatagaaggtcaccagaaagacctacaggggatcttagagaaagaatgaagaacaagcgccaagacgtggacactgagccccagaaacgaaatacagaggagtcatcctcacctgttaggaaagaatcttcaagagggagacatagggaaaaggaagacataaaaatcactaaggaaagaactccagaaagtgaagaagaaaatgtagaatgggaaactaatagagatgattctgacaatggagatattaattatgattatgttcatgaattgtcattggaaatgaagcgtcagaagatacagagggaattaatgaagctggaacaagaaaacatggagaagagagaagaaattatcattaaaaaggaggtttcaccagaagtggttagatcaaaattgtccccgtcaccttctctaagaaagtctagcaaatctccgaagcgaaaatcaagcccgaagtcgtcttcagctagcaagaaagataggaagacatctgcagtatcttctcccctgttggaccagcagagaaattcaaaaaccaaccaaagtaaaaagaaaggaccacgtactcctagtccaccccctcctataccagaagatatcgctctggggaaaaaatacaaagaaaaatataaagtaaaagacaggatagaagaaaaaacaagagatggaaaggacagaggacgagattttgaacgacaaagagaaaagagagacaagccaaggtctacttccccagcaggacagcatcattctcctatatcttctagacatcactcatcttcctcacaatcaggatcatctattcaaagacattctccttctcctcgtcgaaaaagaactccttcaccatcttatcagcggacactaactccacctttacgacgctctgcctctccttatccttcacattctttgtcgtctccccagagaaagcagagtcctccaagacatcgctctccaatgcgagagaaagggagacatgatcatgaacgaacttcacagtctcatgatcgacgccacgaaaggagggaagatactaggggcaaacgagacagagaaaaggactcaagagaagaacgagaatatgaacaggatcagagctcttctagagaccacagagatgacagagaacctcgagatggtcgggatcggagagatgccagagatactagggaccgaagggaactaagagactccagagacatgcgggactcaagggagatgagagattatagcagagataccaaagagagccgtgatcccagagattctcggtccactcgtgatgcccatgactacagggaccgtgaaggtcgagatactcatcgaaaggaggatacatatccagaagaatcccggagttatggccgaaaccatttgagagaagaaagttctcgtacggaaataaggaatgagtccagaaatgagtctcgaagtgaaattagaaatgaccgaatgggccgaagtagggggagggttcctgagttacctgaaaagggaagtcgaggctcaagaggttctcaaattgatagtcacagtagtaatagcaactatcatgacagctgggaaactcgaagtagctatcctgaaagagatagatatcctgaaagagacaacagagatcaagcaagggattcttcctttgagagaagacatggagagcgagaccgtcgtgacaacagagagagagatcaaagaccaagctcaccaattcgacatcagggaaggaatgacgagcttgagcgtgatgaaagaagagaggaacgaagagtagacagagtggatgataggagagatgaaagggctagagagagagatcgggaacgagaacgagacagggagcgggagagagagagggaacgtgaacgggatcgggaaagagaaaaagagagagaactagaaagagagcgtgctagggaacgggagagagaaagagaaaaagagagagatcgtgaaagggatagagaccgagaccacgatcgagagcgggaaagagagagggaacgagacagggaaaaagaacgggaacgagaaagagaagagagagagagggagagagagcgagaacgggagagagagcgagagcgagaacgggaacgagaaagagcgagagaaagggataaagaacgagaacgccaaagggattgggaagacaaagacaaaggacgagatgaccgcagagaaaagcgagaagagatccgagaagataggaatccaagagatggacatgatgaaagaaaatcaaagaagcgctatagaaatgaagggagtcccagccctagacagtccccgaagcgccggcgtgaacattctccggacagtgatgcctacaacagtggagatgataaaaatgaaaaacacagactcttgagccaagttgtacgacctcaagaatctcgttctcttagtccctcgcacctcacagaagacagacagggtagatggaaagaggaggatcgtaaaccagaaaggaaagagagttcaaggcgctacgaagaacaggaactcaaggagaaagtttcttctgtagataaacagagagaacagacagaaatcctggaaagctcaagaatgcgtgcacaggacattataggacaccaccagtctgaagatcgagagacatctgatcgagctcatgatgaaaacaagaagaaagcaaaaattcaaaagaaaccaattaagaaaaagaaagaggatgatgttggaatagagaggggtaacatagagacaacatctgaagatggtcaagtattttcaccaaaaaaaggacagaaaaagaaaagcattgaaaaaaaacgtaaaaaatccaaaggtgattctgatatttctgatgaagaagcagcccagcaaagtaagaagaaaagaggcccacggactccccctataacaactaaagaggaattggttgaaatgtgcaatggtaagaatggtattctagaggactcccagaaaaaagaagatacagcattcagtgactggtctgatgaggatgtccctgaccgtacagaggtgacagaagcagagcatactgccaccgccacgactcctggtagtaccccttctcctctatcttctcttcttcctcctccaccgcctgtggctactgccactgctacaactgtgcctgcaactcttgctgccactactgctgctgccgccacctctttcagcacatctgccatcactatttccacctctgccacccccaccaataccaccaataatacttttgccaatgaagactcacacagaaaatgccacagaacacgagtagaaaaagtagagacgcctcacgtgactatagaagatgcacagcatcgcaagcctatggatcaaaagaggagcagcagcctcgggagcaatcggagtaaccgtagtcatacgtctggtcgtcttcgctccccatccaatgattcagcccatcgaagtggagatgaccaaagtggtcgaaagagagtactgcacagtggctcaagagatagagaaaaaacaaaaagcctggaaatcacaggagagagaaaatctaggattgatcagttaaagcgtggagaacccagtcgaagtacttcttcagatcgccaggattcaagaagccatagttcaagaagaagttctccagagtcagatcgacaggtccattcaagatctgggtcatttgatagcagagacaggcttcaagaacgagatcgatatgaacacgacagagagcgcgagagagagaggagagatacgaggcagagagaatgggaccgagatgctgataaagattggccacgcaacagggatcgagatagattgcgagaacgagaacgagagagagaacgagacaaaaggagagacttggatagggaaagagagagactaatttctgattctgttgaaagggacagggacagagacagagacagaacttttgagagttctcaaatagagtctgtgaaacgctgtgaagcaaaactggaaggtgaacatgaaagggatctagaaagcacttcccgagactctctagccttggataaagagagaatggataaagatctgggatctgtgcagggatttgaagatacaaataaatccgagagaactgagagtctggaagcaggagatgacgagtccaagttagatgatgcacattcattaggctctggtgctggagaaggatacgagccaatcagtgatgacgaactagatgaaattctggcaggtgatgcagaaaagagggaggaccaacaggatgaggagaagatgccagatcccttagatgtgatagatgtggattggtctggtcttatgccaaagcatccaaaagaaccacgagagcctggggctgcactcttaaaattcacacctggagctgttatgctaagagttgggatttctaaaaagttggcaggttctgaactctttgccaaagtcaaagaaacatgtcagagacttttagaaaaacccaaagatgcagacaatctctttgaacatgaattgggggctctcaatatggctgcattactacgaaaagaagaaagagcaagtcttcttagtaatcttggcccatgttgtaaggcgttgtgcttcagacgggattctgcaattcgaaagcagcttgttaaaaatgagaagggcaccataaaacaagcttacacgagtgctccaatggtagacaatgaattacttcgattgagtcttcggttatttaagcggaagactacttgccatgctccaggacatgaaaagactgaagataataaactttcacagtccagtatccaacaggaactgtgtgtgtcttaagaccgaagttcaatatggtatttttggtactgtcttccttcagcagtgcatattcttttgcaaagttctttggtttgacaagcattagtgacaaaggcagaaaagatttatcagccatgctaaaagagtgaagaattttgatctttagagacactagttttggccaacttaagattttacgttaatttttacatagtatttgacactcatgcaaaataatgtgaaaacatctagatttagtagtttattctgcgccttttgttaaaactgaagattttggaaaatggttgtcactgctcttccagcctatgaatatttttgtgaaatggaaccatggatttatgtctggatcatccatacagaaccaacaattttattcaaaaacaatgtgttcatcaaagtaattgctcacattgtgcagtactatgttgtacagaccacgtgaaagggaatgctggtctagctggcgtggtatgtttataggcgaatttcagcagaaggaagccaaaatagttttttccttttgaaagttttttaaaaattatttcatgggtcttttttttaattaatatgtgtgcattgttacaatgtatgttggatgtcttttgaccctaaatgctttttttgttatcagagattgtgtactatttttatttttaataaatgtatcttccctttccttgttttagatttactttgctcttcgttaatcttattcctgatgatctagaacattagtcatcaacattacatgtttcatgcttcagatattttactgcttgtgtccttattgttggacagctttaaacagagttgatgtacttcaaatatagctcattgatacttaaggcatcttcttggaatgtggcttttgaagaaaaaaattactcaaagcaaatcaagagttaacaaacctaacgtaacctgaggtttaatattctactatcatattttttagagctataacttttgattatattaaactgcctccagctgtactatgtaaaacagatttacttttaaaaattacagtatacctgctttgttctatatgtatatgtttaactcatgaagtggactcttagaaggatttgaaatggactctgggcacagaaattgtgagcagacagtagtagtgataataataaaagaaggcaatcaaaatttaattttatcatgccctctcacaggtttgtgttataattgtaagcccatattacttgtgttagtagttttgtctctataggtaacataatgacagtggtgtaaagtttctgttcaagaaacatatgttgtaaagttactttatacaagatacctgccaaaggaaatggtcttactttcaaatgactttgaaagcatgtataattgcaaacagagcaggagaagactttaatcagaatttctgtgcccatatacaggggatctctagagcgaccagcagca

SEQ ID NO: 297767 - DNA, 441 bp, Homo sapiens
caataaacagagaattatgggagttatcactgcaaggaaaatgatgagactcactagccttttttcaaatttgctttcaaatattatgtgtttcattcagtttttatgacttttatttctgctgttctccctttcccaacccagatatttacatgcatttgggaaatactccagagaccataactacaagtacctttaataatactgcctaatcattttcagaaatctgatgaatagaaggatgttagaagtgctgaagaaagaaaatgctaagtgaaattagccgggcatggtggccaggcgcctgtaatcccagctactcgggagcctgaggcaggagaattgcttgaactcgggaggcggaggttgcagtgagccgagatcacgccattgcaatccagcctgggtgacaagagtgaaactccgtctcaaaaaaaaaaa

SEQ ID NO: 297768 - DNA, 2216 bp, Homo sapiens
gttcgggtgtggatgcgcaggcgctttgagagacggtgaagccggtggccggtggccgggcgggaccaacaaagatggcggcggcccctgcggcgggagcgatctgggcaacggctgcggctaaagctgcagccgggcccacgggggggctgcacgggggtagtagggggtggccctgaactggggcctggccctggctggcctctcccgccgcctcactgggggacaggtccagcctgtggtgtccacaatgccccaggcctctgagcaccgcctgggccgtacccgagagccacctgttaatatccagccccgagtgggatccaagctaccatttgcccccagggcccgcagcaaggagcgcagaaacccagcctctgggccaaaccccatgttacgacctctgcctccccggccaggtctgcctgatgaacggctcaagaaactggagctgggacggggacggacctcaggccctcgtcccagaggcccccttcgagcagatcatggggttcccctgcctggctcaccacccccaacagtggctttgcctctcccatctcggaccaacttagcccgttccaagtctgtgagcagtggggacttgcgtccaatggggattgccttgggagggcaccgtggcaccggagagcttggggctgcactgagccgcttggccctccggcctgagccacccactttgagacgtagcacttctctccgccgcctagggggctttcctggaccccctaccctgttcagcatacggacagagccccctgcttcccatggctccttccacatgatatccgcccggtcctctgagcctttctactctgatgacaagatggctcatcacacactccttctgggctctggtcatgttggccttcgaaacctgggaaacacgtgcttcctgaatgctgtgctgcagtgtctgagcagcactcgacctcttcgggacttctgtctgagaagggacttccggcaagaggtgcctggaggaggccgagcccaagagctcactgaagcctttgcagatgtgattggtgccctctggcaccctgactcctgcgaagctgtgaatcctactcgattccgagctgtcttccagaaatatgttccctccttctctggatacagccagcaggatgcccaagagttcctgaagctcctcatggagcggctacaccttgaaatcaaccgccgaggccgccgggctccaccgatacttgccaatggtccagttccctctccaccccgccgaggaggggctctgctagaagaacctgagttaagtgatgatgaccgagccaacctaatgtggaaacgttacctggagcgagaggacagcaagattgtggacctgtttgtgggccagttgaaaagttgtctcaagtgccaggcctgtgggtatcgctccacgaccttcgaggttttttgtgacctgtccctgcccatccccaagaaaggatttgctgggggcaaggtgtctctgcgggattgtttcaaccttttcactaaggaagaagagctagagtcggagaatgccccagtgtgtgaccgatgtcggcagaaaactcgaagtaccaaaaagttgacagtacaaagattccctcgaatcctcgtgctccatctgaatcgattttctgcctcccgaggctccatcaaaaaaagttcagtaggtgtagactttccactgcagcgactgagcctaggggactttgccagtgacaaagccggaagtcctgtataccagctgtatgccctttgcaaccactcaggcagcgtccactatggccactacacagccctgtgccggtgccagactggttggcatgtctacaatgactctcgtgtctcccctgtcagtgaaaaccaggtggcatccagcgagggctacgtgctgttctaccaactgatgcaggagccaccccggtgcctgtgacacctctaagctctggcacctgtgaagccctttaaacacccttaagccccaggctccccgtttacctcagagacgtctatttttgtgtctttttaatcggggaggggggagggggtggttgtagctccattattttttttattaaaaaatacccttccacctggaggctcccttgtctcccagccccatgtacaaagctcaccaagcccctgcccatgtacagcccccagaccctctgcaatatcactttttgtgaataaatttatta

SEQ ID NO: 297769 - DNA, 2514 bp, Homo sapiens
  misc_feature (5)..(5): n is a, c, g, or t
  misc_feature (7)..(8): n is a, c, g, or t
cagcngnntggacatgcctctcccttgcttaaatacccttgagcctcctagacccttttttgggttgttggtgactcttcagcatggtgtgccatttcggtccccaggggattaccccaactatttagaattcttctttgggtccccaggcccttcctttcccttgcttgcaccttctctactgggactctgcctaggcctaattaatctctggagctaaagagaggcaggcacagaacatcttagcaaacgtggttgcacattttctgagctaagtaagctaggctgattgcaattggagccagcaggagaagggcaagaaggggccacgggggcaggagggggttttgggggcagaaaggtgggagtggtgagcagctgggcaaccatgccggtgctgggggagttgccccaggagctgcaacgtcagctagctgagcagaggagtaagtgggcaacaggtgggacagccatggctgagtccgtggtacattcagctgtgatgggcttactgctcatgaccagtgaggtagggagactagaatacctagtgaggggaatagggtagagtttggggatgaaacatgcatgggatgggggaggcagtgggcagcatgctgttgaaaggttaaagtgccaggtaggatatataggaacttgccgattgtactctgaccttccaggctcatcacacactccttctgggctctggtcatgttggccttcgaaacctgggaaacacgtgcttcctgaatgctgtgctgcagtgtctgagcagcactcgacctcttcgggacttctgtctgagaagggacttccggcaagaggtgcctggaggaggccgagcccaagagctcactgaagcctttgcagatgtgattggtgccctctggcaccctgactcctgcgaagctgtgaatcctactcgattccgagctgtcttccagaaatatgttccctccttctctggatacagccagcaggatgcccaagagttcctgaagctcctcatggagcggctacaccttgaaatcaaccgccgaggccgccgggctccaccgatacttgccaatggtccagttccctctccaccccgccgaggaggggctctgctagaagaacctgagttaagtgatgatgaccgagccaacctaatgtggaaacgttacctggagcgagaggacagcaagattgtggacctgtttgtgggccagttgaaaagttgtctcaagtgccaggcctgtgggtatcgctccacgaccttcgaggttttttgtgacctgtccctgcccatccccaaggtgggattccagaggattccggggtggacaggacaggggctctgtgacccaagcctacccacccccagagtgtgggcgggaaccctgtgggtttctggagcagaactgaagcctggattgattgagaagagttggaaaaggaaattcagaacatgttgacctttcttccccttttcccccagaaaggatttgctgggggcaaggtgtctctgcgggattgtttcaaccttttcactaaggaagaagagctagagtcggagaatgccccagtatgtggaggttcacaagggatacagtaagggtgggagacctggggggactccatgtggataaaagggattgcatgatgtcttcatatggggaataatatttatgtatctgggtttgtgttggagtctcagatctgttctagtactcctagagcaaaggggagaagccaagaggatccagctgtaatgaagagcatactaaatttgtatgtggatcggggtgtcagaaaagccaattgaggttaggagcatattaacctaacactgtttgccatttattcaggtgtgtgaccgatgtcggcagaaaactcgaagtaccaaaaagttgacagtacaaagattccctcgaatcctcgtgctccatctgaatcgattttctgcctcccgaggctccatcaaaaaaagttcagtaggtgtagactttccactgcagcgactgagcctaggggactttgccagtgacaaagccggaagtcctgtataccagctgtatgccctttgcaaccactcaggcagcgtccactatggccactacacagccctgtgccggtgccagactggttggcatgtctacaatgactctcgtgtctcccctgtcagtgaaaaccaggtggcatccagcgagggctacgtgctgttctaccaactgatgcaggagccaccccggtgcctgtgacacctctaagctctggcacctgtgaagccctttaaacacccttaagccccaggctccccgtttacctcagagacgtctatttttgtgtctttttaatcggggaggggggagggggtggttgtagctccattattttttttattaaaaaatacccttccacctggaggctcccttgtctcccagccccatgtacaaagctcaccaagcccctgcccatgtacagcccccagaccctctgcaatatcactttttgtgaataaatttatta

SEQ ID NO: 297770 - DNA, 2174 bp, Homo sapiens
gttcgggtgtggatgcgcaggcgctttgagagacggtgaagccggtggccggtggccgggcgggaccaacaaagatggcggcggcccctgcggcgggagcgatctgggcaacggctgcggctaaagctgcagccgggcccacgggggggctgcacgggggtagtagggggtggccctgaactggggcctggccctggctggcctctcccgccgcctcactgggggacaggtccagcctgtggtgtccacaatgccccaggcctctgagcaccgcctgggccgtacccgagagccacctgttaatatccagccccgagtgggatccaagctaccatttgcccccagggcccgcagcaaggagcgcagaaacccagcctctgggccaaaccccatgttacgacctctgcctccccggccaggtctgcctgatgaacggctcaagaaactggagctgggacggggacggacctcaggccctcgtcccagaggcccccttcgagcagatcatggggttcccctgcctggctcaccacccccaacagtggctttgcctctcccatctcggaccaacttagcccgttccaagtctgtgagcagtggggacttgcgtccaatggggattgccttgggagggcaccgtggcaccggagagcttggggctgcactgagccgcttggccctccggcctgagccacccactttgagacgtagcacttctctccgccgcctagggggctttcctggaccccctaccctgttcagcatacggacagagccccctgcttcccatggctccttccacatgatatccgcccggtcctctgagcctttctactctgatgacaagatggctcatcacacactccttctgggctctggtcatgttggccttcgaaacctgggaaacacgtgcttcctgaatgctgtgctgcagtgtctgagcagcactcgacctcttcgggacttctgtctgagaagggacttccggcaagaggtgcctggaggaggccgagcccaagagctcactgaagcctttgcagatgtgattggtgccctctggcaccctgactcctgcgaagctgtgaatcctactcgattccgagctgtcttccagaaatatgttccctccttctctggatacagccagcaggatgcccaagagttcctgaagctcctcatggagcggctacaccttgaaatcaaccgccgaggccgccgggctccaccgatacttgccaatggtccagttccctctccaccccgccgaggaggggctctgctagaagaacctgagttaagtgatgatgaccgagccaacctaatgtggaaacgttacctggagcgagaggacagcaagattgtggacctgtttgtgggccagttgaaaagttgtctcaagtgccaggcctgtgggtatcgctccacgaccttcgaggttttttgtgacctgtccctgcccatccccaagaaaggatttgctgggggcaaggtgtctctgcgggattgtttcaaccttttcactaaggaagaagagctagagtcggagaatgccccagtgtgtgaccgatgtcggcagaaaactcgaagtaccaaaaagttgacagtacaaagattccctcgaatcctcgtgctccatctgaatcgattttctgcctcccgaggctccatcaaaaaaagttcagtaggtgtagactttccactgcagcgactgagcctaggggactttgccagtgacaaagccggcagcgtccactatggccactacacagccctgtgccggtgccagactggttggcatgtctacaatgactctcgtgtctcccctgtcagtgaaaaccaggtggcatccagcgagggctacgtgctgttctaccaactgatgcaggagccaccccggtgcctgtgacacctctaagctctggcacctgtgaagccctttaaacacccttaagccccaggctccccgtttacctcagagacgtctatttttgtgtctttttaatcggggaggggggagggggtggttgtagctccattattttttttattaaaaaatacccttccacctggaggctcccttgtctcccagccccatgtacaaagctcaccaagcccctgcccatgtacagcccccagaccctctgcaatatcactttttgtgaataaatttatta

SEQ ID NO: 297771 - DNA, 459 bp, Homo sapiens
ttgcctgatcatttcctggatgctctgaggttcggtcttgtagggagaagggagtaaacaggaatgaccacaaccctttcccgatctccttttttcctagtgtctcccctgtcagtgaaaaccaggtggcatccagcgagggctacgtgctgttctaccaactgatgcaggagccaccccggtgcctgtgacacctctaagctctggcacctgtgaagccctttaaacacccttaagccccaggctccccgtttacctcagagacgtctatttttgtgtctttttaatcggggaggggggagggggtggttgtagctccattattttttttattaaaaaatacccttccacctggaggctcccttgtctcccagccccatgtacaaagctcaccaagcccctgcccatgtacagcccccagaccctctgcaatatcactttttgtgaataaatttatta

SEQ ID NO: 297772 - DNA, 2357 bp, Homo sapiens
gttcgggtgtggatgcgcaggcgctttgagagacggtgaagccggtggccggtggccgggcgggaccaacaaagatggcggcggcccctgcggcgggagcgatctgggcaacggctgcggctaaagctgcagccgggcccacgggggggctgcacgggggtagtagggggtggccctgaactggggcctggccctggctggcctctcccgccgcctcactgggggacaggtactggggatacgatggctgattcgatagatctggttcctgccctcagtgcgtatactgctccccactttcgttgatgtggtagtggtgatgactgagccaaccacctaatgtggaaatgagaggacagcaagattgtgggtccagcctgtggtgtccacaatgccccaggcctctgagcaccgcctgggccgtacccgagagccacctgttaatatccagccccgagtgggatccaagctaccatttgcccccagggcccgcagcaaggagcgcagaaacccagcctctgggccaaaccccatgttacgacctctgcctccccggccaggtctgcctgatgaacggctcaagaaactggagctgggacggggacggacctcaggccctcgtcccagaggcccccttcgagcagatcatggggttcccctgcctggctcaccacccccaacagtggctttgcctctcccatctcggaccaacttagcccgttccaagtctgtgagcagtggggacttgcgtccaatggggattgccttgggagggcaccgtggcaccggagagcttggggctgcactgagccgcttggccctccggcctgagccacccactttgagacgtagcacttctctccgccgcctagggggctttcctggaccccctaccctgttcagcatacggacagagccccctgcttcccatggctccttccacatgatatccgcccggtcctctgagcctttctactctgatgacaagatggctcatcacacactccttctgggctctggtcatgttggccttcgaaacctgggaaacacgtgcttcctgaatgctgtgctgcagtgtctgagcagcactcgacctcttcgggacttctgtctgagaagggacttccggcaagaggtgcctggaggaggccgagcccaagagctcactgaagcctttgcagatgtgattggtgccctctggcaccctgactcctgcgaagctgtgaatcctactcgattccgagctgtcttccagaaatatgttccctccttctctggatacagccagcaggatgcccaagagttcctgaagctcctcatggagcggctacaccttgaaatcaaccgccgaggccgccgggctccaccgatacttgccaatggtccagttccctctccaccccgccgaggaggggctctgctagaagaacctgagttaagtgatgatgaccgagccaacctaatgtggaaacgttacctggagcgagaggacagcaagattgtggacctgtttgtgggccagttgaaaagttgtctcaagtgccaggcctgtgggtatcgctccacgaccttcgaggttttttgtgacctgtccctgcccatccccaagaaaggatttgctgggggcaaggtgtctctgcgggattgtttcaaccttttcactaaggaagaagagctagagtcggagaatgccccagtgtgtgaccgatgtcggcagaaaactcgaagtaccaaaaagttgacagtacaaagattccctcgaatcctcgtgctccatctgaatcgattttctgcctcccgaggctccatcaaaaaaagttcagtaggtgtagactttccactgcagcgactgagcctaggggactttgccagtgacaaagccggaagtcctgtataccagctgtatgccctttgcaaccactcaggcagcgtccactatggccactacacagccctgtgccggtgccagactggttggcatgtctacaatgactctcgtgtctcccctgtcagtgaaaaccaggtggcatccagcgagggctacgtgctgttctaccaactgatgcaggagccaccccggtgcctgtgacacctctaagctctggcacctgtgaagccctttaaacacccttaagccccaggctccccgtttacctcagagacgtctatttttgtgtctttttaatcggggaggggggagggggtggttgtagctccattattttttttattaaaaaatacccttccacctggaggctcccttgtctcccagccccatgtacaaagctcaccaagcccctgcccatgtacagcccccagaccctctgcaatatcactttttgtgaataaatttatta

SEQ ID NO: 297773 - DNA, 2394 bp, Homo sapiens
gttcgggtgtggatgcgcaggcgctttgagagacggtgaagccggtggccggtggccgggcgggaccaacaaagatggcggcggcccctgcggcgggagcgatctgggcaacggctgcggctaaagctgcagccgggcccacgggggggctgcacgggggtagtagggggtggccctgaactggggcctggccctggctggcctctcccgccgcctcactgggggacagatactaagtatttactttgtaccaaacacgatgccaggtactggggatacgatggctgattcgatagatctggttcctgccctcagtgcgtatactgctccccactttcgttgatgtggtagtggtgatgactgagccaaccacctaatgtggaaatgagaggacagcaagattgtgggtccagcctgtggtgtccacaatgccccaggcctctgagcaccgcctgggccgtacccgagagccacctgttaatatccagccccgagtgggatccaagctaccatttgcccccagggcccgcagcaaggagcgcagaaacccagcctctgggccaaaccccatgttacgacctctgcctccccggccaggtctgcctgatgaacggctcaagaaactggagctgggacggggacggacctcaggccctcgtcccagaggcccccttcgagcagatcatggggttcccctgcctggctcaccacccccaacagtggctttgcctctcccatctcggaccaacttagcccgttccaagtctgtgagcagtggggacttgcgtccaatggggattgccttgggagggcaccgtggcaccggagagcttggggctgcactgagccgcttggccctccggcctgagccacccactttgagacgtagcacttctctccgccgcctagggggctttcctggaccccctaccctgttcagcatacggacagagccccctgcttcccatggctccttccacatgatatccgcccggtcctctgagcctttctactctgatgacaagatggctcatcacacactccttctgggctctggtcatgttggccttcgaaacctgggaaacacgtgcttcctgaatgctgtgctgcagtgtctgagcagcactcgacctcttcgggacttctgtctgagaagggacttccggcaagaggtgcctggaggaggccgagcccaagagctcactgaagcctttgcagatgtgattggtgccctctggcaccctgactcctgcgaagctgtgaatcctactcgattccgagctgtcttccagaaatatgttccctccttctctggatacagccagcaggatgcccaagagttcctgaagctcctcatggagcggctacaccttgaaatcaaccgccgaggccgccgggctccaccgatacttgccaatggtccagttccctctccaccccgccgaggaggggctctgctagaagaacctgagttaagtgatgatgaccgagccaacctaatgtggaaacgttacctggagcgagaggacagcaagattgtggacctgtttgtgggccagttgaaaagttgtctcaagtgccaggcctgtgggtatcgctccacgaccttcgaggttttttgtgacctgtccctgcccatccccaagaaaggatttgctgggggcaaggtgtctctgcgggattgtttcaaccttttcactaaggaagaagagctagagtcggagaatgccccagtgtgtgaccgatgtcggcagaaaactcgaagtaccaaaaagttgacagtacaaagattccctcgaatcctcgtgctccatctgaatcgattttctgcctcccgaggctccatcaaaaaaagttcagtaggtgtagactttccactgcagcgactgagcctaggggactttgccagtgacaaagccggaagtcctgtataccagctgtatgccctttgcaaccactcaggcagcgtccactatggccactacacagccctgtgccggtgccagactggttggcatgtctacaatgactctcgtgtctcccctgtcagtgaaaaccaggtggcatccagcgagggctacgtgctgttctaccaactgatgcaggagccaccccggtgcctgtgacacctctaagctctggcacctgtgaagccctttaaacacccttaagccccaggctccccgtttacctcagagacgtctatttttgtgtctttttaatcggggaggggggagggggtggttgtagctccattattttttttattaaaaaatacccttccacctggaggctcccttgtctcccagccccatgtacaaagctcaccaagcccctgcccatgtacagcccccagaccctctgcaatatcactttttgtgaataaatttatta

SEQ ID NO: 297774 - DNA, 2298 bp, Homo sapiens
gttcgggtgtggatgcgcaggcgctttgagagacggtgaagccggtggccggtggccgggcgggaccaacaaagatggcggcggcccctgcggcgggagcgatctgggcaacggctgcggctaaagctgcagccgggcccacgggggggctgcacgggggtagtagggggtggccctgaactggggcctggccctggctggcctctcccgccgcctcactgggggacaggtactggggatacgatggctgattcgatagatctggttcctgccctcagtgcgtatactgctccccactttcgttgatgtggtagtggtgatgactgagccaaccacctaatgtggaaatgagaggacagcaagattgtgggtccagcctgtggtgtccacaatgccccaggcctctgagcaccgcctgggccgtacccgagagccacctgttaatatccagccccgagtgggatccaagctaccatttgcccccagggcccgcagcaaggagcgcagaaacccagcctctgggccaaaccccatgttacgacctctgcctccccggccaggtctgcctgatgaacggctcaagaaactggagctgggacggggacggacctcaggccctcgtcccagaggcccccttcgagcagatcatggggttcccctgcctggctcaccacccccaacagtggctttgcctctcccatctcggaccaacttagcccgttccaagtctgtgagcagtggggacttgcgtccaatggggattgccttgggagggcaccgtggcaccggagagcttggggctgcactgagccgcttggccctccggcctgagccacccactttgagacgtagcacttctctccgccgcctagggggctttcctggaccccctaccctgttcagcatacggacagagccccctgcttcccatggctccttccacatgatatccgcccggtcctctgagcctttctactctgatgacaagatggctcatcacacactccttctgggctctggtcatgttggccttcgaaacctgggaaacacgtgcttcctgaatgctgtgctgcagtgtctgagcagcactcgacctcttcgggacttctgtctgagaagggacttccggcaagaggtgcctggaggaggccgagcccaagagctcactgaagcctttgcagatgtgattggtgccctctggcaccctgactcctgcgaagctgtgaatcctactcgattccgagctgtcttccagaaatatgttccctccttctctggatacagccagcaggatgcccaagagttcctgaagctcctcatggagcggctacaccttgaaatcaaccgccgaggccgccgggctccaccgatacttgccaatggtccagttccctctccaccccgccgaggaggggctctgctagaagaacctgagttaagtgatgatgaccgagccaacctaatgtggaaacgttacctggagcgagaggacagcaagattgtggacctgtttgtgggccagttgaaaagttgtctcaagtgccaggcctaaaggatttgctgggggcaaggtgtctctgcgggattgtttcaaccttttcactaaggaagaagagctagagtcggagaatgccccagtgtgtgaccgatgtcggcagaaaactcgaagtaccaaaaagttgacagtacaaagattccctcgaatcctcgtgctccatctgaatcgattttctgcctcccgaggctccatcaaaaaaagttcagtaggtgtagactttccactgcagcgactgagcctaggggactttgccagtgacaaagccggaagtcctgtataccagctgtatgccctttgcaaccactcaggcagcgtccactatggccactacacagccctgtgccggtgccagactggttggcatgtctacaatgactctcgtgtctcccctgtcagtgaaaaccaggtggcatccagcgagggctacgtgctgttctaccaactgatgcaggagccaccccggtgcctgtgacacctctaagctctggcacctgtgaagccctttaaacacccttaagccccaggctccccgtttacctcagagacgtctatttttgtgtctttttaatcggggaggggggagggggtggttgtagctccattattttttttattaaaaaatacccttccacctggaggctcccttgtctcccagccccatgtacaaagctcaccaagcccctgcccatgtacagcccccagaccctctgcaatatcactttttgtgaataaatttatta

SEQ ID NO: 297775 - DNA, 2822 bp, Homo sapiens
gttcgggtgtggatgcgcaggcgctttgagagacggtgaagccggtggccggtggccgggcgggaccaacaaagatggcggcggcccctgcggcgggagcgatctgggcaacggctgcggctaaagctgcagccgggcccacgggggggctgcacgggggtagtagggggtggccctgaactggggcctggccctggctggcctctcccgccgcctcactgggggacaggtactggggatacgatggctgattcgatagatctggttcctgccctcagtgcgtatactgctccccactttcgttgatgtggtagtggtgatgactgagccaaccacctaatgtggaaatgagaggacagcaagattgtgggtccagcctgtggtgtccacaatgccccaggcctctgagcaccgcctgggccgtacccgagagccacctgttaatatccagccccgagtgggatccaagctaccatttgcccccagggcccgcagcaaggagcgcagaaacccagcctctgggccaaaccccatgttacgacctctgcctccccggccaggtctgcctgatgaacggctcaagaaactggagctgggacggggacggacctcaggccctcgtcccagaggcccccttcgagcagatcatggggttcccctgcctggctcaccacccccaacagtggctttgcctctcccatctcggaccaacttagcccgttccaagtctgtgagcagtggggacttgcgtccaatggggattgccttgggagggcaccgtggcaccggagagcttggggctgcactgagccgcttggccctccggcctgagccacccactttgagacgtagcacttctctccgccgcctagggggctttcctggaccccctaccctgttcagcatacggacagagccccctgcttcccatggctccttccacatgatatccgcccggtcctctgagcctttctactctgatgacaagatggctcatcacacactccttctgggctctggtcatgttggccttcgaaacctgggaaacacgtgcttcctgaatgctgtgctgcagtgtctgagcagcactcgacctcttcgggacttctgtctgagaagggacttccggcaagaggtgcctggaggaggccgagcccaagagctcactgaagcctttgcagatgtgattggtgccctctggcaccctgactcctgcgaagctgtgaatcctactcgattccgagctgtcttccagaaatatgttccctccttctctggatacagccagcaggatgcccaagagttcctgaagctcctcatggagcggctacaccttgaaatcaaccgccgaggccgccgggctccaccgatacttgccaatggtccagttccctctccaccccgccgaggaggggctctgctagaagaacctgagttaagtgatgatgaccgagccaacctaatgtggaaacgttacctggagcgagaggacagcaagattgtggacctgtttgtgggccagttgaaaagttgtctcaagtgccaggcctgtgggtatcgctccacgaccttcgaggttttttgtgacctgtccctgcccatccccaaggtgggattccagaggattccggggtggacaggacaggggctctgtgacccaagcctacccacccccagagtgtgggcgggaaccctgtgggtttctggagcagaactgaagcctggattgattgagaagagttggaaaaggaaattcagaacatgttgacctttcttccccttttcccccagaaaggatttgctgggggcaaggtgtctctgcgggattgtttcaaccttttcactaaggaagaagagctagagtcggagaatgccccagtatgtggaggttcacaagggatacagtaagggtgggagacctggggggactccatgtggataaaagggattgcatgatgtcttcatatggggaataatatttatgtatctgggtttgtgttggagtctcagatctgttctagtactcctagagcaaaggggagaagccaagaggatccagctgtaatgaagagcatactaaatttgtatgtggatcggggtgtcagaaaagccaattgaggttaggagcatattaacctaacactgtttgccatttattcaggtgtgtgaccgatgtcggcagaaaactcgaagtaccaaaaagttgacagtacaaagattccctcgaatcctcgtgctccatctgaatcgattttctgcctcccgaggctccatcaaaaaaagttcagtaggtgtagactttccactgcagcgactgagcctaggggactttgccagtgacaaagccggaagtcctgtataccagctgtatgccctttgcaaccactcaggcagcgtccactatggccactacacagccctgtgccggtgccagactggttggcatgtctacaatgactctcgtgtctcccctgtcagtgaaaaccaggtggcatccagcgagggctacgtgctgttctaccaactgatgcaggagccaccccggtgcctgtgacacctctaagctctggcacctgtgaagccctttaaacacccttaagccccaggctccccgtttacctcagagacgtctatttttgtgtctttttaatcggggaggggggagggggtggttgtagctccattattttttttattaaaaaatacccttccacctggaggctcccttgtctcccagccccatgtacaaagctcaccaagcccctgcccatgtacagcccccagaccctctgcaatatcactttttgtgaataaatttatta

SEQ ID NO: 297776 - DNA, 2579 bp, Homo sapiens
gttcgggtgtggatgcgcaggcgctttgagagacggtgaagccggtggccggtggccgggcgggaccaacaaagatggcggcggcccctgcggcgggagcgatctgggcaacggctgcggctaaagctgcagccgggcccacgggggggctgcacgggggtagtagggggtggccctgaactggggcctggccctggctggcctctcccgccgcctcactgggggacaggtactggggatacgatggctgattcgatagatctggttcctgccctcagtgcgtatactgctccccactttcgttgatgtggtagtggtgatgactgagccaaccacctaatgtggaaatgagaggacagcaagattgtgggtccagcctgtggtgtccacaatgccccaggcctctgagcaccgcctgggccgtacccgagagccacctgttaatatccagccccgagtgggatccaagctaccatttgcccccagggcccgcagcaaggagcgcagaaacccagcctctgggccaaaccccatgttacgacctctgcctccccggccaggtctgcctgatgaacggctcaagaaactggagctgggacggggacggacctcaggccctcgtcccagaggcccccttcgagcagatcatggggttcccctgcctggctcaccacccccaacagtggctttgcctctcccatctcggaccaacttagcccgttccaagtctgtgagcagtggggacttgcgtccaatggggattgccttgggagggcaccgtggcaccggagagcttggggctgcactgagccgcttggccctccggcctgagccacccactttgagacgtagcacttctctccgccgcctagggggctttcctggaccccctaccctgttcagcatacggacagagccccctgcttcccatggctccttccacatgatatccgcccggtcctctgagcctttctactctgatgacaagatggctcatcacacactccttctgggctctggtcatgttggccttcgaaacctgggaaacacgtgcttcctgaatgctgtgctgcagtgtctgagcagcactcgacctcttcgggacttctgtctgagaagggacttccggcaagaggtgcctggaggaggccgagcccaagagctcactgaagcctttgcagatgtgattggtgccctctggcaccctgactcctgcgaagctgtgaatcctactcgattccgagctgtcttccagaaatatgttccctccttctctggatacagccagcaggatgcccaagagttcctgaagctcctcatggagcggctacaccttgaaatcaaccgccgaggccgccgggctccaccgatacttgccaatggtccagttccctctccaccccgccgaggaggggctctgctagaagaacctgagttaagtgatgatgaccgagccaacctaatgtggaaacgttacctggagcgagaggacagcaagattgtggacctgtttgtgggccagttgaaaagttgtctcaagtgccaggcctgtgggtatcgctccacgaccttcgaggttttttgtgacctgtccctgcccatccccaagaaaggatttgctgggggcaaggtgtctctgcgggattgtttcaaccttttcactaaggaagaagagctagagtcggagaatgccccagtgtgtgaccgatgtcggcagaaaactcgaagtaccaaaaagttgacagtacaaagattccctcgaatcctcgtgctccatatcctaatcttcagattcttacttctcttaggatacctcccatacattctctttcctccatgtttccagagaattgaattttccttaggaaaagtctgccacccacttttccacaagatgctcccagtgtgtcgggagtggggagaggacagctttcaggatagaagaagttcccctcagaggcccactgcctcccaaatgctccttaaccagggcttagatctgaatcgattttctgcctcccgaggctccatcaaaaaaagttcagtaggtgtagactttccactgcagcgactgagcctaggggactttgccagtgacaaagccggaagtcctgtataccagctgtatgccctttgcaaccactcaggcagcgtccactatggccactacacagccctgtgccggtgccagactggttggcatgtctacaatgactctcgtgtctcccctgtcagtgaaaaccaggtggcatccagcgagggctacgtgctgttctaccaactgatgcaggagccaccccggtgcctgtgacacctctaagctctggcacctgtgaagccctttaaacacccttaagccccaggctccccgtttacctcagagacgtctatttttgtgtctttttaatcggggaggggggagggggtggttgtagctccattattttttttattaaaaaatacccttccacctggaggctcccttgtctcccagccccatgtacaaagctcaccaagcccctgcccatgtacagcccccagaccctctgcaatatcactttttgtgaataaatttatta

SEQ ID NO: 297777 - DNA, 2520 bp, Homo sapiens
gttcgggtgtggatgcgcaggcgctttgagagacggtgaagccggtggccggtggccgggcgggaccaacaaagatggcggcggcccctgcggcgggagcgatctgggcaacggctgcggctaaagctgcagccgggcccacgggggggctgcacgggggtagtagggggtggccctgaactggggcctggccctggctggcctctcccgccgcctcactgggggacaggtactggggatacgatggctgattcgatagatctggttcctgccctcagtgcgtatactgctccccactttcgttgatgtggtagtggtgatgactgagccaaccacctaatgtggaaatgagaggacagcaagattgtgggtccagcctgtggtgtccacaatgccccaggcctctgagcaccgcctgggccgtacccgagagccacctgttaatatccagccccgagtgggatccaagctaccatttgcccccagggcccgcagcaaggagcgcagaaacccagcctctgggccaaaccccatgttacgacctctgcctccccggccaggtctgcctgatgaacggctcaagaaactggagctgggacggggacggacctcaggccctcgtcccagaggcccccttcgagcagatcatggggttcccctgcctggctcaccacccccaacagtggctttgcctctcccatctcggaccaacttagcccgttccaagtctgtgagcagtggggacttgcgtccaatggggattgccttgggagggcaccgtggcaccggagagcttggggctgcactgagccgcttggccctccggcctgagccacccactttgagacgtagcacttctctccgccgcctagggggctttcctggaccccctaccctgttcagcatacggacagagccccctgcttcccatggctccttccacatgatatccgcccggtcctctgagcctttctactctgatgacaagatggctcatcacacactccttctgggctctggtcatgttggccttcgaaacctgggaaacacgtgcttcctgaatgctgtgctgcagtgtctgagcagcactcgacctcttcgggacttctgtctgagaagggacttccggcaagaggtgcctggaggaggccgagcccaagagctcactgaagcctttgcagatgtgattggtgccctctggcaccctgactcctgcgaagctgtgaatcctactcgattccgagctgtcttccagaaatatgttccctccttctctggatacagccagcaggatgcccaagagttcctgaagctcctcatggagcggctacaccttgaaatcaaccgccgaggccgccgggctccaccgatacttgccaatggtccagttccctctccaccccgccgaggaggggctctgctagaagaacctgagttaagtgatgatgaccgagccaacctaatgtggaaacgttacctggagcgagaggacagcaagattgtggacctgtttgtgggccagttgaaaagttgtctcaagtgccaggcctaaaggatttgctgggggcaaggtgtctctgcgggattgtttcaaccttttcactaaggaagaagagctagagtcggagaatgccccagtgtgtgaccgatgtcggcagaaaactcgaagtaccaaaaagttgacagtacaaagattccctcgaatcctcgtgctccatatcctaatcttcagattcttacttctcttaggatacctcccatacattctctttcctccatgtttccagagaattgaattttccttaggaaaagtctgccacccacttttccacaagatgctcccagtgtgtcgggagtggggagaggacagctttcaggatagaagaagttcccctcagaggcccactgcctcccaaatgctccttaaccagggcttagatctgaatcgattttctgcctcccgaggctccatcaaaaaaagttcagtaggtgtagactttccactgcagcgactgagcctaggggactttgccagtgacaaagccggaagtcctgtataccagctgtatgccctttgcaaccactcaggcagcgtccactatggccactacacagccctgtgccggtgccagactggttggcatgtctacaatgactctcgtgtctcccctgtcagtgaaaaccaggtggcatccagcgagggctacgtgctgttctaccaactgatgcaggagccaccccggtgcctgtgacacctctaagctctggcacctgtgaagccctttaaacacccttaagccccaggctccccgtttacctcagagacgtctatttttgtgtctttttaatcggggaggggggagggggtggttgtagctccattattttttttattaaaaaatacccttccacctggaggctcccttgtctcccagccccatgtacaaagctcaccaagcccctgcccatgtacagcccccagaccctctgcaatatcactttttgtgaataaatttatta

SEQ ID NO: 297778 - DNA, 2211 bp, Homo sapiens
gttcgggtgtggatgcgcaggcgctttgagagacggtgaagccggtggccggtggccgggcgggaccaacaaagatggcggcggcccctgcggcgggagcgatctgggcaacggctgcggctaaagctgcagccgggcccacgggggggctgcacgggggtagtagggggtggccctgaactggggcctggccctggctggcctctcccgccgcctcactgggggacaggtactggggatacgatggctgattcgatagatctggttcctgccctcagtgcgtatactgctccccactttcgttgatgtggtagtggtgatgactgagccaaccacctaatgtggaaatgagaggacagcaagattgtgggtccagcctgtggtgtccacaatgccccaggcctctgagcaccgcctgggccgtacccgagagccacctgttaatatccagccccgagtgggatccaagctaccatttgcccccagggcccgcagcaaggagcgcagaaacccagcctctgggccaaaccccatgttacgacctctgcctccccggccaggtctgcctgatgaacggctcaagaaactggagctgggacggggacggacctcaggccctcgtcccagaggcccccttcgagcagatcatggggttcccctgcctggctcaccacccccaacagtggctttgcctctcccatctcggaccaacttagcccgttccaaggggctttcctggaccccctaccctgttcagcatacggacagagccccctgcttcccatggctccttccacatgatatccgcccggtcctctgagcctttctactctgatgacaagatggctcatcacacactccttctgggctctggtcatgttggccttcgaaacctgggaaacacgtgcttcctgaatgctgtgctgcagtgtctgagcagcactcgacctcttcgggacttctgtctgagaagggacttccggcaagaggtgcctggaggaggccgagcccaagagctcactgaagcctttgcagatgtgattggtgccctctggcaccctgactcctgcgaagctgtgaatcctactcgattccgagctgtcttccagaaatatgttccctccttctctggatacagccagcaggatgcccaagagttcctgaagctcctcatggagcggctacaccttgaaatcaaccgccgaggccgccgggctccaccgatacttgccaatggtccagttccctctccaccccgccgaggaggggctctgctagaagaacctgagttaagtgatgatgaccgagccaacctaatgtggaaacgttacctggagcgagaggacagcaagattgtggacctgtttgtgggccagttgaaaagttgtctcaagtgccaggcctgtgggtatcgctccacgaccttcgaggttttttgtgacctgtccctgcccatccccaagaaaggatttgctgggggcaaggtgtctctgcgggattgtttcaaccttttcactaaggaagaagagctagagtcggagaatgccccagtgtgtgaccgatgtcggcagaaaactcgaagtaccaaaaagttgacagtacaaagattccctcgaatcctcgtgctccatctgaatcgattttctgcctcccgaggctccatcaaaaaaagttcagtaggtgtagactttccactgcagcgactgagcctaggggactttgccagtgacaaagccggaagtcctgtataccagctgtatgccctttgcaaccactcaggcagcgtccactatggccactacacagccctgtgccggtgccagactggttggcatgtctacaatgactctcgtgtctcccctgtcagtgaaaaccaggtggcatccagcgagggctacgtgctgttctaccaactgatgcaggagccaccccggtgcctgtgacacctctaagctctggcacctgtgaagccctttaaacacccttaagccccaggctccccgtttacctcagagacgtctatttttgtgtctttttaatcggggaggggggagggggtggttgtagctccattattttttttattaaaaaatacccttccacctggaggctcccttgtctcccagccccatgtacaaagctcaccaagcccctgcccatgtacagcccccagaccctctgcaatatcactttttgtgaataaatttatta

SEQ ID NO: 297779 - DNA, 2070 bp, Homo sapiens
gttcgggtgtggatgcgcaggcgctttgagagacggtgaagccggtggccggtggccgggcgggaccaacaaagatggcggcggcccctgcggcgggagcgatctgggcaacggctgcggctaaagctgcagccgggcccacgggggggctgcacgggggtagtagggggtggccctgaactggggcctggccctggctggcctctcccgccgcctcactgggggacaggtccagcctgtggtgtccacaatgccccaggcctctgagcaccgcctgggccgtacccgagagccacctgttaatatccagccccgagtgggatccaagctaccatttgcccccagggcccgcagcaaggagcgcagaaacccagcctctgggccaaaccccatgttacgacctctgcctccccggccaggtctgcctgatgaacggctcaagaaactggagctgggacggggacggacctcaggccctcgtcccagaggcccccttcgagcagatcatggggttcccctgcctggctcaccacccccaacagtggctttgcctctcccatctcggaccaacttagcccgttccaaggggctttcctggaccccctaccctgttcagcatacggacagagccccctgcttcccatggctccttccacatgatatccgcccggtcctctgagcctttctactctgatgacaagatggctcatcacacactccttctgggctctggtcatgttggccttcgaaacctgggaaacacgtgcttcctgaatgctgtgctgcagtgtctgagcagcactcgacctcttcgggacttctgtctgagaagggacttccggcaagaggtgcctggaggaggccgagcccaagagctcactgaagcctttgcagatgtgattggtgccctctggcaccctgactcctgcgaagctgtgaatcctactcgattccgagctgtcttccagaaatatgttccctccttctctggatacagccagcaggatgcccaagagttcctgaagctcctcatggagcggctacaccttgaaatcaaccgccgaggccgccgggctccaccgatacttgccaatggtccagttccctctccaccccgccgaggaggggctctgctagaagaacctgagttaagtgatgatgaccgagccaacctaatgtggaaacgttacctggagcgagaggacagcaagattgtggacctgtttgtgggccagttgaaaagttgtctcaagtgccaggcctgtgggtatcgctccacgaccttcgaggttttttgtgacctgtccctgcccatccccaagaaaggatttgctgggggcaaggtgtctctgcgggattgtttcaaccttttcactaaggaagaagagctagagtcggagaatgccccagtgtgtgaccgatgtcggcagaaaactcgaagtaccaaaaagttgacagtacaaagattccctcgaatcctcgtgctccatctgaatcgattttctgcctcccgaggctccatcaaaaaaagttcagtaggtgtagactttccactgcagcgactgagcctaggggactttgccagtgacaaagccggaagtcctgtataccagctgtatgccctttgcaaccactcaggcagcgtccactatggccactacacagccctgtgccggtgccagactggttggcatgtctacaatgactctcgtgtctcccctgtcagtgaaaaccaggtggcatccagcgagggctacgtgctgttctaccaactgatgcaggagccaccccggtgcctgtgacacctctaagctctggcacctgtgaagccctttaaacacccttaagccccaggctccccgtttacctcagagacgtctatttttgtgtctttttaatcggggaggggggagggggtggttgtagctccattattttttttattaaaaaatacccttccacctggaggctcccttgtctcccagccccatgtacaaagctcaccaagcccctgcccatgtacagcccccagaccctctgcaatatcactttttgtgaataaatttatta

SEQ ID NO: 297780 - DNA, 2352 bp, Homo sapiens
gttcgggtgtggatgcgcaggcgctttgagagacggtgaagccggtggccggtggccgggcgggaccaacaaagatggcggcggcccctgcggcgggagcgatctgggcaacggctgcggctaaagctgcagccgggcccacgggggggctgcacgggggtagtagggggtggccctgaactggggcctggccctggctggcctctcccgccgcctcactgggggacaggtactggggatacgatggctgattcgatagatctggttcctgccctcagtgcgtatactgctccccactttcgttgatgtggtagtggtgatgactgagccaaccacctaatgtggaaatgagaggacagcaagattgtgggtccagcctgtggtgtccacaatgccccaggcctctgagcaccgcctgggccgtacccgagagccacctgttaatatccagccccgagtgggatccaagctaccatttgcccccagggcccgcagcaaggagcgcagaaacccagcctctgggccaaaccccatgttacgacctctgcctccccggccaggtctgcctgatgaacggctcaagaaactggagctgggacggggacggacctcaggccctcgtcccagaggcccccttcgagcagatcatggggttcccctgcctggctcaccacccccaacagtggctttgcctctcccatctcggaccaacttagcccgttccaagtctgtgagcagtggggacttgcgtccaatggggattgccttgggagggcaccgtggcaccggagagcttggggctgcactgagccgcttggccctccggcctgagccacccactttgagacgtagcacttctctccgccgcctagggggctttcctggaccccctaccctgttcagcatacggacagagccccctgcttcccatggctccttccacatgatatccgcccggtcctctgagcctttctactctgatgacaagatggctcatcacacactccttctgggctctggtcatgttggccttcgaaacctgggaaacacgtgcttcctgaatgctgtgctgcagtgtctgagcagcactcgacctcttcgggacttctgtctgagaagggacttccggcaagaggtgcctggaggaggccgagcccaagagctcactgaagcctttgcagatgtgattggtgccctctggcaccctgactcctgcgaagctgtgaatcctactcgattccgagctgtcttccagaaatatgttccctccttctctggatacagccagcaggatgcccaagagttcctgaagctcctcatggagcggctacaccttgaaatcaaccgccgaggccgccgggctccaccgatacttgccaatggtccagttccctctccaccccgccgaggaggggctctgctagaagaacctgagttaagtgatgatgaccgagccaacctaatgtggaaacgttacctggagcgagaggacagcaagattgtggacctgtttgtgggccagttgaaaagttgtctcaagtgccaggcctgtgggtatcgctccacgaccttcgaggttttttgtgacctgtccctgcccatccccaaggtgggattccagaggattccggggtggacaggacaggggctctgtgacccaagcctacccacccccagagtgtgggcgggaaccctgtgggtttctggagcagaactgaagcctggattgattgagaagagttggaaaaggaaattcagaacatgttgacctttcttccccttttcccccagaaaggatttgctgggggcaaggtgtctctgcgggattgtttcaaccttttcactaaggaagaagagctagagtcggagaatgccccagaagtcctgtataccagctgtatgccctttgcaaccactcaggcagcgtccactatggccactacacagccctgtgccggtgccagactggttggcatgtctacaatgactctcgtgtctcccctgtcagtgaaaaccaggtggcatccagcgagggctacgtgctgttctaccaactgatgcaggagccaccccggtgcctgtgacacctctaagctctggcacctgtgaagccctttaaacacccttaagccccaggctccccgtttacctcagagacgtctatttttgtgtctttttaatcggggaggggggagggggtggttgtagctccattattttttttattaaaaaatacccttccacctggaggctcccttgtctcccagccccatgtacaaagctcaccaagcccctgcccatgtacagcccccagaccctctgcaatatcactttttgtgaataaatttatta

SEQ ID NO: 297781 - DNA, 2623 bp, Homo sapiens
  misc_feature (2565)..(2565): n is a, c, g, or t
  misc_feature (2596)..(2596): n is a, c, g, or t
  misc_feature (2617)..(2617): n is a, c, g, or t
gttcgggtgtggatgcgcaggcgctttgagagacggtgaagccggtggccggtggccgggcgggaccaacaaagatggcggcggcccctgcggcgggagcgatctgggcaacggctgcggctaaagctgcagccgggcccacgggggggctgcacgggggtagtagggggtggccctgaactggggcctggccctggctggcctctcccgccgcctcactgggggacaggtactggggatacgatggctgattcgatagatctggttcctgccctcagtgcgtatactgctccccactttcgttgatgtggtagtggtgatgactgagccaaccacctaatgtggaaatgagaggacagcaagattgtgggtccagcctgtggtgtccacaatgccccaggcctctgagcaccgcctgggccgtacccgagagccacctgttaatatccagccccgagtgggatccaagctaccatttgcccccagggcccgcagcaaggagcgcagaaacccagcctctgggccaaaccccatgttacgacctctgcctccccggccaggtctgcctgatgaacggctcaagaaactggagctgggacggggacggacctcaggccctcgtcccagaggcccccttcgagcagatcatggggttcccctgcctggctcaccacccccaacagtggctttgcctctcccatctcggaccaacttagcccgttccaagtctgtgagcagtggggacttgcgtccaatggggattgccttgggagggcaccgtggcaccggagagcttggggctgcactgagccgcttggccctccggcctgagccacccactttgagacgtagcacttctctccgccgcctagggggctttcctggaccccctaccctgttcagcatacggacagagccccctgcttcccatggctccttccacatgatatccgcccggtcctctgagcctttctactctgatgacaagatggctcatcacacactccttctgggctctggtcatgttggccttcgaaacctgggaaacacgtgcttcctgaatgctgtgctgcagtgtctgagcagcactcgacctcttcgggacttctgtctgagaagggacttccggcaagaggtgcctggaggaggccgagcccaagagctcactgaagcctttgcagatgtgattggtgccctctggcaccctgactcctgcgaagctgtgaatcctactcgattccgagctgtcttccagaaatatgttccctccttctctggatacagccagcaggatgcccaagagttcctgaagctcctcatggagcggctacaccttgaaatcaaccgccgaggccgccgggctccaccgatacttgccaatggtccagttccctctccaccccgccgaggaggggctctgctagaagaacctgagttaagtgatgatgaccgagccaacctaatgtggaaacgttacctggagcgagaggacagcaagattgtggacctgtttgtgggccagttgaaaagttgtctcaagtgccaggcctgtgggtatcgctccacgaccttcgaggttttttgtgacctgtccctgcccatccccaaggtgggattccagaggattccggggtggacaggacaggggctctgtgacccaagcctacccacccccagagtgtgggcgggaaccctgtgggtttctggagcagaactgaagcctggattgattgagaagagttggaaaaggaaattcagaacatgttgacctttcttccccttttcccccagaaaggatttgctgggggcaaggtgtctctgcgggattgtttcaaccttttcactaaggaagaagagctagagtcggagaatgccccagtatgtggaggttcacaagggatacagtaagggtgggagacctggggggactccatgtggataaaagggattgcatgatgtcttcatatggggaataatatttatgtatctgggtttgtgttggagtctcagatctgttctagtactcctagagcaaaggggagaagccaagaggatccagctgtaatgaagagcatactaaatttgtatgtggatcggggtgtcagaaaagccaattgaggttaggagcatattaacctaacactgtttgccatttattcaggtgtgtgaccgatgtcggcagaaaactcgaagtaccaaaaagttgacagtacaaagattccctcgaatcctcgtgctccatatcctaatcttcagattcttacttctcttaggatacctcccatacattctctttcctccatgtttccagagaattgaattttccttaggaaaagtctgccacccacttttccacaagatgctcccagtgtgtcgggagtggggagaggacagctttcaggatagaagaagttcccctcagaggcccactgcctcccaaatgctccttaaccagggcttagatctgaatcgattttctgcctcccgaggctccatcaaaaaaagttcagtaggtgtagactttccactgcagcgactgagcctaggggggatttttgcccagtngacaaaggccgggaagttcctgttattaccnggttgttattggcccttttgncaacca

SEQ ID NO: 297782 - DNA, 1632 bp, Homo sapiens
gttcgggtgtggatgcgcaggcgctttgagagacggtgaagccggtggccggtggccgggcgggaccaacaaagatggcggcggcccctgcggcgggagcgatctgggcaacggctgcggctaaagctgcagccgggcccacgggggggctgcacgggggtagtagggggtggccctgaactggggcctggccctggctggcctctcccgccgcctcactgggggacaggtactggggatacgatggctgattcgatagatctggttcctgccctcagtgcgtatactgctccccactttcgttgatgtggtagtggtgatgactgagccaaccacctaatgtggaaatgagaggacagcaagattgtgggtccagcctgtggtgtccacaatgccccaggcctctgagcaccgcctgggccgtacccgagagccacctgttaatatccagccccgagtgggatccaagctaccatttgcccccagggcccgcagcaaggagcgcagaaacccagcctctgggccaaaccccatgttacgacctctgcctccccggccaggtctgcctgatgaacggctcaagaaactggagctgggacggggacggacctcaggccctcgtcccagaggcccccttcgagcagatcatggggttcccctgcctggctcaccacccccaacagtggctttgcctctcccatctcggaccaacttagcccgttccaagtctgtgagcagtggggacttgcgtccaatggggattgccttgggagggcaccgtggcaccggagagcttggggctgcactgagccgcttggccctccggcctgagccacccactttgagacgtagcacttctctccgccgcctagggggctttcctggaccccctaccctgttcagcatacggacagagccccctgcttcccatggctccttccacatgatatccgcccggtcctctgagcctttctactctgatgacaagatggctcatcacacactccttctgggctctggtcatgttggccttcgaaacctgggaaacacgtgcttcctgaatgctgtgctgcagtgtctgagcagcactcgacctcttcgggacttctgtctgagaagggacttccggcaagaggtgcctggaggaggccgagcccaagagctcactgaaggtggggcaacaactcctgctccctctgttcaagtccctttttccccaaccacttgcaggtccatctgccactggtggtggcccccaacccttaaatctggcagttgtatctacttttcccagtgcctactttcctaaaggttattttctaccctctgagccaccttttgcttgcctcttccagacattaacctttgtttgccttccccactcccatcccaacagcctttgcagatgtgattggtgccctctggcaccctgactcctgcgaagctgtgaatcctactcgattccgagctgtcttccagaaatatgttccctccttctctggatacaggtgggagagctggaggctatgggatttctctctggccatgtctgggggtagggccaagcaagggccctggcagcattgttctgagccttgagatgttcttcatccaggaagtggggaccaatat

SEQ ID NO: 297783 - DNA, 292 bp, Homo sapiens
gtactggggatacgatggctgattcgatagatctggttcctgccctcagtgcgtatactgctccccactttcgttgatgtggtagtggtgatgactgagccaaccacctaatgtggaaatgagaggacagcaagattgtgggtatggaatggggcaaagcaataagggaaaattagtgtggcagggttcagtacagcagcctgggttcccatttccccccatattcaaatgctgacactctcttctcctcccaggtccagcctgtggtgtccacaatgccccaggcctctga

SEQ ID NO: 297784 - DNA, 2133 bp, Homo sapiens
acccggggagcaagatggccactgtcatccctggccccctgagcctaggcgaggacttctaccgcgaggccatcgagcactgccgcagttacaacgcgcgcctgtgcgccgagcgcagcctgcgactgcccttcctcgactcgcagaccggcgtggcccagaacaactgctacatctggatggagaagacccaccgcgggccgggtttggccccgggacagatttacacgtaccccgcccgctgttggaggaagaaacggagactcaacatcctggaggaccccagactcaggccctgcgagtacaagatcgactgtgaagcacccctgaagaaggagggtggcctcccggaagggccggtcctcgaggctctactgtgtgcagagacgggggagaagaagattgagctgaaggaggaggagaccattatggactgtcagaaacagcagttgctggagtttccgcatgacctcgaggtggaagacttggaggatgacattcccaggaggaagaacagggccaaaggaaaggcatatggcatcgggggtctccggaaacgccaggacaccgcttccctggaggaccgagacaagccgtatgtctgtgataagttttacaaagaattggcctgggtccctgaggcacaaaggaaacacacagccaagaaggcgcccgacggcactgtcatccccaacggctactgtgacttctgcctggggggctccaagaagacggggtgtcccgaggacctcatctcctgtgcggactgtgggcgatcaggacacccctcgtgtttacaattcacggtgaacatgacggcagccgtgcggacctaccgctggcagtgcatcgagtgcaaatcctgcagcctgtgcggaacctccgagaacgacggtgccagctgggcgggtctcaccccccaggaccagctgctgttttgtgatgactgcgatcggggttaccacatgtactgcctgagtccccccatggcggagcccccggaagggagctggagctgtcacctctgtctccggcacctgaaggaaaaggcttctgcttacatcaccctcacctaggccggctcggctcgccgcgactctggggtggtgctcgcctacctgcctctccgagctcctcaattctcccccaccctgaacatcccgcagggggagggggagagggggaagccgagagggggctgggccaccccctcccctctgtgcaagtggaatgtctgccctgtgggtgggtgggcccggccagggcctctccctccctccctccctctctgtcccttggcaaatggacaccaggggcttctcccctcaaagccataccccgcctctgggcgggcatggggggtggtgggtgccagccaggggcatggacagagcctttttctaaagaaaaagacaaaaagttaaaaaaaaaaaaaagaagaaaagaaaagaagttaatatatacaaagagtcctccaaggcctggctgggtggaggggcgctgctgagagtgtccaccgggcacccgcctctgccggccccccgccgggcgccccaaccccaatttctggagctgcagccgtcccgcgccccacccaaggtgggcgccttcccctcttgtgcccagggcggtgggcgtggtgtccacccgcccctcctggtgcccacggtggatactgcatgatgtgaaccttggttttgaactctgttcctgcccctccccgaccgccccagcctgtgcccgccccgtgcctgccgtggctggtgggtggcggtggtggggccgggtgggcccccgcccagcgcctgctggaatgagaagcacagactccgccacggactccttttctctccctcctcccgccccgccaggcctggcggcccccgcccccctcgctggccattttgggggagtgagggggcgtggttgtttcttgtggttgtgtgtgtttgttgttcgggttttaaaaaagggaaactgagactgcaggtgggggaggtggtgggttttggggggatgtcccctaatccaggagtgccccctcacttgtcaccgagtctcctctattgcctgcctctgctgtgaattaacttgttctgtgtattaaactgggcctgacccctctgcccaaaa

SEQ ID NO: 297785 - DNA, 1549 bp, Homo sapiens
agcagagtgtggttgccatggtggttgtggtaggagactgtggtggccgggggactgctgccggccacgtggttgctgggcaggtgtggggtcaggctgtggatcccggcagctcatcctggcgtcatgagccaggggtaggggctgagctatggctcccctgccggtcagtgcccaccaggggcacggtgacctcctaactgcacccctgccccttggcccccaggacacccctcgtgtttacaattcacggtgaacatgacggcagccgtgcggacctaccgctggcagtgcatcgagtgcaaatcctgcagcctgtgcggaacctccgagaacgacgaccagctgctgttttgtgatgactgcgatcggggttaccacatgtactgcctgagtccccccatggcggagcccccggaagggagctggagctgtcacctctgtctccggcacctgaaggaaaaggcttctgcttacatcaccctcacctaggccggctcggctcgccgcgactctggggtggtgctcgcctacctgcctctccgagctcctcaattctcccccaccctgaacatcccgcagggggagggggagagggggaagccgagagggggctgggccaccccctcccctctgtgcaagtggaatgtctgccctgtgggtgggtgggcccggccagggcctctccctccctccctccctctctgtcccttggcaaatggacaccaggggcttctcccctcaaagccataccccgcctctgggcgggcatggggggtggtgggtgccagccaggggcatggacagagcctttttctaaagaaaaagacaaaaagttaaaaaaaaaaaaaagaagaaaagaaaagaagttaatatatacaaagagtcctccaaggcctggctgggtggaggggcgctgctgagagtgtccaccgggcacccgcctctgccggccccccgccgggcgccccaaccccaatttctggagctgcagccgtcccgcgccccacccaaggtgggcgccttcccctcttgtgcccagggcggtgggcgtggtgtccacccgcccctcctggtgcccacggtggatactgcatgatgtgaaccttggttttgaactctgttcctgcccctccccgaccgccccagcctgtgcccgccccgtgcctgccgtggctggtgggtggcggtggtggggccgggtgggcccccgcccagcgcctgctggaatgagaagcacagactccgccacggactccttttctctccctcctcccgccccgccaggcctggcggcccccgcccccctcgctggccattttgggggagtgagggggcgtggttgtttcttgtggttgtgtgtgtttgttgttcgggttttaaaaaagggaaactgagactgcaggtgggggaggtggtgggttttggggggatgtcccctaatccaggagtgccccctcacttgtcaccgagtctcctctattgcctgcctctgctgtgaattaacttgttctgtgtattaaactgggcctgacccctctgcccaaaa

SEQ ID NO: 297786 - DNA, 1399 bp, Homo sapiens
tggctaaggtagaggcggggttactcggacgagggtcccgaccgactcatatcctgtgcggactgtgggcgatcaggacacccctcgtgtttacaattcacggtgaacatgacggcagccgtgcggacctaccgctggcagtgcatcgagtgcaaatcctgcagcctgtgcggaacctccgagaacgacgaccagctgctgttttgtgatgactgcgatcggggttaccacatgtactgcctgagtccccccatggcggagcccccggaagggagctggagctgtcacctctgtctccggcacctgaaggaaaaggcttctgcttacatcaccctcacctaggccggctcggctcgccgcgactctggggtggtgctcgcctacctgcctctccgagctcctcaattctcccccaccctgaacatcccgcagggggagggggagagggggaagccgagagggggctgggccaccccctcccctctgtgcaagtggaatgtctgccctgtgggtgggtgggcccggccagggcctctccctccctccctccctctctgtcccttggcaaatggacaccaggggcttctcccctcaaagccataccccgcctctgggcgggcatggggggtggtgggtgccagccaggggcatggacagagcctttttctaaagaaaaagacaaaaagttaaaaaaaaaaaaaagaagaaaagaaaagaagttaatatatacaaagagtcctccaaggcctggctgggtggaggggcgctgctgagagtgtccaccgggcacccgcctctgccggccccccgccgggcgccccaaccccaatttctggagctgcagccgtcccgcgccccacccaaggtgggcgccttcccctcttgtgcccagggcggtgggcgtggtgtccacccgcccctcctggtgcccacggtggatactgcatgatgtgaaccttggttttgaactctgttcctgcccctccccgaccgccccagcctgtgcccgccccgtgcctgccgtggctggtgggtggcggtggtggggccgggtgggcccccgcccagcgcctgctggaatgagaagcacagactccgccacggactccttttctctccctcctcccgccccgccaggcctggcggcccccgcccccctcgctggccattttgggggagtgagggggcgtggttgtttcttgtggttgtgtgtgtttgttgttcgggttttaaaaaagggaaactgagactgcaggtgggggaggtggtgggttttggggggatgtcccctaatccaggagtgccccctcacttgtcaccgagtctcctctattgcctgcctctgctgtgaattaacttgttctgtgtattaaactgggcctgacccctctgcccaaaa

SEQ ID NO: 297787 - DNA, 2341 bp, Homo sapiens
caagaatgaatgaaatcgtagcgcgctgggcggcagagcgggcggcgcaggccggggctgggcccgcgcgcggcggcagcggcgccccgggccggaggcggcccagccgagcgggccatggccaccgccattcagaacccgctcaagtccctaggcgaggacttctaccgcgaggccatcgagcactgccgcagttacaacgcgcgcctgtgcgccgagcgcagcctgcgactgcccttcctcgactcgcagaccggcgtggcccagaacaactgctacatctggatggagaagacccaccgcgggccgggtttggccccgggacagatttacacgtaccccgcccgctgttggaggaagaaacggagactcaacatcctggaggaccccagactcaggccctgcgagtacaagatcgactgtgaagcacccctgaagaaggagggtggcctcccggaagggccggtcctcgaggctctactgtgtgcagagacgggggagaagaagattgagctgaaggaggaggagaccattatggactgtcagaaacagcagttgctggagtttccgcatgacctcgaggtggaagacttggaggatgacattcccaggaggaagaacagggccaaaggaaaggcatatggcatcgggggtctccggaaacgccaggacaccgcttccctggaggaccgagacaagccgtatgtctgtgatatctgtgggaaacggtataagaaccggccggggctcagctaccactacacccacacccacctggccgaggaggagggggaggagaacgccgaacgccacgccctgcccttccaccggaaaaacaaccataaacagttttacaaagaattggcctgggtccctgaggcacaaaggaaacacacagccaagaaggcgcccgacggcactgtcatccccaacggctactgtgacttctgcctggggggctccaagaagacggggtgtcccgaggacctcatctcctgtgcggactgtgggcgatcaggacacccctcgtgtttacaattcacggtgaacatgacggcagccgtgcggacctaccgctggcagtgcatcgagtgcaaatcctgcagcctgtgcggaacctccgagaacgacgaccagctgctgttttgtgatgactgcgatcggggttaccacatgtactgcctgagtccccccatggcggagcccccggaagggagctggagctgtcacctctgtctccggcacctgaaggaaaaggcttctgcttacatcaccctcacctaggccggctcggctcgccgcgactctggggtggtgctcgcctacctgcctctccgagctcctcaattctcccccaccctgaacatcccgcagggggagggggagagggggaagccgagagggggctgggccaccccctcccctctgtgcaagtggaatgtctgccctgtgggtgggtgggcccggccagggcctctccctccctccctccctctctgtcccttggcaaatggacaccaggggcttctcccctcaaagccataccccgcctctgggcgggcatggggggtggtgggtgccagccaggggcatggacagagcctttttctaaagaaaaagacaaaaagttaaaaaaaaaaaaaagaagaaaagaaaagaagttaatatatacaaagagtcctccaaggcctggctgggtggaggggcgctgctgagagtgtccaccgggcacccgcctctgccggccccccgccgggcgccccaaccccaatttctggagctgcagccgtcccgcgccccacccaaggtgggcgccttcccctcttgtgcccagggcggtgggcgtggtgtccacccgcccctcctggtgcccacggtggatactgcatgatgtgaaccttggttttgaactctgttcctgcccctccccgaccgccccagcctgtgcccgccccgtgcctgccgtggctggtgggtggcggtggtggggccgggtgggcccccgcccagcgcctgctggaatgagaagcacagactccgccacggactccttttctctccctcctcccgccccgccaggcctggcggcccccgcccccctcgctggccattttgggggagtgagggggcgtggttgtttcttgtggttgtgtgtgtttgttgttcgggttttaaaaaagggaaactgagactgcaggtgggggaggtggtgggttttggggggatgtcccctaatccaggagtgccccctcacttgtcaccgagtctcctctattgcctgcctctgctgtgaattaacttgttctgtgtattaaactgggcctgacccctctgcccaaaa

SEQ ID NO: 297788 - DNA, 2235 bp, Homo sapiens
acccggggagcaagatggccactgtcatccctggccccctgagcctaggcgaggacttctaccgcgaggccatcgagcactgccgcagttacaacgcgcgcctgtgcgccgagcgcagcctgcgactgcccttcctcgactcgcagaccggcgtggcccagaacaactgctacatctggatggagaagacccaccgcgggccgggtttggccccgggacagatttacacgtaccccgcccgctgttggaggaagaaacggagactcaacatcctggaggaccccagactcaggccctgcgagtacaagatcgactgtgaagcacccctgaagaaggagggtggcctcccggaagggccggtcctcgaggctctactgtgtgcagagacgggggagaagaagattgagctgaaggaggaggagaccattatggactgtcagaaacagcagttgctggagtttccgcatgacctcgaggtggaagacttggaggatgacattcccaggaggaagaacagggccaaaggaaaggcatatggcatcgggggtctccggaaacgccaggacaccgcttccctggaggaccgagacaagccgtatgtctgtgatatctgtgggaaacggtataagaaccggccggggctcagctaccactacacccacacccacctggccgaggaggagggggaggagaacgccgaacgccacgccctgcccttccaccggaaaaacaaccataaacagttttacaaagaattggcctgggtccctgaggcacaaaggaaacacacagccaagaaggcgcccgacggcactgtcatccccaacggctactgtgacttctgcctggggggctccaagaagacggggtgtcccgaggacctcatctcctgtgcggactgtgggcgatcaggacacccctcgtgtttacaattcacggtgaacatgacggcagccgtgcggacctaccgctggcagtgcatcgagtgcaaatcctgcagcctgtgcggaacctccgagaacgacgaccagctgctgttttgtgatgactgcgatcggggttaccacatgtactgcctgagtccccccatggcggagcccccggaagggagctggagctgtcacctctgtctccggcacctgaaggaaaaggcttctgcttacatcaccctcacctaggccggctcggctcgccgcgactctggggtggtgctcgcctacctgcctctccgagctcctcaattctcccccaccctgaacatcccgcagggggagggggagagggggaagccgagagggggctgggccaccccctcccctctgtgcaagtggaatgtctgccctgtgggtgggtgggcccggccagggcctctccctccctccctccctctctgtcccttggcaaatggacaccaggggcttctcccctcaaagccataccccgcctctgggcgggcatggggggtggtgggtgccagccaggggcatggacagagcctttttctaaagaaaaagacaaaaagttaaaaaaaaaaaaaagaagaaaagaaaagaagttaatatatacaaagagtcctccaaggcctggctgggtggaggggcgctgctgagagtgtccaccgggcacccgcctctgccggccccccgccgggcgccccaaccccaatttctggagctgcagccgtcccgcgccccacccaaggtgggcgccttcccctcttgtgcccagggcggtgggcgtggtgtccacccgcccctcctggtgcccacggtggatactgcatgatgtgaaccttggttttgaactctgttcctgcccctccccgaccgccccagcctgtgcccgccccgtgcctgccgtggctggtgggtggcggtggtggggccgggtgggcccccgcccagcgcctgctggaatgagaagcacagactccgccacggactccttttctctccctcctcccgccccgccaggcctggcggcccccgcccccctcgctggccattttgggggagtgagggggcgtggttgtttcttgtggttgtgtgtgtttgttgttcgggttttaaaaaagggaaactgagactgcaggtgggggaggtggtgggttttggggggatgtcccctaatccaggagtgccccctcacttgtcaccgagtctcctctattgcctgcctctgctgtgaattaacttgttctgtgtattaaactgggcctgacccctctgcccaaaa

SEQ ID NO: 297789 - DNA, 2321 bp, Homo sapiens
tcttgcttcctcttcgggatcccggactccacgttggtggatctacaggcgatggggcccctcaccctgaccctggcccagacccctgggaggaggtgtgctacagccgtgagcaggggcccagctacacctaggcgaggacttctaccgcgaggccatcgagcactgccgcagttacaacgcgcgcctgtgcgccgagcgcagcctgcgactgcccttcctcgactcgcagaccggcgtggcccagaacaactgctacatctggatggagaagacccaccgcgggccgggtttggccccgggacagatttacacgtaccccgcccgctgttggaggaagaaacggagactcaacatcctggaggaccccagactcaggccctgcgagtacaagatcgactgtgaagcacccctgaagaaggagggtggcctcccggaagggccggtcctcgaggctctactgtgtgcagagacgggggagaagaagattgagctgaaggaggaggagaccattatggactgtcagaaacagcagttgctggagtttccgcatgacctcgaggtggaagacttggaggatgacattcccaggaggaagaacagggccaaaggaaaggcatatggcatcgggggtctccggaaacgccaggacaccgcttccctggaggaccgagacaagccgtatgtctgtgatatctgtgggaaacggtataagaaccggccggggctcagctaccactacacccacacccacctggccgaggaggagggggaggagaacgccgaacgccacgccctgcccttccaccggaaaaacaaccataaacagttttacaaagaattggcctgggtccctgaggcacaaaggaaacacacagccaagaaggcgcccgacggcactgtcatccccaacggctactgtgacttctgcctggggggctccaagaagacggggtgtcccgaggacctcatctcctgtgcggactgtgggcgatcaggacacccctcgtgtttacaattcacggtgaacatgacggcagccgtgcggacctaccgctggcagtgcatcgagtgcaaatcctgcagcctgtgcggaacctccgagaacgacgaccagctgctgttttgtgatgactgcgatcggggttaccacatgtactgcctgagtccccccatggcggagcccccggaagggagctggagctgtcacctctgtctccggcacctgaaggaaaaggcttctgcttacatcaccctcacctaggccggctcggctcgccgcgactctggggtggtgctcgcctacctgcctctccgagctcctcaattctcccccaccctgaacatcccgcagggggagggggagagggggaagccgagagggggctgggccaccccctcccctctgtgcaagtggaatgtctgccctgtgggtgggtgggcccggccagggcctctccctccctccctccctctctgtcccttggcaaatggacaccaggggcttctcccctcaaagccataccccgcctctgggcgggcatggggggtggtgggtgccagccaggggcatggacagagcctttttctaaagaaaaagacaaaaagttaaaaaaaaaaaaaagaagaaaagaaaagaagttaatatatacaaagagtcctccaaggcctggctgggtggaggggcgctgctgagagtgtccaccgggcacccgcctctgccggccccccgccgggcgccccaaccccaatttctggagctgcagccgtcccgcgccccacccaaggtgggcgccttcccctcttgtgcccagggcggtgggcgtggtgtccacccgcccctcctggtgcccacggtggatactgcatgatgtgaaccttggttttgaactctgttcctgcccctccccgaccgccccagcctgtgcccgccccgtgcctgccgtggctggtgggtggcggtggtggggccgggtgggcccccgcccagcgcctgctggaatgagaagcacagactccgccacggactccttttctctccctcctcccgccccgccaggcctggcggcccccgcccccctcgctggccattttgggggagtgagggggcgtggttgtttcttgtggttgtgtgtgtttgttgttcgggttttaaaaaagggaaactgagactgcaggtgggggaggtggtgggttttggggggatgtcccctaatccaggagtgccccctcacttgtcaccgagtctcctctattgcctgcctctgctgtgaattaacttgttctgtgtattaaactgggcctgacccctctgcccaaaa

SEQ ID NO: 297790 - DNA, 1637 bp, Homo sapiens
agggtggaggcggcaggggcccggaggggctgacaggccctcctggctcgctcgctccccagtctgtgggaaacggtataagaaccggccggggctcagctaccactacacccacacccacctggccgaggaggagggggaggagaacgccgaacgccacgccctgcccttccaccggaaaaacaaccataaacccaagaaggcgcccgacggcactgtcatccccaacggctactgtgacttctgcctggggggctccaagaagacggggtgtcccgaggacctcatctcctgtgcggactgtgggcgatcaggacacccctcgtgtttacaattcacggtgaacatgacggcagccgtgcggacctaccgctggcagtgcatcgagtgcaaatcctgcagcctgtgcggaacctccgagaacgacgaccagctgctgttttgtgatgactgcgatcggggttaccacatgtactgcctgagtccccccatggcggagcccccggaagggagctggagctgtcacctctgtctccggcacctgaaggaaaaggcttctgcttacatcaccctcacctaggccggctcggctcgccgcgactctggggtggtgctcgcctacctgcctctccgagctcctcaattctcccccaccctgaacatcccgcagggggagggggagagggggaagccgagagggggctgggccaccccctcccctctgtgcaagtggaatgtctgccctgtgggtgggtgggcccggccagggcctctccctccctccctccctctctgtcccttggcaaatggacaccaggggcttctcccctcaaagccataccccgcctctgggcgggcatggggggtggtgggtgccagccaggggcatggacagagcctttttctaaagaaaaagacaaaaagttaaaaaaaaaaaaaagaagaaaagaaaagaagttaatatatacaaagagtcctccaaggcctggctgggtggaggggcgctgctgagagtgtccaccgggcacccgcctctgccggccccccgccgggcgccccaaccccaatttctggagctgcagccgtcccgcgccccacccaaggtgggcgccttcccctcttgtgcccagggcggtgggcgtggtgtccacccgcccctcctggtgcccacggtggatactgcatgatgtgaaccttggttttgaactctgttcctgcccctccccgaccgccccagcctgtgcccgccccgtgcctgccgtggctggtgggtggcggtggtggggccgggtgggcccccgcccagcgcctgctggaatgagaagcacagactccgccacggactccttttctctccctcctcccgccccgccaggcctggcggcccccgcccccctcgctggccattttgggggagtgagggggcgtggttgtttcttgtggttgtgtgtgtttgttgttcgggttttaaaaaagggaaactgagactgcaggtgggggaggtggtgggttttggggggatgtcccctaatccaggagtgccccctcacttgtcaccgagtctcctctattgcctgcctctgctgtgaattaacttgttctgtgtattaaactgggcctgacccctctgcccaaaa

SEQ ID NO: 297791 - DNA, 1087 bp, Homo sapiens
caagaatgaatgaaatcgtagcgcgctgggcggcagagcgggcggcgcaggccggggctgggcccgcgcgcggcggcagcggcgccccgggccggaggcggcccagccgagcgggccatggccaccgccattcagaacccgctcaagtccctaggcgaggacttctaccgcgaggccatcgagcactgccgcagttacaacgcgcgcctgtgcgccgagcgcagcctgcgactgcccttcctcgactcgcagaccggcgtggcccagaacaactgctacatctggatggagaagacccaccgcgggccgggtttggccccgggacagatttacacgtaccccgcccgctgttggaggaagaaacggagactcaacatcctggaggaccccagactcaggccctgcgagtacaagatcgactgtgaagcacccctgaagaaggagggtggcctcccggaagggccggtcctcgaggctctactgtgtgcagagacgggggagaagaagattgagctgaaggaggaggagaccattatggactgtcagaaacagcagttgctggagtttccgcatgacctcgaggtggaagacttggaggatgacattcccaggaggaagaacagggccaaaggaaaggcatatggcatcgggggtctccggaaacgccaggacaccgcttccctggaggaccgagacaagccgtatgtctgtgatatctgtgggaaacggtataagaaccggccggggctcagctaccactacacccacacccacctggccgaggaggagggggaggagaacgccgaacgccacgccctgcccttccaccggaaaaacaaccataaaccacataaacagtttccaagaattgcctgggtccttagccaaggaaccccagcaagaagggcccgaggacgtatcccaggtactgtgattctgcccggggcccgaaaggggccccggaccaccccggggaggggggagggaccctgttaatccggatagggcggaccacgggttgactccgtcgcagagggggccctgtacggactcagcaacacatatgtatcccctctaaacgatcgcc

SEQ ID NO: 297792 - DNA, 555 bp, Homo sapiens
gtggaagacttggaggatgacattcccaggaggaagaacagggccaaaggaaaggtatcaccccaagcttctcctcttccccgctcccctcaatgacaggtctcattcatggagcaggtgcagtggtccgcccctgccacagtctgacctcagtctgacctcattgaatccccagagcggcctgcaggggtgggggattttatacccattttacagatgaggaaactgaggctcatctgtattaagccatttgcaaagcagagattatgcagtgggttagagctaccttcatccccatgccacagaggaagaagctgaaccttggagaggttcaaggccccacagctaggacatttgtacagctgcaatttgaatttgcaaaagacactgttttctcactttcttttttcttttttttcttttttttgagacggagtctcgctctgtcacaggctagagtgcagtggcgcaatatctgctcactgcaacctccgcctcccgggttcaagcgattctcctgcctcagcctcccgagtagctgggactacaggcacg

SEQ ID NO: 297793 - DNA, 721 bp, Homo sapiens
tgaaagaaataggatggaaatagaaatatccaagtagcaaccacaaaaaaactggaatgtctgcactaacatcatacaaaacaaaccaaatgaaggttaaaaatattgaaattatacaaaatatgttctatgactaaaatttaatgaaattagaaataacacagagataggaactatacatatttgtgcaaatttaaaaagttatgctgagtgtggtggctcacacctgtaatcccagcactttgggaggccggggagggtggatcacttgaagtcaggagttggagaccagcctggccaacatggtgaaaccctgtctctactaaaaatacagaaaattagccagatgtggtggtgtgcgcctgtagtcccagctactcgggtggctgaggcactagaatcacttgagcctaggaggcagaggtggcagtgagccgagatcacaccactgcactgcagcctgggcgacaaagactgtcaaaaaaaaaaaaaaaaaaaaaaagttacgtaaccaacaagtcaaaggagaatttataaggaaatcagaaaatactttgaggtgaatgaaaatacagaaacaacatatcaaattctgtgagatgtgtgaaagcaacgcttacagtgaaattaatagctatgaacattgtaatgaaatgagaagtacttcaaattactaacctaactttccaactttagaaaatacagtaaaaaaagaacaaat

SEQ ID NO: 297794 - DNA, 7185 bp, Homo sapiens
cacaaatctgtgattacctggcgggtgaaccgctccggtggcggggagagcgggctcccagcgctgggtaggggccgggttccggcgagcgccatcccggagcgtcagtttcccagtttgggaagtgaggagaacctgcctcgcccttccccgccaaggcttagggaagggactatggcagttccaagaggaaatcagggtctcgctctgttgctcaggctggattgcagtggcgtgatcatgcctcactgcagcctcgacctccctgggctcaagcaatcctcccacttcagcctccagagtggctgggaccacagtgtggctgtccagctgggctgagtcgcccaagaaggacgtgacaggtgccgacgccaccgccgagcccatgatcctggaacagtacgtggtggtgtccaactataagaagcaggagaactcggagctgagcctccaggccggggaggtggtggatgtcatcgagaagaacgagagcggctggtggttcgtgagcacttctgaggagcagggctgggtccctgccacctacctggaggcccagaatggtactcgggatgactccgacatcaacacctctaagactggagaagaggagaagtatgtcaccgtgcagccttacaccagccaaagcaaggacgagattggctttgagaagggcgtcacagtggaggtgatccggaagaatctggaaggctggtggtatatcagatacctgggcaaagagggctgggcgccagcatcctacctgaagaaggccaaggatgacctgccaacccggaagaagaacctggccggcccagtggagatcattgggaacatcatggagatcagcaacctgctgaacaagaaggcgtctggggacaaggaaactccaccagccgaaggcgagggccatgaggcccccattgccaagaaggagatcagcctgcccatcctctgcaatgcctccaatggcagtgccgtgggcgttcctgacaggactgtctccaggctggcccagggctctccagctgtggccaggattgcccctcagcgggcccagatcagctccccgaacctacggacaagacctccaccacgcagagaatccagcctggggttccaactgccaaagccaccagagcccccttctgttgaggtggagtactacaccattgccgaattccagtcgtgcatttccgatggcatcagctttcggggtggacagaaggcagaggtcattgataagaactcaggtggctggtggtacgtgcagatcggtgagaaggagggctgggcccccgcatcatacatcgataagcgcaagaagcccaacctgagccgccgcacaagcacgctgacccggcccaaggtgcccccgccagcaccccccagcaagcccaaggaggccgaggagggccctacgggggccagtgagagccaggactccccgcggaagctcaagtatgaggagcctgagtatgacatccctgcattcggctttgactcagagcctgagctgagcgaggagcccgtggaggacagagcctcaggggagaggcggcctgcccagccccaccggccctcgccggcctcttctctgcagcgggcccgcttcaaggtgggtgagtcttcagaggatgtggccctggaagaggagaccatctatgagaatgagggcttccggccatatgcagaggacaccctgtcagccagaggctcctccggggacagcgactccccaggcagctcctcgctgtccctgaccaggaaaaactcccccaaatcaggctcccccaagtcatcatcactcctaaagctcaaggcagagaagaatgcccaggcagaaatggggaagaaccactcctcagcctccttttcctcatccatcaccatcaacaccacttgctgctcctcctcttcctcctcctcctcttccttgtccaaaaccagtggcgacctgaagccccgctctgcttcggacgcaggcatccgcggcactcccaaggtcagggcaaagaaggatgctgatgcgaacgctgggctgacctcctgtccccgggccaagccatcggtccggcccaagccattcctaaaccgagcagagtcgcagagccaagagaagatggacatcagcactttacggcgccagctgagacccacaggccagctccgtggagggctcaagggctccaagagtgaggattcggagctgcccccgcagacggcctccgaggctcccagtgaggggtctaggagaagctcatccgacctcatcaccctcccagccaccactcccccatgtcccaccaagaaggaatgggaagggccagccacctcgtacatgacatgcagcgcctaccagaaggtccaggactcggagatcagcttccccgcgggcgtggaggtgcaggtgctggagaagcaggagagcgggtggtggtatgtgaggtttggggagctggagggctgggccccttcccactatttggtgctggatgagaacgagcaacctgacccctctggcaaagagctggacacagtgcccgccaagggcaggcagaacgaaggcaagtcagacagcctggagaagatcgagaggcgcgtccaagcactgaacaccgtcaaccagagcaagaaggccacgccccccatcccctccaaacctcccgggggcttcggcaagacctcaggcactccagcggtgaagatgaggaacggagtgcggcaggtggcggtcaggccccagtcggtgtttgtgtccccgccacccaaggacaacaacctgtcctgcgccctgcggaggaatgagtcactcacggccactgatggcctccgaggcgtccgacggaactcctcctttagcactgctcgctccgctgccgccgaggccaagggccgcctggccgaacgggctgccagccagggttcagactcacccctactgcccgcccagcgcaacagcatccccgtgtcccctgtgcgccccaagcccatcgagaagtctcagttcatccacaataacctcaaagatgtgtacgtctctatcgcagactacgagggggatgaggagacagcaggcttccaggagggggtgtccatggaggttctggagaggaaccctaatggctggtggtactgccagatcctggatggtgtgaagcccttcaaaggctgggtgccttccaactaccttgagaaaaagaactagcagagggcctgggctcttccagcctcagtgtgcctctctggccgcccactggatgagcggtgagacgaacaaaagggaaaggaaaaaatgggggtggggggtggggggtggacaacattcaacactgcagaatgggtgacctcaaagatgccccctgtccaagccatcccacagctggaaggtaggggatgggggtgcccacactgagtgaggaagggaatggaccagggagtcccaggcctgggacccagagccaagaaagctgagatatcctgtgcaccatagggacttcaccaatggattacatgccatctgggacaggccatgtgggagaccccagttgtgcctttgctacagatctggaaaagacaaggtcatgggggcctccagtgtcctgcccctgcttggcccagttttgattgctggcatcttgccaccccaggtatccctggtattgtcctaagctgtatttgtgaattgtgctggtttcctgggcattgccacgcctaccacaggtgggtacattagaagccaccactggctttcaggcttgggggtgtcttctgagctcaagcctgcttctgggccaggccattgtcactgttagttgaagaaaaagcagttcccaggtgccagcaaagaccatctttcataactgtcactgtcttggccttgagaagagagcccgctctccgtggggcaccccatggaggacacagtaccagagtttacagagagggtgggcgaagccaccggtctcttcctaatctgcacagactattttgggtatttctgggcgggcagttcctttgcatgtttcgggagaggtttgttgatttggggcttatatgtcaggcctttggtttgcgtcttattttaggggttgtttgggggcctgggtggtcggcctcacatgggaaggggatgggtagtggatggggtttctgttgtatcttgtgggcgggtgattttgcttttgtttttgtttcacattcttccccctccacaagccaaagtcgtttcatttggtttccactgtgtggactgtgctggagcttggcgcctgccagaaaaatttggggctaggcaagccccaggttgcagacatggtgaagcagagaaactgttcttctggttcctgcacaacctcagaggggcaaaaaccctccccaggaaggaggagggtgttcaggagccagacttttggagagaaggcagctcccagcctgctgggtgaccgccattctgcgtgtgttccccagctgggcagggctggaagccttacgtatgaagcatggagaagcagccattgtccccactatgggcagaggggggacccggctggccccttgggtcagactggagccaacaccgccagccaccccctctggcctgctggcaatgccacaggtgcccaagaagatggaggatccctgtgccaggagccaacctggtcttcccgagggtcagtgccccagtgaagacagaagcgagagaataaagttccctgtaggtcctctgtcacctttgggttgtgtttttcaattgttgacatttcagaggggaccctccagaagcccagccggcttcccccaaggactcccccttcgctgggagtggatttccacacgtgcctttgatttcggacagattgggcctcacagccaccgattcagctgccagggtccctggactgggggttggtgttttctatagaggaggaaaggccctccctcaccctgctccccacccaggcagggcagcatgggacccagtgtctcagtgccttcaaaacccacccccacccctaccctaccccaccacaccccatcccagaggccttgcctgggcaaccctaagcccctgtccctcgccatacactgatgcctggcagctagagcaaatggctcgtgttctttgtcgaaggcctgtggtgagattgttttgtttccttttgttttgtgagtttgtttaaaattgaaattagttattttcttctgctggacagtattaaatagagcaggatgttgagttaatctgctagattgcagtactaatggtagtggtttagtgtcttcatgttaatattatttgtacttatttgaacaataatgataaagaagtggttcattattttttaattaatgcactttaaataaggtagaatggaaaaaacccagagagcaaagtgcattacttaaagatgcagtatatacttttctcatttttaaacagcacatatttattaagagaaaaaaagtaatttatgactatttaaaataaaatttaaaagtagagtgactgtcaggtaaagaaccttcaatgtagctatcttccagggggagggccctgcagcctcgctcctcagatgtctgcactgagccagttcagtcactagtgcgccagccaggccaggagggagtgcagagcatgtctgccaagcacagagcatctcagttggactggaccacagtgctcccgagagcctgcctttcctgcccttccccaccacctgcactgccccccacattctcccagccccccccaaggaccccctctccttgacccccagtgctgtaagtaatagagtcattaaaatgcaggactgaaagagacctcagaggtctctatcccatcccttcctgttactgcggcccaaggacaggaaacaacttttccaaaatcccacagctagttaatgacagatctccccactacattaatcccgtgctcctcctcactgccattatagtttattgtgtggtcatgtttacattgtgacatccagccccaaggatggctgggagttgctcaggcatccaggaaaagtggggaatgctgccatctggtgacagcatgtagatttgggcagtgaacagggattgccatgccccagtcttcgcacctcgccccctcaccccctaactcacagcacaaaccctgcaaacccaaagagaatattaatacttgaagcaagaagggtgcatgccagtccttctccgacatggccagggggtaccaggccttgtgcgcctggcctcctagccctagccagggcgagagggcctttcccttgagctactgagctgctttgtgatgctgaaggatactgccggcagcaggcagaggagggagggggcctagggctctgacccatctggaggaaaaccagatcggactaaaaaaggaaaaagaaaaacaaaatctccgcagtgtccaaacctagtttcccatgagttgcgactgaaaatgtgaaacgacactgtattgctgtatactgcaactttaaccataatgagcccttctgaggtcattattgaggttcatataatgcccgaagatgcagcatttggtgctttgttttcctttccgtttcaagacctttttcttttattgcaaggggaaaaaaatgtcatctccccccacctcatccctctttgtgacagcagacctggctgtgttgcccctctcctcctcactattctcaccaggccatgggactttgggggcagtgagagagagctggaaaggggcaaccctgagcagcaggtgtgccccatgccctgtgggtttcccctatgtccagtgactgtagacgggctgtcttgccaggcctcagccccgtctaccctaagcctggccccaaaggtttctctttcttcctccttgattttccatcttgacgaaggcattatatagaatcattttaatcactttcagatgttagagcagcgtattttacaggcatttatatccattgctttcctcagcaaggcatgttactacttttatcatctaaggaaaaaagacaagggaattccagtcaggcattattttcctattactagtgtttgcagaataggtgtaggactatttaagtttagaccttggtttggtagttcttgtttttaataaggggaaaaagataaaataacccctatttttcctgttattgtatttaactaatatattatttc

SEQ ID NO: 297795 - DNA, 7035 bp, Homo sapiens
tccacaggcacttgtccggctgcccccccacatctcacagtgtgacgaagtcttccggttcttcgaggctcgacccgaggatgtcaaccctccaaaagaggactatggcagttccaagaggaaatcaggtgccgacgccaccgccgagcccatgatcctggaacagtacgtggtggtgtccaactataagaagcaggagaactcggagctgagcctccaggccggggaggtggtggatgtcatcgagaagaacgagagcggctggtggttcgtgagcacttctgaggagcagggctgggtccctgccacctacctggaggcccagaatggtactcgggatgactccgacatcaacacctctaagactggagaagtgtccaagagacgcaaggcccatctgcggcgcctggatcgccggtggaccctgggcgggatggtcaacaggcagcacagccgagaggagaagtatgtcaccgtgcagccttacaccagccaaagcaaggacgagattggctttgagaagggcgtcacagtggaggtgatccggaagaatctggaaggctggtggtatatcagatacctgggcaaagagggctgggcgccagcatcctacctgaagaaggccaaggatgacctgccaacccggaagaagaacctggccggcccagtggagatcattgggaacatcatggagatcagcaacctgctgaacaagaaggcgtctggggacaaggaaactccaccagccgaaggcgagggccatgaggcccccattgccaagaaggagatcagcctgcccatcctctgcaatgcctccaatggcagtgccgtgggcgttcctgacaggactgtctccaggctggcccagggctctccagctgtggccaggattgcccctcagcgggcccagatcagctccccgaacctacggacaagacctccaccacgcagagaatccagcctggggttccaactgccaaagccaccagagcccccttctgttgaggtggagtactacaccattgccgaattccagtcgtgcatttccgatggcatcagctttcggggtggacagaaggcagaggtcattgataagaactcaggtggctggtggtacgtgcagatcggtgagaaggagggctgggcccccgcatcatacatcgataagcgcaagaagcccaacctgagccgccgcacaagcacgctgacccggcccaaggtgcccccgccagcaccccccagcaagcccaaggaggccgaggagggccctacgggggccagtgagagccaggactccccgcggaagctcaagtatgaggagcctgagtatgacatccctgcattcggctttgactcagagcctgagctgagcgaggagcccgtggaggacagagcctcaggggagaggcggcctgcccagccccaccggccctcgccggcctcttctctgcagcgggcccgcttcaaggtgggtgagtcttcagaggatgtggccctggaagaggagaccatctatgagaatgagggcttccggccatatgcagaggacaccctgtcagccagaggctcctccggggacagcgactccccaggcagctcctcgctgtccctgaccaggaaaaactcccccaaatcaggctcccccaagtcatcatcactcctaaagctcaaggcagagaagaatgcccaggcagaaatggggaagaaccactcctcagcctccttttcctcatccatcaccatcaacaccacttgctgctcctcctcttcctcctcctcctcttccttgtccaaaaccagtggcgacctgaagccccgctctgcttcggacgcaggcatccgcggcactcccaaggtcagggcaaagaaggatgctgatgcgaacgctgggctgacctcctgtccccgggccaagccatcggtccggcccaagccattcctaaaccgagcagagtcgcagagccaagagaagatggacatcagcactttacggcgccagctgagacccacaggccagctccgtggagggctcaagggctccaagagtgaggattcggagctgcccccgcagacggcctccgaggctcccagtgaggggtctaggagaagctcatccgacctcatcaccctcccagccaccactcccccatgtcccaccaagaaggaatgggaagggccagccacctcgtacatgacatgcagcgcctaccagaaggtccaggactcggagatcagcttccccgcgggcgtggaggtgcaggtgctggagaagcaggagagcgggtggtggtatgtgaggtttggggagctggagggctgggccccttcccactatttggtgctggatgagaacgagcaacctgacccctctggcaaagagctggacacagtgcccgccaagggcaggcagaacgaaggcaagtcagacagcctggagaagatcgagaggcgcgtccaagcactgaacaccgtcaaccagagcaagaaggccacgccccccatcccctccaaacctcccgggggcttcggcaagacctcaggcactccagcggtgaagatgaggaacggagtgcggcaggtggcggtcaggccccagtcggtgtttgtgtccccgccacccaaggacaacaacctgtcctgcgccctgcggaggaatgagtcactcacggccactgatggcctccgaggcgtccgacggaactcctcctttagcactgctcgctccgctgccgccgaggccaagggccgcctggccgaacgggctgccagccagggttcagactcacccctactgcccgcccagcgcaacagcatccccgtgtcccctgtgcgccccaagcccatcgagaagtctcagttcatccacaataacctcaaagatgtgtacgtctctatcgcagactacgagggggatgaggagacagcaggcttccaggagggggtgtccatggaggttctggagaggaaccctaatggctggtggtactgccagatcctggatggtgtgaagcccttcaaaggctgggtgccttccaactaccttgagaaaaagaactagcagagggcctgggctcttccagcctcagtgtgcctctctggccgcccactggatgagcggtgagacgaacaaaagggaaaggaaaaaatgggggtggggggtggggggtggacaacattcaacactgcagaatgggtgacctcaaagatgccccctgtccaagccatcccacagctggaaggtaggggatgggggtgcccacactgagtgaggaagggaatggaccagggagtcccaggcctgggacccagagccaagaaagctgagatatcctgtgcaccatagggacttcaccaatggattacatgccatctgggacaggccatgtgggagaccccagttgtgcctttgctacagatctggaaaagacaaggtcatgggggcctccagtgtcctgcccctgcttggcccagttttgattgctggcatcttgccaccccaggtatccctggtattgtcctaagctgtatttgtgaattgtgctggtttcctgggcattgccacgcctaccacaggtgggtacattagaagccaccactggctttcaggcttgggggtgtcttctgagctcaagcctgcttctgggccaggccattgtcactgttagttgaagaaaaagcagttcccaggtgccagcaaagaccatctttcataactgtcactgtcttggccttgagaagagagcccgctctccgtggggcaccccatggaggacacagtaccagagtttacagagagggtgggcgaagccaccggtctcttcctaatctgcacagactattttgggtatttctgggcgggcagttcctttgcatgtttcgggagaggtttgttgatttggggcttatatgtcaggcctttggtttgcgtcttattttaggggttgtttgggggcctgggtggtcggcctcacatgggaaggggatgggtagtggatggggtttctgttgtatcttgtgggcgggtgattttgcttttgtttttgtttcacattcttccccctccacaagccaaagtcgtttcatttggtttccactgtgtggactgtgctggagcttggcgcctgccagaaaaatttggggctaggcaagccccaggttgcagacatggtgaagcagagaaactgttcttctggttcctgcacaacctcagaggggcaaaaaccctccccaggaaggaggagggtgttcaggagccagacttttggagagaaggcagctcccagcctgctgggtgaccgccattctgcgtgtgttccccagctgggcagggctggaagccttacgtatgaagcatggagaagcagccattgtccccactatgggcagaggggggacccggctggccccttgggtcagactggagccaacaccgccagccaccccctctggcctgctggcaatgccacaggtgcccaagaagatggaggatccctgtgccaggagccaacctggtcttcccgagggtcagtgccccagtgaagacagaagcgagagaataaagttccctgtaggtcctctgtcacctttgggttgtgtttttcaattgttgacatttcagaggggaccctccagaagcccagccggcttcccccaaggactcccccttcgctgggagtggatttccacacgtgcctttgatttcggacagattgggcctcacagccaccgattcagctgccagggtccctggactgggggttggtgttttctatagaggaggaaaggccctccctcaccctgctccccacccaggcagggcagcatgggacccagtgtctcagtgccttcaaaacccacccccacccctaccctaccccaccacaccccatcccagaggccttgcctgggcaaccctaagcccctgtccctcgccatacactgatgcctggcagctagagcaaatggctcgtgttctttgtcgaaggcctgtggtgagattgttttgtttccttttgttttgtgagtttgtttaaaattgaaattagttattttcttctgctggacagtattaaatagagcaggatgttgagttaatctgctagattgcagtactaatggtagtggtttagtgtcttcatgttaatattatttgtacttatttgaacaataatgataaagaagtggttcattattttttaattaatgcactttaaataaggtagaatggaaaaaacccagagagcaaagtgcattacttaaagatgcagtatatacttttctcatttttaaacagcacatatttattaagagaaaaaaagtaatttatgactatttaaaataaaatttaaaagtagagtgactgtcaggtaaagaaccttcaatgtagctatcttccagggggagggccctgcagcctcgctcctcagatgtctgcactgagccagttcagtcactagtgcgccagccaggccaggagggagtgcagagcatgtctgccaagcacagagcatctcagttggactggaccacagtgctcccgagagcctgcctttcctgcccttccccaccacctgcactgccccccacattctcccagccccccccaaggaccccctctccttgacccccagtgctgtaagtaatagagtcattaaaatgcaggactgaaagagacctcagaggtctctatcccatcccttcctgttactgcggcccaaggacaggaaacaacttttccaaaatcccacagctagttaatgacagatctccccactacattaatcccgtgctcctcctcactgccattatagtttattgtgtggtcatgtttacattgtgacatccagccccaaggatggctgggagttgctcaggcatccaggaaaagtggggaatgctgccatctggtgacagcatgtagatttgggcagtgaacagggattgccatgccccagtcttcgcacctcgccccctcaccccctaactcacagcacaaaccctgcaaacccaaagagaatattaatacttgaagcaagaagggtgcatgccagtccttctccgacatggccagggggtaccaggccttgtgcgcctggcctcctagccctagccagggcgagagggcctttcccttgagctactgagctgctttgtgatgctgaaggatactgccggcagcaggcagaggagggagggggcctagggctctgacccatctggaggaaaaccagatcggactaaaaaaggaaaaagaaaaacaaaatctccgcagtgtccaaacctagtttcccatgagttgcgactgaaaatgtgaaacgacactgtattgctgtatactgcaactttaaccataatgagcccttctgaggtcattattgaggttcatataatgcccgaagatgcagcatttggtgctttgttttcctttccgtttcaagacctttttcttttattgcaaggggaaaaaaatgtcatctccccccacctcatccctctttgtgacagcagacctggctgtgttgcccctctcctcctcactattctcaccaggccatgggactttgggggcagtgagagagagctggaaaggggcaaccctgagcagcaggtgtgccccatgccctgtgggtttcccctatgtccagtgactgtagacgggctgtcttgccaggcctcagccccgtctaccctaagcctggccccaaaggtttctctttcttcctccttgattttccatcttgacgaaggcattatatagaatcattttaatcactttcagatgttagagcagcgtattttacaggcatttatatccattgctttcctcagcaaggcatgttactacttttatcatctaaggaaaaaagacaagggaattccagtcaggcattattttcctattactagtgtttgcagaataggtgtaggactatttaagtttagaccttggtttggtagttcttgtttttaataaggggaaaaagataaaataacccctatttttcctgttattgtatttaactaatatattatttc

SEQ ID NO: 297796 - DNA, 4620 bp, Homo sapiens
  misc_feature (42)..(42): n is a, c, g, or t
  misc_feature (88)..(88): n is a, c, g, or t
caccgaagtttgagcatggttggctgctttggccccggcggnaagcttgactggctgctaggctgctggctgcttggccacagacggncgcacggagacactcgacgccactcccaagacctcaggcactccagcggtgaagatgaggaacggagtgcggcaggtggcggtcaggccccagtcggtgtttgtgtccccgccacccaaggacaacaacctgtcctgcgccctgcggaggaatgagtcactcacggccactgatggcctccgaggcgtccgacggaactcctcctttagcactgctcgctccgctgccgccgaggccaagggccgcctggccgaacgggctgccagccagggttcagactcacccctactgcccgcccagcgcaacagcatccccgtgtcccctgtgcgccccaagcccatcgagaagtctcagttcatccacaataacctcaaagatgtgtacgtctctatcgcagactacgagggggatgaggagacagcaggcttccaggagggggtgtccatggaggttctggagaggaaccctaatggctggtggtactgccagatcctggatggtgtgaagcccttcaaaggctgggtgccttccaactaccttgagaaaaagaactagcagagggcctgggctcttccagcctcagtgtgcctctctggccgcccactggatgagcggtgagacgaacaaaagggaaaggaaaaaatgggggtggggggtggggggtggacaacattcaacactgcagaatgggtgacctcaaagatgccccctgtccaagccatcccacagctggaaggtaggggatgggggtgcccacactgagtgaggaagggaatggaccagggagtcccaggcctgggacccagagccaagaaagctgagatatcctgtgcaccatagggacttcaccaatggattacatgccatctgggacaggccatgtgggagaccccagttgtgcctttgctacagatctggaaaagacaaggtcatgggggcctccagtgtcctgcccctgcttggcccagttttgattgctggcatcttgccaccccaggtatccctggtattgtcctaagctgtatttgtgaattgtgctggtttcctgggcattgccacgcctaccacaggtgggtacattagaagccaccactggctttcaggcttgggggtgtcttctgagctcaagcctgcttctgggccaggccattgtcactgttagttgaagaaaaagcagttcccaggtgccagcaaagaccatctttcataactgtcactgtcttggccttgagaagagagcccgctctccgtggggcaccccatggaggacacagtaccagagtttacagagagggtgggcgaagccaccggtctcttcctaatctgcacagactattttgggtatttctgggcgggcagttcctttgcatgtttcgggagaggtttgttgatttggggcttatatgtcaggcctttggtttgcgtcttattttaggggttgtttgggggcctgggtggtcggcctcacatgggaaggggatgggtagtggatggggtttctgttgtatcttgtgggcgggtgattttgcttttgtttttgtttcacattcttccccctccacaagccaaagtcgtttcatttggtttccactgtgtggactgtgctggagcttggcgcctgccagaaaaatttggggctaggcaagccccaggttgcagacatggtgaagcagagaaactgttcttctggttcctgcacaacctcagaggggcaaaaaccctccccaggaaggaggagggtgttcaggagccagacttttggagagaaggcagctcccagcctgctgggtgaccgccattctgcgtgtgttccccagctgggcagggctggaagccttacgtatgaagcatggagaagcagccattgtccccactatgggcagaggggggacccggctggccccttgggtcagactggagccaacaccgccagccaccccctctggcctgctggcaatgccacaggtgcccaagaagatggaggatccctgtgccaggagccaacctggtcttcccgagggtcagtgccccagtgaagacagaagcgagagaataaagttccctgtaggtcctctgtcacctttgggttgtgtttttcaattgttgacatttcagaggggaccctccagaagcccagccggcttcccccaaggactcccccttcgctgggagtggatttccacacgtgcctttgatttcggacagattgggcctcacagccaccgattcagctgccagggtccctggactgggggttggtgttttctatagaggaggaaaggccctccctcaccctgctccccacccaggcagggcagcatgggacccagtgtctcagtgccttcaaaacccacccccacccctaccctaccccaccacaccccatcccagaggccttgcctgggcaaccctaagcccctgtccctcgccatacactgatgcctggcagctagagcaaatggctcgtgttctttgtcgaaggcctgtggtgagattgttttgtttccttttgttttgtgagtttgtttaaaattgaaattagttattttcttctgctggacagtattaaatagagcaggatgttgagttaatctgctagattgcagtactaatggtagtggtttagtgtcttcatgttaatattatttgtacttatttgaacaataatgataaagaagtggttcattattttttaattaatgcactttaaataaggtagaatggaaaaaacccagagagcaaagtgcattacttaaagatgcagtatatacttttctcatttttaaacagcacatatttattaagagaaaaaaagtaatttatgactatttaaaataaaatttaaaagtagagtgactgtcaggtaaagaaccttcaatgtagctatcttccagggggagggccctgcagcctcgctcctcagatgtctgcactgagccagttcagtcactagtgcgccagccaggccaggagggagtgcagagcatgtctgccaagcacagagcatctcagttggactggaccacagtgctcccgagagcctgcctttcctgcccttccccaccacctgcactgccccccacattctcccagccccccccaaggaccccctctccttgacccccagtgctgtaagtaatagagtcattaaaatgcaggactgaaagagacctcagaggtctctatcccatcccttcctgttactgcggcccaaggacaggaaacaacttttccaaaatcccacagctagttaatgacagatctccccactacattaatcccgtgctcctcctcactgccattatagtttattgtgtggtcatgtttacattgtgacatccagccccaaggatggctgggagttgctcaggcatccaggaaaagtggggaatgctgccatctggtgacagcatgtagatttgggcagtgaacagggattgccatgccccagtcttcgcacctcgccccctcaccccctaactcacagcacaaaccctgcaaacccaaagagaatattaatacttgaagcaagaagggtgcatgccagtccttctccgacatggccagggggtaccaggccttgtgcgcctggcctcctagccctagccagggcgagagggcctttcccttgagctactgagctgctttgtgatgctgaaggatactgccggcagcaggcagaggagggagggggcctagggctctgacccatctggaggaaaaccagatcggactaaaaaaggaaaaagaaaaacaaaatctccgcagtgtccaaacctagtttcccatgagttgcgactgaaaatgtgaaacgacactgtattgctgtatactgcaactttaaccataatgagcccttctgaggtcattattgaggttcatataatgcccgaagatgcagcatttggtgctttgttttcctttccgtttcaagacctttttcttttattgcaaggggaaaaaaatgtcatctccccccacctcatccctctttgtgacagcagacctggctgtgttgcccctctcctcctcactattctcaccaggccatgggactttgggggcagtgagagagagctggaaaggggcaaccctgagcagcaggtgtgccccatgccctgtgggtttcccctatgtccagtgactgtagacgggctgtcttgccaggcctcagccccgtctaccctaagcctggccccaaaggtttctctttcttcctccttgattttccatcttgacgaaggcattatatagaatcattttaatcactttcagatgttagagcagcgtattttacaggcatttatatccattgctttcctcagcaaggcatgttactacttttatcatctaaggaaaaaagacaagggaattccagtcaggcattattttcctattactagtgtttgcagaataggtgtaggactatttaagtttagaccttggtttggtagttcttgtttttaataaggggaaaaagataaaataacccctatttttcctgttattgtatttaactaatatattatttc

SEQ ID NO: 297797 - DNA, 2884 bp, Homo sapiens
tccacaggcacttgtccggctgcccccccacatctcacagtgtgacgaagtcttccggttcttcgaggctcgacccgaggatgtcaaccctccaaaagaggactatggcagttccaagaggaaatcaggtgccgacgccaccgccgagcccatgatcctggaacagtacgtggtggtgtccaactataagaagcaggagaactcggagctgagcctccaggccggggaggtggtggatgtcatcgagaagaacgagagcggctggtggttcgtgagcacttctgaggagcagggctgggtccctgccacctacctggaggcccagaatggtactcgggatgactccgacatcaacacctctaagactggagaagtgtccaagagacgcaaggcccatctgcggcgcctggatcgccggtggaccctgggcgggatggtcaacaggcagcacagccgagaggagaagtatgtcaccgtgcagccttacaccagccaaagcaaggacgagattggctttgagaagggcgtcacagtggaggtgatccggaagaatctggaaggctggtggtatatcagatacctgggcaaagagggctgggcgccagcatcctacctgaagaaggccaaggatgacctgccaacccggaagaagaacctggccggcccagtggagatcattgggaacatcatggagatcagcaacctgctgaacaagaaggcgtctggggacaaggaaactccaccagccgaaggcgagggccatgaggcccccattgccaagaaggagatcagcctgcccatcctctgcaatgcctccaatggcagtgccgtgggcgttcctgacaggactgtctccaggctggcccagggctctccagctgtggccaggattgcccctcagcgggcccagatcagctccccgaacctacggacaagacctccaccacgcagagaatccagcctggggttccaactgccaaagccaccagagcccccttctgttgaggtggagtactacaccattgccgaattccagtcgtgcatttccgatggcatcagctttcggggtggacagaaggcagaggtcattgataagaactcaggtggctggtggtacgtgcagatcggtgagaaggagggctgggcccccgcatcatacatcgataagcgcaagaagcccaacctgagccgccgcacaagcacgctgacccggcccaaggtgcccccgccagcaccccccagcaagcccaaggaggccgaggagggccctacgggggccagtgagagccaggactccccgcggaagctcaagtatgaggagcctgagtatgacatccctgcattcggctttgactcagagcctgagctgagcgaggagcccgtggaggacagagcctcaggggagaggcggcctgcccagccccaccggccctcgccggcctcttctctgcagcgggcccgcttcaaggtgggtgagtcttcagaggatgtggccctggaagaggagaccatctatgagaatgagggcttccggccatatgcagaggacaccctgtcagccagaggctcctccggggacagcgactccccaggcagctcctcgctgtccctgaccaggaaaaactcccccaaatcaggctcccccaagtcatcatcactcctaaagctcaaggcagagaagaatgcccaggcagaaatggggaagaaccactcctcagcctccttttcctcatccatcaccatcaacaccacttgctgctcctcctcttcctcctcctcctcttccttgtccaaaaccagtggcgacctgaagccccgctctgcttcggacgcaggcatccgcggcactcccaaggtcagggcaaagaaggatgctgatgcgaacgctgggctgacctcctgtccccgggccaagccatcggtccggcccaagccattcctaaaccgagcagagtcgcagagccaagagaagatggacatcagcactttacggcgccagctgagacccacaggccagctccgtggagggctcaagggctccaagagtgaggattcggagctgcccccgcagacggcctccgaggctcccagtgaggggtctaggagaagctcatccgacctcatcaccctcccagccaccactcccccatgtcccaccaagaaggaatgggaagggccagccacctcgtacatgacatgcagcgcctaccagaaggtccaggactcggagatcagcttccccgcgggcgtggaggtgcaggtgctggagaagcaggagagcgggtggtggtatgtgaggtttggggagctggagggctgggccccttcccactatttggtgctggatgagaacgagcaacctgacccctctggcaaagagctggacacagtgcccgccaagggcaggcagaacgaaggcaagtcagacagcctggagaagatcgagaggcgcgtccaagcactgaacaccgtcaaccagagcaagaaggccacgccccccatcccctccaaacctcccgggggcttcggcaagacctcaggcactccagcggtgaagatgaggaacggagtgcggcaggtggcggtcaggccccagtcggtgtttgtgtccccgccacccaaggacaacaacctgtcctgcgccctgcggaggaatgagtcactcacggccactgatggcctccgaggcgtccgacggaactcctcctttagcactgctcgctccgctgccgccgaggccaagggccgcctgccggcggccggcgcggcctcgtcgccgtccgcgcccggcacgttgaggtcgcataggctcaccgagaggcgcgcgtcgtccgcctcgcgccgcagcgacggccgccgcagggcggtgaaggagcgcggccgc

SEQ ID NO: 297798 - DNA, 1242 bp, Homo sapiens
gaagggagggaggctgagtctcagggcagagtctgagtcccactccgcaccccaccctctgtctggtacagcttaccaaaccaaagtgcccaaagccgtgacatcccggccggcggctcgcaggcccccgccctccgcacgtcacggccgccgggtgcagtgccccctaggggcccctgggacgaggaggaagcgccaggtccttcccgccgccgccgccgccgccgccgccgcctgctcccctggcacgcgccccgccgccctcggcagccgcagctccgtgtcccctgagaaccagccgtcccgcgccatgggcacgcgtctgccgctcgtcctgcgccagctccgccgcccgccccagcccccgggccctccgcgccgcctccgtgtgccctgtcgcgctagcagcggcggcggcggaggcggcggcggtggccgggagggcctgcttggacagcggcggccgcaggatggccaggcccggagcagctgcagccccggcggccgaacgcccgcggcgcgggactccatcgtcagagaagtcattcagaattcaaaagaagttctaagtttattgcaagaaaaaaaccctgccttcaagccggttcttgcaattatccaggcaggtgacgacaacttgatgcaggaaatcaaccagaatttggctgaggaggctggtctgaacatcactcacatttgcctccctccagatagcagtgaagccgagattatagatgaaatcttaaagatcaatgaagataccagagtacatggccttgcccttcagatctctgagaacttgtttagcaacaaagtcctcaatgccttgaaaccagaaaaagatgtggatggagtaacagacataaacctggggaagctggtgcgaggggatgcccatgaatgttttgtttcacctgttgccaaagctgtaattgaacttcttgaaaaatcagtaggtgtcaacctagatggaaagaagattttggtagtgggggcccatgggtctttggaagctgctctacaatgcctgttccagagaaaagggtccatgacaatgagcatccagtggaaaacacgccagcttcaaagcaagacggagtctcgttctgtcaccaggctggagtgcaggcgcgtgatctaggctcactgcaagctctgcctcccaggttgaagtgattctcctgtgaaagggaattatttttgatgagtcattaaagtatatccattcccagaaaaaaaaag

SEQ ID NO: 297799 - DNA, 3643 bp, Homo sapiens
gaagggagggaggctgagtctcagggcagagtctgagtcccactccgcaccccaccctctgtctggtacagcttaccaaaccaaagtgcccaaagccgtgacatcccggccggcggctcgcaggcccccgccctccgcacgtcacggccgccgggtgcagtgccccctaggggcccctgggacgaggaggaagcgccaggtccttcccgccgccgccgccgccgccgccgccgcctgctcccctggcacgcgccccgccgccctcggcagccgcagctccgtgtcccctgagaaccagccgtcccgcgccatgggcacgcgtctgccgctcgtcctgcgccagctccgccgcccgccccagcccccgggccctccgcgccgcctccgtgtgccctgtcgcgctagcagcggcggcggcggaggcggcggcggtggccgggagggcctgcttggacagcggcggccgcaggatggccaggcccggagcagctgcagccccggcggccgaacgcccgcggcgcgggactccatcgtcagagaagtcattcagaattcaaaagaagttctaagtttattgcaagaaaaaaaccctgccttcaagccggttcttgcaattatccaggcaggtgacgacaacttgatgcaggaaatcaaccagaatttggctgaggaggctggtctgaacatcactcacatttgcctccctccagatagcagtgaagccgagattatagatgaaatcttaaagatcaatgaagataccagagtacatggccttgcccttcagatctctgagaacttgtttagcaacaaagtcctcaatgccttgaaaccagaaaaagatgtggatggagtaacagacataaacctggggaagctggtgcgaggggatgcccatgaatgttttgtttcacctgttgccaaagctgtaattgaacttcttgaaaaatcagtaggtgtcaacctagatggaaagaagattttggtagtgggggcccatgggtctttggaagctgctctacaatgcctgttccagagaaaagggtccatgacaatgagcatccagtggaaaacacgccagcttcaaagcaagcttcacgaggctgacattgtggtcctaggctcacctaagccagaagagattccccttacttggatacaaccaggaactactgttctcaactgctcccatgacttcctgtcagggaaggttgggtgtggctctccaagaatacattttggtggactcattgaggaagatgatgtgattctccttgctgcagctctgcgaattcagaacatggtcagtagtggaaggagatggcttcgtgaacagcagcacaggcggtggagacttcactgcttgaaacttcagcctctctcccctgtgccaagtgacattgagatttcaagaggacaaactccaaaagctgtggatgtccttgccaaggagattggattgcttgcagatgaaattgaaatctatggcaaaagcaaagccaaagtacgtttgtccgtgctagaaaggttaaaggatcaagcagatggaaaatacgtcttagttgctgggatcacacccacccctcttggagaagggaagagcacagtcaccatcgggcttgtgcaggctctgaccgcacacctgaatgtcaactcctttgcctgcttgaggcagccttcccaaggaccgacgtttggagtgaaaggaggagccgcgggtggtggatatgcccaggtcatccccatggaggagttcaaccttcacttgactggagacatccacgccatcaccgctgccaataacttgctggctgccgccatcgacacgaggattcttcatgaaaacacgcaaacagataaggctctgtataatcggctggttcctttagtgaatggtgtcagagaattttcagaaattcagcttgctcggctaaaaaaactgggaataaataagactgatccgagcacactgacagaagaggaagtgagtaaatttgcccgtctcgacatcgacccatctaccatcacgtggcagagagtattggatacaaatgaccgatttctacgaaaaataaccatcgggcagggaaacacagagaagggccattaccggcaggcgcagtttgacatcgcagtggccagcgagatcatggcggtgctggccctgacggacagcctcgcagacatgaaggcacggctgggaaggatggtggtggccagtgacaaaagcgggcagcctgtgacagcagatgatttgggggtgacaggtgctttgacagttttgatgaaagatgcaataaaaccaaacctgatgcagaccctggaagggacacctgtgttcgtgcatgcgggcccttttgctaacattgctcacggcaactcttcagtgttggctgataaaattgccctgaaactggttggtgaagaaggatttgtagtgaccgaagctggctttggtgctgacatcggaatggagaaattcttcaacatcaagtgccgagcttccggcttggtgcccaacgtggttgtgttagtggcaacggtgcgagctctgaagatgcatggaggcgggccaagtgtaacggctggtgttcctcttaagaaagaatatacagaggagaacatccagctggtggcagacggctgctgtaacctccagaagcaaattcagatcactcagctctttggggttcccgttgtggtggctctgaatgtcttcaagaccgacacccgcgctgagattgacttggtgtgtgagcttgcaaagcgggctggtgcctttgatgcagtcccctgctatcactggtccgttggtggaaaaggatcggtggacttggctcgggctgtgagagaggctgcgagtaaaagaagccgattccagttcctgtatgatgttcaggttccaattgtggacaagataaggaccattgctcaggctgtctatggagccaaagatattgaactctctcctgaggcacaagccaaaatagatcgttacactcaacagggttttggaaatttgcccatctgcatggcaaagacccacctttctctatctcaccaacctgacaaaaaaggtgtgccaagggacttcatcttacctatcagtgacgtccgggccagcataggcgctgggttcatttaccctttggtcggaacgatgagcaccatgccaggactgcccacccggccctgcttttatgacatagatcttgataccgaaacagaacaagttaaaggcttgttctaagtggacaaggctctcacaggacccgatgcagactcctgaaacagactactctttgcctttttgctgcagttggagaagaaactgaatttgaaaaatgtctgttatgcaatgctggagacatggtgaaataggccaaagatttcttcttcgttcaagatgaattctgttcacagtggagtatggtgttcggcaaaaggacctccaccaagactgaaagaaactaatttatttctgtttctgtggagtttccattatttctactgcttacactttagaatgtttattttatggggactaagggattaggagtgtgaactaaaaggtaacattttccactctcaagttttctactttgtctttgaactgaaaataaacatggatctagaaaaccaa

SEQ ID NO: 297800 - DNA, 1188 bp, Homo sapiens
gaagggagggaggctgagtctcagggcagagtctgagtcccactccgcaccccaccctctgtctggtacagcttaccaaaccaaagtgcccaaagccgtgacatcccggccggcggctcgcaggcccccgccctccgcacgtcacggccgccgggtgcagtgccccctaggggcccctgggacgaggaggaagcgccaggtccttcccgccgccgccgccgccgccgccgccgcctgctcccctggcacgcgccccgccgccctcggcagccgcagctccgtgtcccctgagaaccagccgtcccgcgccatgggcacgcgtctgccgctcgtcctgcgccagctccgccgcccgccccagcccccgggccctccgcgccgcctccgtgtgccctgtcgcgctagcagcggcggcggcggaggcggcggcggtggccgggagggcctgcttggacagcggcggccgcaggatggccaggcccggagcagctgcagccccggcggccgaacgcccgcggcgcgggactccatcgtcagagaagtcattcagaattcaaaagaagttctaagtttattgcaagaaaaaaaccctgccttcaagccggttcttgcaattatccaggcaggtgacgacaacttgatgcaggaaatcaaccagaatttggctgaggaggctggtctgaacatcactcacatttgcctccctccagatagcagtgaagccgagattatagatgaaatcttaaagatcaatgaagataccagagtacatggccttgcccttcagatctctgagaacttgtttagcaacaaagtcctcaatgccttgaaaccagaaaaagatgtggatggagtaacagacataaacctggggaagctggtgcgaggggatgcccatgaatgttttgtttcacctgttgccaaagctgtaattgaacttcttgaaaaatcagtaggtgtcaacctagatggaaagaagattttggtagtgggggcccatgggtctttggaagctgctctacaatgcctgttccagagaaaagggtccatgacaatgagcatccagtggtgcaggcgcgtgatctaggctcactgcaagctctgcctcccaggttgaagtgattctcctgtgaaagggaattatttttgatgagtcattaaagtatatccattcccagaaaaaaaaag

SEQ ID NO: 297801 - DNA, 206 bp, Homo sapiens
atcattacttacacaccataaacccacaccttttaactacaaaaaaacaacttcagaacggagtctcgttctgtcaccaggctggagtgcaggcgcgtgatctaggctcactgcaagctctgcctcccaggttgaagtgattctcctgtgaaagggaattatttttgatgagtcattaaagtatatccattcccagaaaaaaaaag

SEQ ID NO: 297802 - DNA, 3185 bp, Homo sapiens
gtgcgcccttccccgcgcgcggcccctcctgctgggctggggtctgtggctgacgtccgcttttcccggaacggcaaagagaagtcattcagaattcaaaagaagttctaagtttattgcaagaaaaaaaccctgccttcaagccggttcttgcaattatccaggcaggtgacgacaacttgatgcaggaaatcaaccagaatttggctgaggaggctggtctgaacatcactcacatttgcctccctccagatagcagtgaagccgagattatagatgaaatcttaaagatcaatgaagataccagagtacatggccttgcccttcagatctctgagaacttgtttagcaacaaagtcctcaatgccttgaaaccagaaaaagatgtggatggagtaacagacataaacctggggaagctggtgcgaggggatgcccatgaatgttttgtttcacctgttgccaaagctgtaattgaacttcttgaaaaatcagtaggtgtcaacctagatggaaagaagattttggtagtgggggcccatgggtctttggaagctgctctacaatgcctgttccagagaaaagggtccatgacaatgagcatccagtggaaaacacgccagcttcaaagcaagcttcacgaggctgacattgtggtcctaggctcacctaagccagaagagattccccttacttggatacaaccaggaactactgttctcaactgctcccatgacttcctgtcagggaaggttgggtgtggctctccaagaatacattttggtggactcattgaggaagatgatgtgattctccttgctgcagctctgcgaattcagaacatggtcagtagtggaaggagatggcttcgtgaacagcagcacaggcggtggagacttcactgcttgaaacttcagcctctctcccctgtgccaagtgacattgagatttcaagaggacaaactccaaaagctgtggatgtccttgccaaggagattggattgcttgcagatgaaattgaaatctatggcaaaagcaaagccaaagtacgtttgtccgtgctagaaaggttaaaggatcaagcagatggaaaatacgtcttagttgctgggatcacacccacccctcttggagaagggaagagcacagtcaccatcgggcttgtgcaggctctgaccgcacacctgaatgtcaactcctttgcctgcttgaggcagccttcccaaggaccgacgtttggagtgaaaggaggagccgcgggtggtggatatgcccaggtcatccccatggaggagttcaaccttcacttgactggagacatccacgccatcaccgctgccaataacttgctggctgccgccatcgacacgaggattcttcatgaaaacacgcaaacagataaggctctgtataatcggctggttcctttagtgaatggtgtcagagaattttcagaaattcagcttgctcggctaaaaaaactgggaataaataagactgatccgagcacactgacagaagaggaagtgagtaaatttgcccgtctcgacatcgacccatctaccatcacgtggcagagagtattggatacaaatgaccgatttctacgaaaaataaccatcgggcagggaaacacagagaagggccattaccggcaggcgcagtttgacatcgcagtggccagcgagatcatggcggtgctggccctgacggacagcctcgcagacatgaaggcacggctgggaaggatggtggtggccagtgacaaaagcgggcagcctgtgacagcagatgatttgggggtgacaggtgctttgacagttttgatgaaagatgcaataaaaccaaacctgatgcagaccctggaagggacacctgtgttcgtgcatgcgggcccttttgctaacattgctcacggcaactcttcagtgttggctgataaaattgccctgaaactggttggtgaagaaggatttgtagtgaccgaagctggctttggtgctgacatcggaatggagaaattcttcaacatcaagtgccgagcttccggcttggtgcccaacgtggttgtgttagtggcaacggtgcgagctctgaagatgcatggaggcgggccaagtgtaacggctggtgttcctcttaagaaagaatatacagaggagaacatccagctggtggcagacggctgctgtaacctccagaagcaaattcagatcactcagctctttggggttcccgttgtggtggctctgaatgtcttcaagaccgacacccgcgctgagattgacttggtgtgtgagcttgcaaagcgggctggtgcctttgatgcagtcccctgctatcactggtccgttggtggaaaaggatcggtggacttggctcgggctgtgagagaggctgcgagtaaaagaagccgattccagttcctgtatgatgttcaggttccaattgtggacaagataaggaccattgctcaggctgtctatggagccaaagatattgaactctctcctgaggcacaagccaaaatagatcgttacactcaacagggttttggaaatttgcccatctgcatggcaaagacccacctttctctatctcaccaacctgacaaaaaaggtgtgccaagggacttcatcttacctatcagtgacgtccgggccagcataggcgctgggttcatttaccctttggtcggaacgatgagcaccatgccaggactgcccacccggccctgcttttatgacatagatcttgataccgaaacagaacaagttaaaggcttgttctaagtggacaaggctctcacaggacccgatgcagactcctgaaacagactactctttgcctttttgctgcagttggagaagaaactgaatttgaaaaatgtctgttatgcaatgctggagacatggtgaaataggccaaagatttcttcttcgttcaagatgaattctgttcacagtggagtatggtgttcggcaaaaggacctccaccaagactgaaagaaactaatttatttctgtttctgtggagtttccattatttctactgcttacactttagaatgtttattttatggggactaagggattaggagtgtgaactaaaaggtaacattttccactctcaagttttctactttgtctttgaactgaaaataaacatggatctagaaaaccaa

SEQ ID NO: 297803 - DNA, 2976 bp, Homo sapiens
ggttttaccatgttggccagtctggtctcgaactcctgacctcgtgatccacctgcctcagcctccctaagtgctgggattacaggtgtgagccactatgcccggctgccccatcctttttcttgatattatagttagtggtgaaaacatgtaaatgataatactccatgcagtatgtatgctgaagtgactaccctgaagacattttttaagtcctattttcttttctttctaggatatgataatcattttctgtttgtattaatacatgcttgaaaggaattagtaaagcgattccatccttgtcagcagcttggaacaaagctgtggatctggggattgtgtagaactcatttgacatcagtagttacttgtgtctttatgcctcagatcaagatgtgcgtgtttttttctttctccttttagcttcacgaggctgacattgtggtcctaggctcacctaagccagaagagattccccttacttggatacaaccaggaactactgttctcaactgctcccatgacttcctgtcagggaaggttgggtgtggctctccaagaatacattttggtggactcattgaggaagatgatgtgattctccttgctgcagctctgcgaattcagaacatggtcagtagtggaaggagatggcttcgtgaacagcagcacaggcggtggagacttcactgcttgaaacttcagcctctctcccctgtgccaagtgacattgagatttcaagaggacaaactccaaaagctgtggatgtccttgccaaggagattggattgcttgcagatgaaattgaaatctatggcaaaagcaaagccaaagtacgtttgtccgtgctagaaaggttaaaggatcaagcagatggaaaatacgtcttagttgctgggatcacacccacccctcttggagaagggaagagcacagtcaccatcgggcttgtgcaggctctgaccgcacacctgaatgtcaactcctttgcctgcttgaggcagccttcccaaggaccgacgtttggagtgaaaggaggagccgcgggtggtggatatgcccaggtcatccccatggaggagttcaaccttcacttgactggagacatccacgccatcaccgctgccaataacttgctggctgccgccatcgacacgaggattcttcatgaaaacacgcaaacagataaggctctgtataatcggctggttcctttagtgaatggtgtcagagaattttcagaaattcagcttgctcggctaaaaaaactgggaataaataagactgatccgagcacactgacagaagaggaagtgagtaaatttgcccgtctcgacatcgacccatctaccatcacgtggcagagagtattggatacaaatgaccgatttctacgaaaaataaccatcgggcagggaaacacagagaagggccattaccggcaggcgcagtttgacatcgcagtggccagcgagatcatggcggtgctggccctgacggacagcctcgcagacatgaaggcacggctgggaaggatggtggtggccagtgacaaaagcgggcagcctgtgacagcagatgatttgggggtgacaggtgctttgacagttttgatgaaagatgcaataaaaccaaacctgatgcagaccctggaagggacacctgtgttcgtgcatgcgggcccttttgctaacattgctcacggcaactcttcagtgttggctgataaaattgccctgaaactggttggtgaagaaggatttgtagtgaccgaagctggctttggtgctgacatcggaatggagaaattcttcaacatcaagtgccgagcttccggcttggtgcccaacgtggttgtgttagtggcaacggtgcgagctctgaagatgcatggaggcgggccaagtgtaacggctggtgttcctcttaagaaagaatatacagaggagaacatccagctggtggcagacggctgctgtaacctccagaagcaaattcagatcactcagctctttggggttcccgttgtggtggctctgaatgtcttcaagaccgacacccgcgctgagattgacttggtgtgtgagcttgcaaagcgggctggtgcctttgatgcagtcccctgctatcactggtccgttggtggaaaaggatcggtggacttggctcgggctgtgagagaggctgcgagtaaaagaagccgattccagttcctgtatgatgttcaggttccaattgtggacaagataaggaccattgctcaggctgtctatggagccaaagatattgaactctctcctgaggcacaagccaaaatagatcgttacactcaacagggttttggaaatttgcccatctgcatggcaaagacccacctttctctatctcaccaacctgacaaaaaaggtgtgccaagggacttcatcttacctatcagtgacgtccgggccagcataggcgctgggttcatttaccctttggtcggaacgatgagcaccatgccaggactgcccacccggccctgcttttatgacatagatcttgataccgaaacagaacaagttaaaggcttgttctaagtggacaaggctctcacaggacccgatgcagactcctgaaacagactactctttgcctttttgctgcagttggagaagaaactgaatttgaaaaatgtctgttatgcaatgctggagacatggtgaaataggccaaagatttcttcttcgttcaagatgaattctgttcacagtggagtatggtgttcggcaaaaggacctccaccaagactgaaagaaactaatttatttctgtttctgtggagtttccattatttctactgcttacactttagaatgtttattttatggggactaagggattaggagtgtgaactaaaaggtaacattttccactctcaagttttctactttgtctttgaactgaaaataaacatggatctagaaaaccaa

SEQ ID NO: 297804 - DNA, 2314 bp, Homo sapiens
agaaattctaaagcaagaagagaaaagcatttcaatttgggacatttatttgcacctggaaatggggaatgggctatcagaccagacttctatcctgtccaacctgccttcattcagtccttccacattgttattctgggtttggactgtgctggaaagacaactgtcttatacaggctgcagttcaatgaatttgtaaataccatacctaccaaaggatttaacactgagaaaattaaggatcacacccacccctcttggagaagggaagagcacagtcaccatcgggcttgtgcaggctctgaccgcacacctgaatgtcaactcctttgcctgcttgaggcagccttcccaaggaccgacgtttggagtgaaaggaggagccgcgggtggtggatatgcccaggtcatccccatggaggagttcaaccttcacttgactggagacatccacgccatcaccgctgccaataacttgctggctgccgccatcgacacgaggattcttcatgaaaacacgcaaacagataaggctctgtataatcggctggttcctttagtgaatggtgtcagagaattttcagaaattcagcttgctcggctaaaaaaactgggaataaataagactgatccgagcacactgacagaagaggaagtgagtaaatttgcccgtctcgacatcgacccatctaccatcacgtggcagagagtattggatacaaatgaccgatttctacgaaaaataaccatcgggcagggaaacacagagaagggccattaccggcaggcgcagtttgacatcgcagtggccagcgagatcatggcggtgctggccctgacggacagcctcgcagacatgaaggcacggctgggaaggatggtggtggccagtgacaaaagcgggcagcctgtgacagcagatgatttgggggtgacaggtgctttgacagttttgatgaaagatgcaataaaaccaaacctgatgcagaccctggaagggacacctgtgttcgtgcatgcgggcccttttgctaacattgctcacggcaactcttcagtgttggctgataaaattgccctgaaactggttggtgaagaaggatttgtagtgaccgaagctggctttggtgctgacatcggaatggagaaattcttcaacatcaagtgccgagcttccggcttggtgcccaacgtggttgtgttagtggcaacggtgcgagctctgaagatgcatggaggcgggccaagtgtaacggctggtgttcctcttaagaaagaatatacagaggagaacatccagctggtggcagacggctgctgtaacctccagaagcaaattcagatcactcagctctttggggttcccgttgtggtggctctgaatgtcttcaagaccgacacccgcgctgagattgacttggtgtgtgagcttgcaaagcgggctggtgcctttgatgcagtcccctgctatcactggtccgttggtggaaaaggatcggtggacttggctcgggctgtgagagaggctgcgagtaaaagaagccgattccagttcctgtatgatgttcaggttccaattgtggacaagataaggaccattgctcaggctgtctatggagccaaagatattgaactctctcctgaggcacaagccaaaatagatcgttacactcaacagggttttggaaatttgcccatctgcatggcaaagacccacctttctctatctcaccaacctgacaaaaaaggtgtgccaagggacttcatcttacctatcagtgacgtccgggccagcataggcgctgggttcatttaccctttggtcggaacgatgagcaccatgccaggactgcccacccggccctgcttttatgacatagatcttgataccgaaacagaacaagttaaaggcttgttctaagtggacaaggctctcacaggacccgatgcagactcctgaaacagactactctttgcctttttgctgcagttggagaagaaactgaatttgaaaaatgtctgttatgcaatgctggagacatggtgaaataggccaaagatttcttcttcgttcaagatgaattctgttcacagtggagtatggtgttcggcaaaaggacctccaccaagactgaaagaaactaatttatttctgtttctgtggagtttccattatttctactgcttacactttagaatgtttattttatggggactaagggattaggagtgtgaactaaaaggtaacattttccactctcaagttttctactttgtctttgaactgaaaataaacatggatctagaaaaccaa

SEQ ID NO: 297805 - DNA, 3813 bp, Homo sapiens
gaagggagggaggctgagtctcagggcagagtctgagtcccactccgcaccccaccctctgtctggtacagcttaccaaaccaaagtgcccaaagccgtgacatcccggccggcggctcgcaggcccccgccctccgcacgtcacggccgccgggtgcagtgccccctaggggcccctgggacgaggaggaagcgccaggtccttcccgccgccgccgccgccgccgccgccgcctgctcccctggcacgcgccccgccgccctcggcagccgcagctccgtgtcccctgagaaccagccgtcccgcgccatgggcacgcgtctgccgctcgtcctgcgccagctccgccgcccgccccagcccccgggccctccgcgccgcctccgtgtgccctgtcgcgctagcagcggcggcggcggaggcggcggcggtggccgggagggcctgcttggacagcggcggccgcaggatggccaggcccggagcagctgcagccccggcggccgaacgcccgcggcgcgggactccatcgtcagagaagtcattcagaattcaaaagaagttctaagtttattgcaagaaaaaaaccctgccttcaagccggttcttgcaattatccaggcaggtgacgacaacttgatgcaggaaatcaaccagaatttggctgaggaggctggtctgaacatcactcacatttgcctccctccagatagcagtgaagccgagattatagatgaaatcttaaagatcaatgaagataccagagtacatggccttgcccttcagatctctgagaacttgtttagcaacaaagtcctcaatgccttgaaaccagaaaaagatgtggatggagtaacagacataaacctggggaagctggtgcgaggggatgcccatgaatgttttgtttcacctgttgccaaagctgtaattgaacttcttgaaaaatcagtaggtgtcaacctagatggaaagaagattttggtagtgggggcccatgggtctttggaagctgctctacaatgcctgttccagagaaaagggtccatgacaatgagcatccagtggaaaacacgccagcttcaaagcaagcttcacgaggctgacattgtggtcctaggctcacctaagccagaagagattccccttacttggatacaaccaggaactactgttctcaactgctcccatgacttcctgtcagggaaggttgggtgtggctctccaagaatacattttggtggactcattgaggaagatgatgtgattctccttgctgcagctctgcgaattcagaacatggtcagtagtggaaggagatggcttcgtgaacagcagcacaggcggtggagacttcactgcttgaaacttcagcctctctcccctgtgccaagtgacattgagatttcaagaggacaaactccaaaagctgtggatgtccttgccaaggagattggattgcttgcagatgaaattgaaatctatggcaaaagcaaagccaaagtacgtttgtccgtgctagaaaggttaaaggatcaagcagatggaaaatacgtcttagttgctgggatcacacccacccctcttggagaagggaagagcacagtcaccatcgggcttgtgcaggctctgaccgcacacctgaatgtcaactcctttgcctgcttgaggcagccttcccaaggaccgacgtttggagtgaaaggaggagccgcgggtggtggatatgcccaggtcatccccatggaggagttcaaccttcacttgactggagacatccacgccatcaccgctgccaataacttgctggctgccgccatcgacacgaggattcttcatgaaaacacgcaaacagataaggctctgtataatcggctggttcctttagtgaatggtgtcagagaattttcagaaattcagcttgctcggctaaaaaaactgggaataaataagactgatccgagcacactgacagaagaggaagtgagtaaatttgcccgtctcgacatcgacccatctaccatcacgtggcagagagtattggatacaaatgaccgatttctacgaaaaataaccatcgggcagggaaacacagagaagggccattaccggcaggcgcagtttgacatcgcagtggccagcgagatcatggcggtgctggccctgacggacagcctcgcagacatgaaggcacggctgggaaggatggtggtggccagtgacaaaagcgggcagcctgtgacagcagatgatttgggggtgacaggtgctttgacagttttgatgaaagatgcaataaaaccaaacctgatgcagaccctggaagggacacctgtgttcgtgcatgcgggcccttttgctaacattgctcacggcaactcttcagtgttggctgataaaattgccctgaaactggttggtgaagaaggatttgtaggcttgttctaggcatgaagtgcagtgatgatggagaaggcatggactgtggcacaaatagaagagtcaggggttggcagctcctattcccactgtacgatgccaaggatctttacctataggataagccttcagaaacataatttggtctttcaagtgctgaatacctcttgaccgaagctggctttggtgctgacatcggaatggagaaattcttcaacatcaagtgccgagcttccggcttggtgcccaacgtggttgtgttagtggcaacggtgcgagctctgaagatgcatggaggcgggccaagtgtaacggctggtgttcctcttaagaaagaatatacagaggagaacatccagctggtggcagacggctgctgtaacctccagaagcaaattcagatcactcagctctttggggttcccgttgtggtggctctgaatgtcttcaagaccgacacccgcgctgagattgacttggtgtgtgagcttgcaaagcgggctggtgcctttgatgcagtcccctgctatcactggtccgttggtggaaaaggatcggtggacttggctcgggctgtgagagaggctgcgagtaaaagaagccgattccagttcctgtatgatgttcaggttccaattgtggacaagataaggaccattgctcaggctgtctatggagccaaagatattgaactctctcctgaggcacaagccaaaatagatcgttacactcaacagggttttggaaatttgcccatctgcatggcaaagacccacctttctctatctcaccaacctgacaaaaaaggtgtgccaagggacttcatcttacctatcagtgacgtccgggccagcataggcgctgggttcatttaccctttggtcggaacgatgagcaccatgccaggactgcccacccggccctgcttttatgacatagatcttgataccgaaacagaacaagttaaaggcttgttctaagtggacaaggctctcacaggacccgatgcagactcctgaaacagactactctttgcctttttgctgcagttggagaagaaactgaatttgaaaaatgtctgttatgcaatgctggagacatggtgaaataggccaaagatttcttcttcgttcaagatgaattctgttcacagtggagtatggtgttcggcaaaaggacctccaccaagactgaaagaaactaatttatttctgtttctgtggagtttccattatttctactgcttacactttagaatgtttattttatggggactaagggattaggagtgtgaactaaaaggtaacattttccactctcaagttttctactttgtctttgaactgaaaataaacatggatctagaaaaccaa

SEQ ID NO: 297806 - DNA, 3997 bp, Homo sapiens
  misc_feature (3707)..(3707): n is a, c, g, or t
  misc_feature (3710)..(3710): n is a, c, g, or t
  misc_feature (3717)..(3717): n is a, c, g, or t
  misc_feature (3719)..(3720): n is a, c, g, or t
gaagggagggaggctgagtctcagggcagagtctgagtcccactccgcaccccaccctctgtctggtacagcttaccaaaccaaagtgcccaaagccgtgacatcccggccggcggctcgcaggcccccgccctccgcacgtcacggccgccgggtgcagtgccccctaggggcccctgggacgaggaggaagcgccaggtccttcccgccgccgccgccgccgccgccgccgcctgctcccctggcacgcgccccgccgccctcggcagccgcagctccgtgtcccctgagaaccagccgtcccgcgccatgggcacgcgtctgccgctcgtcctgcgccagctccgccgcccgccccagcccccgggccctccgcgccgcctccgtgtgccctgtcgcgctagcagcggcggcggcggaggcggcggcggtggccgggagggcctgcttggacagcggcggccgcaggatggccaggcccggagcagctgcagccccggcggccgaacgcccgcggcgcgggactccatcgtcagagaagtcattcagaattcaaaagaagttctaagtttattgcaagaaaaaaaccctgccttcaagccggttcttgcaattatccaggcaggtgacgacaacttgatgcaggaaatcaaccagaatttggctgaggaggctggtctgaacatcactcacatttgcctccctccagatagcagtgaagccgagattatagatgaaatcttaaagatcaatgaagataccagagtacatggccttgcccttcagatctctgagaacttgtttagcaacaaagtcctcaatgccttgaaaccagaaaaagatgtggatggagtaacagacataaacctggggaagctggtgcgaggggatgcccatgaatgttttgtttcacctgttgccaaagctgtaattgaacttcttgaaaaatcagtaggtgtcaacctagatggaaagaagattttggtagtgggggcccatgggtctttggaagctgctctacaatgcctgttccagagaaaagggtccatgacaatgagcatccagtggaaaacacgccagcttcaaagcaagcttcacgaggctgacattgtggtcctaggctcacctaagccagaagagattccccttacttggatacaaccaggaactactgttctcaactgctcccatgacttcctgtcagggaaggttgggtgtggctctccaagaatacattttggtggactcattgaggaagatgatgtgattctccttgctgcagctctgcgaattcagaacatggtcagtagtggaaggagatggcttcgtgaacagcagcacaggcggtggagacttcactgcttgaaacttcagcctctctcccctgtgccaagtgacattgagatttcaagaggacaaactccaaaagctgtggatgtccttgccaaggagattggattgcttgcagatgaaattgaaatctatggcaaaagcaaagccaaagtacgtttgtccgtgctagaaaggttaaaggatcaagcagatggaaaatacgtcttagttgctgggatcacacccacccctcttggagaagggaagagcacagtcaccatcgggcttgtgcaggctctgaccgcacacctgaatgtcaactcctttgcctgcttgaggcagccttcccaaggaccgacgtttggagtgaaaggaggagccgcgggtggtggatatgcccaggtcatccccatggaggagttcaaccttcacttgactggagacatccacgccatcaccgctgccaataacttgctggctgccgccatcgacacgaggattcttcatgaaaacacgcaaacagataaggctctgtataatcggctggttcctttagtgaatggtgtcagagaattttcagaaattcagcttgctcggctaaaaaaactgggaataaataagactgatccgagcacactgacagaagaggaagtgagtaaatttgcccgtctcgacatcgacccatctaccatcacgtggcagagagtattggatacaaatgaccgatttctacgaaaaataaccatcgggcagggaaacacagagaagggccattaccggcaggcgcagtttgacatcgcagtggccagcgagatcatggcggtgctggccctgacggacagcctcgcagacatgaaggcacggctgggaaggatggtggtggccagtgacaaaagcgggcagcctgtgacagcagatgatttgggggtgacaggtgctttgacagttttgatgaaagatgcaataaaaccaaacctgatgcagaccctggaagggacacctgtgttcgtgcatgcgggcccttttgctaacattgctcacggcaactcttcagtgttggctgataaaattgccctgaaactggttggtgaagaaggatttgtagtgaccgaagctggctttggtgctgacatcggaatggagaaattcttcaacatcaagtgccgagcttccggcttggtgcccaacgtggttgtgttagtggcaacggtgcgagctctgaagatgcatggaggcgggccaagtgtaacggctggtgttcctcttaagaaagaatatacagaggagaacatccagctggtggcagacggctgctgtaacctccagaagcaaattcagatcactcagctctttggggttcccgttgtggtggctctgaatgtcttcaagaccgacacccgcgctgagattgacttggtgtgtgagcttgcaaagcgggctggtgcctttgatgcagtcccctgctatcactggtccgttggtggaaaaggatcggtggacttggctcgggctgtgagagaggctgcgagtaaaagaagccgattccagttcctgtatgatgttcaggttccaattgtggacaagataaggaccattgctcaggctgtctatggagccaaagatattgaactctctcctgaggcacaagccaaaatagatcgttacactcaacagggttttggaaatttgcccatctgcatggcaaagacccacctttctctatctcaccaacctgacaaaaaaggtgtgccaagggacttcatcttacctatcagtgacgtccgggccagcataggcgctgggttcatttaccctttggtcggaacgatgagcaccatgccaggactgcccacccggccctgcttttatgacatagatcttgataccgaaacagaacaagttaaaggcttgttctaagtggacaaggctctcacaggacccgatgcagactcctgaaacagactactctttgcctttttgctgcagttggagaagaaactgaatttgaaaaatgtctgttatgcaatgctggagacatggtgaaataggccaaagatttcttcttcgttcaagatgaattctgttcacagtggagtatggtgttcggcaaaaggacctccaccaagactgaaagaaactaatttatttctgtttctgtggagtttccattatttctactgcttacactttagaatgtttattttatggggactaagggattaggagtgtgaactaaaaggtaacattttccactctcaagttttctactttgtctttgaactgaaaataaacatggatctagaaaaccaaaaaaaaaataaaaaaaaaaaaaaaaaacaaaaaacaacaaaaaaaaaaaaacaaaaaaaaaaanaanaaaacanannacagaaaagaagaagaaaagaaaagaaaacaacaagacaacaataagaaaaacgaggggggggggcgacctaaaaaaccattgcgcaggggggcgcagcacgatagctacaaagagacacacacccgttacagtaaaaagagggagggccacttcagcgggcaggcgcccaaacaaccgcgaagcggggggaaggaaacaagagaccgacggaaggaagagaaagaacgagacggaatgagatggaagagaaccacattagggggggacgacaaggc

SEQ ID NO: 297807 - DNA, 3989 bp, Homo sapiens
gaagggagggaggctgagtctcagggcagagtctgagtcccactccgcaccccaccctctgtctggtacagcttaccaaaccaaagtgcccaaagccgtgacatcccggccggcggctcgcaggcccccgccctccgcacgtcacggccgccgggtgcagtgccccctaggggcccctgggacgaggaggaagcgccaggtccttcccgccgccgccgccgccgccgccgccgcctgctcccctggcacgcgccccgccgccctcggcagccgcagctccgtgtcccctgagaaccagccgtcccgcgccatgggcacgcgtctgccgctcgtcctgcgccagctccgccgcccgccccagcccccgggccctccgcgccgcctccgtgtgccctgtcgcgctagcagcggcggcggcggaggcggcggcggtggccgggagggcctgcttggacagcggcggccgcaggatggccaggcccggagcagctgcagccccggcggccgaacgcccgcggcgcgggactccatcgtcagagaagtcattcagaattcaaaagaagttctaagtttattgcaagaaaaaaaccctgccttcaagccggttcttgcaattatccaggcaggtgacgacaacttgatgcaggaaatcaaccagaatttggctgaggaggctggtctgaacatcactcacatttgcctccctccagatagcagtgaagccgagattatagatgaaatcttaaagatcaatgaagataccagagtacatggccttgcccttcagatctctgagaacttgtttagcaacaaagtcctcaatgccttgaaaccagaaaaagatgtggatggagtaacagacataaacctggggaagctggtgcgaggggatgcccatgaatgttttgtttcacctgttgccaaagctgtaattgaacttcttgaaaaatcagtaggtgtcaacctagatggaaagaagattttggtagtgggggcccatgggtctttggaagctgctctacaatgcctgttccagagaaaagggtccatgacaatgagcatccagtggaaaacacgccagcttcaaagcaagcttcacgaggctgacattgtggtcctaggctcacctaagccagaagagattccccttacttggatacaaccaggaactactgttctcaactgctcccatgacttcctgtcagggaaggttgggtgtggctctccaagaatacattttggtggactcattgaggaagatgatgtgattctccttgctgcagctctgcgaattcagaacatggtcagtagtggaaggagatggcttcgtgaacagcagcacaggcggtggagacttcactgcttgaaacttcagcctctctcccctgtgccaagtgacattgagatttcaagaggacaaactccaaaagctgtggatgtccttgccaaggagattggattgcttgcagatgaaattgaaatctatggcaaaagcaaagccaaagtacgtttgtccgtgctagaaaggttaaaggatcaagcagatggaaaatacgtcttagttgctgggatcacacccacccctcttggagaagggaagagcacagtcaccatcgggcttgtgcaggctctgaccgcacacctgaatgtcaactcctttgcctgcttgaggcagccttcccaaggaccgacgtttggagtgaaaggaggagccgcgggtggtggatatgcccaggtcatccccatggaggagttcaaccttcacttgactggagacatccacgccatcaccgctgccaataacttgctggctgccgccatcgacacgaggattcttcatgaaaacacgcaaacagataaggctctgtataatcggctggttcctttagtgaatggtgtcagagaattttcagaaattcagcttgctcggctaaaaaaactgggaataaataagactgatccgagcacactgacagaagaggaagtgagtaaatttgcccgtctcgacatcgacccatctaccatcacgtggcagagagtattggatacaaatgaccgatttctacgaaaaataaccatcgggcagggaaacacagagaagggccattaccggcaggcgcagtttgacatcgcagtggccagcgagatcatggcggtgctggccctgacggacagcctcgcagacatgaaggcacggctgggaaggatggtggtggccagtgacaaaagcgggcagcctgtgacagcagatgatttgggggtgacaggtgctttgacagttttgatgaaagatgcaataaaaccaaacctgatgcagaccctggaagggacacctgtgttcgtgcatgcgggcccttttgctaacattgctcacggcaactcttcagtgttggctgataaaattgccctgaaactggttggtgaagaaggatttgtagtgaccgaagctggctttggtgctgacatcggaatggagaaattcttcaacatcaagtgccgagcttccggcttggtgcccaacgtggttgtgttagtggcaacggtgcgagctctgaagatgcatggaggcgggccaagtgtaacggctggtgttcctcttaagaaagaatatacagaggagaacatccagctggtggcagacggctgctgtaacctccagaagcaaattcagatcactcagctctttggggttcccgttgtggtggctctgaatgtcttcaagaccgacacccgcgctgagattgacttggtgtgtgagcttgcaaagcgggctggtgcctttgatgcagtcccctgctatcactggtccgttggtggaaaaggatcggtggacttggctcgggctgtgagagaggctgcgagtaaaagaagccgattccagttcctgtatgatgttcaggttccaattgtggacaagataaggaccattgctcaggctgtctatggagccaaagatattgaactctctcctgaggcacaagccaaaatagatcgttacactcaacagggttttggaaatttgcccatctgcatggcaaagacccacctttctctatctcaccaacctgacaaaaaaggtgtgccaagggacttcatcttacctatcagtgacgtccgggccagcataggcgctgggttcatttaccctttggtcggaacgatgagcaccatgccaggactgcccacccggccctgcttttatgacatagatcttgataccgaaacagaacaagttaaaggcttgttctaagtggacaaggctctcacaggacccgatgcagactcctgaaacagactactctttgcctttttgctgcagttggagaagaaactgaatttgaaaaatgtctgttatgcaatgctggagacatggtgaaataggccaaagatttcttcttcgttcaagatgaattctgttcacagtggagtatggtgttcggcaaaaggacctccaccaagactgaaagaaactaatttatttctgtttctgtggagtttccattatttctactgcttacactttagaatgtttattttatggggactaagggattaggagtgtgaactaaaaggtaacattttccactctcaagttttctactttgtctttgaactgaaaataaacatggatctagaaaaccaaccagcaagttttcagtgccagataaaactctgcgctctagaggtaactcctcatgggaggcagctaggagtgttacctgacaccagtttcctagaaaactgtgacaagcaaagcaataacacacgtcgagaaatatctgatcaagcgggaaatcttctgactgtcggggatctctagtaagatctcttggaatgaagtgcactgtgtatccaaaactattttccagcgccagtgaagttgctcttacctaaaacaaatgggtttatgctagtttccaccaaggaatgagtctcgatggccattaaactttctaaggcccacagggctaggaaaagtcgctcttaaa

SEQ ID NO: 297808 - DNA, 3231 bp, Homo sapiens
gaagggagggaggctgagtctcagggcagagtctgagtcccactccgcaccccaccctctgtctggtacagcttaccaaaccaaagtgcccaaagccgtgacatcccggccggcggctcgcaggcccccgccctccgcacgtcacggccgccgggtgcagtgccccctaggggcccctgggacgaggaggaagcgccaggtccttcccgccgccgccgccgccgccgccgccgcctgctcccctggcacgcgccccgccgccctcggcagccgcagctccgtgtcccctgagaaccagccgtcccgcgccatgggcacgcgtctgccgctcgtcctgcgccagctccgccgcccgccccagcccccgggccctccgcgccgcctccgtgtgccctgtcgcgctagcagcggcggcggcggaggcggcggcggtggccgggagggcctgcttggacagcggcggccgcaggatggccaggcccggagcagctgcagccccggcggccgaacgcccgcggcgcgggactccatcgtcagagaagtcattcagaattcaaaagaagttctaagtttattgcaagaaaaaaaccctgccttcaagccggttcttgcaattatccaggcaggtgacgacaacttgatgcaggaaatcaaccagaatttggctgaggaggctggtctgaacatcactcacatttgcctccctccagatagcagtgaagccgagattatagatgaaatcttaaagatcaatgaagataccagagtacatggccttgcccttcagatctctgagaacttgtttagcaacaaagtcctcaatgccttgaaaccagaaaaagatgtggatggagtaacagacataaacctggggaagctggtgcgaggggatgcccatgaatgttttgtttcacctgttgccaaagctgtaattgaacttcttgaaaaatcagtaggtgtcaacctagatggaaagaagattttggtagtgggggcccatgggtctttggaagctgctctacaatgcctgttccagagaaaagggtccatgacaatgagcatccagtggaaaacacgccagcttcaaagcaagcttcacgaggctgacattgtggtcctaggctcacctaagccagaagagattccccttacttggatacaaccaggaactactgttctcaactgctcccatgacttcctgtcagggaaggttgggtgtggctctccaagaatacattttggtggactcattgaggaagatgatgtgattctccttgctgcagctctgcgaattcagaacatggtcagtagtggaaggagatggcttcgtgaacagcagcacaggcggtggagacttcactgcttgaaacttcagcctctctcccctgtgccaagtgacattgagatttcaagaggacaaactccaaaagctgtggatgtccttgccaaggagattggattgcttgcagatgaaattgaaatctatggcaaaagcaaagccaaagtacgtttgtccgtgctagaaaggttaaaggatcaagcagatggaaaatacgtcttagttgctgggatcacacccacccctcttggagaagggaagagcacagtcaccatcgggcttgtgcaggctctgaccgcacacctgaatgtcaactcctttgcctgcttgaggcagccttcccaaggaccgacgtttggagtgaaaggaggagccgcgggtggtggatatgcccaggtcatccccatggaggagttcaaccttcacttgactggagacatccacgccatcaccgctgccaataacttgctggctgccgccatcgacacgaggattcttcatgaaaacacgcaaacagataaggctctgtataatcggctggttcctttagtgaatggtgtcagagaattttcagaaattcagcttgctcggctaaaaaaactgggaataaataagactgatccgagcacactgacagaagaggaagtgagtaaatttgcccgtctcgacatcgacccatctaccatcacgtggcagagagtattggatacaaatgaccgatttctacgaaaaataaccatcgggcagggaaacacagagaagggccattaccggcaggcgcagtttgacatcgcagtggccagcgagatcatggcggtgctggccctgacggacagcctcgcagacatgaaggcacggctgggaaggatggtggtggccagtgacaaaagcgggcagcctgtgacagcagatgatttgggggtgacaggtgctttgacagttttgatgaaagatgcaataaaaccaaacctgatgcagaccctggaagggacacctgtgttcgtgcatgcgggcccttttgctaacattgctcacggcaactcttcagtgttggctgataaaattgccctgaaactggttggtgaagaaggatttgtagtgaccgaagctggctttggtgctgacatcggaatggagaaattcttcaacatcaagtgccgagcttccggcttggtgcccaacgtggttgtgttagtggcaacggtgcgagctctgaagatgcatggaggcgggccaagtgtaacggctggtgttcctcttaagaaagaatatacagaggagaacatccagctggtggcagacggctgctgtaacctccagaagcaaattcagatcactcagctctttggggttcccgttgtggtggctctgaatgtcttcaagaccgacacccgcgctgagattgacttggtgtgtgagcttgcaaagcgggctggtgcctttgatgcagtcccctgctatcactggtccgttggtggaaaaggatcggtggacttggctcgggctgtgagagaggctgcgagtaaaagaagccgattccagttcctgtatgatgttcagccattctcttgatcccagtgggggctggatgaaggaagagcaaaacaaaccacgaagacagcctggagccgcagccagctctgctgacttctgaacttcacgctctcactgcccagatggccaggggtgtttcctcctctgctggtcttttttaaggcaggatgtttgttgttattgttgttgtttttctggttggttcttaagaaattattttctacatcttgaaaatgccagctggaacctacaccagttgttggtggggtgtgagaactatcctttacatggacttggagcatttgcaactagagcctccacattgaaataaacccaga

SEQ ID NO: 297809 - DNA, 1842 bp, Homo sapiens
ccttttgaaacaatttggaacctgattacaaagttgaaaatccccatctgtatgaagaaaagcttcactggctggtcaccttggctcaacgcctgtaatcccagcactttgtgaggctgaggcgggtggatcacaaggtcaggagtttgagaccagtctggccaacatggtgaaaccccatctctactaaaaatacaaaaataaaaaattagccaggtgtggtggcaaacacctgtagctactcaggaggctgagtcaggagaatcgcttgtgcccgggaggcagaggttgcagtgagccgagatcatgccgctgtactccagcctgtgcgacagggcaagacaccatctccaaaaaaaaaaagcttcactgtgagttatgatatgggaagaaaagtcttggcctggccaccacaaggaatccctcaggcctggcggtgggaagcagaggagggcgcagtctctttagggcagaaagtgaagaacatttctatgacaatggggaaatcagttcacctttgtgttggtaaacaaaaggaatgtaagctgtcctttgagctcgaatcatagtggtgattgccaaaacctacctttgtttttagaagataatagcacatattccacttgcttccccacagtgaccgaagctggctttggtgctgacatcggaatggagaaattcttcaacatcaagtgccgagcttccggcttggtgcccaacgtggttgtgttagtggcaacggtgcgagctctgaagatgcatggaggcgggccaagtgtaacggctggtgttcctcttaagaaagaatatacagaggagaacatccagctggtggcagacggctgctgtaacctccagaagcaaattcagatcactcagctctttggggttcccgttgtggtggctctgaatgtcttcaagaccgacacccgcgctgagattgacttggtgtgtgagcttgcaaagcgggctggtgcctttgatgcagtcccctgctatcactggtccgttggtggaaaaggatcggtggacttggctcgggctgtgagagaggctgcgagtaaaagaagccgattccagttcctgtatgatgttcaggttccaattgtggacaagataaggaccattgctcaggctgtctatggagccaaagatattgaactctctcctgaggcacaagccaaaatagatcgttacactcaacagggttttggaaatttgcccatctgcatggcaaagacccacctttctctatctcaccaacctgacaaaaaaggtgtgccaagggacttcatcttacctatcagtgacgtccgggccagcataggcgctgggttcatttaccctttggtcggaacgatgagcaccatgccaggactgcccacccggccctgcttttatgacatagatcttgataccgaaacagaacaagttaaaggcttgttctaagtggacaaggctctcacaggacccgatgcagactcctgaaacagactactctttgcctttttgctgcagttggagaagaaactgaatttgaaaaatgtctgttatgcaatgctggagacatggtgaaataggccaaagatttcttcttcgttcaagatgaattctgttcacagtggagtatggtgttcggcaaaaggacctccaccaagactgaaagaaactaatttatttctgtttctgtggagtttccattatttctactgcttacactttagaatgtttattttatggggactaagggattaggagtgtgaactaaaaggtaacattttccactctcaagttttctactttgtctttgaactgaaaataaacatggatctagaaaaccaa

SEQ ID NO: 297810 - DNA, 1486 bp, Homo sapiens
gaagggagggaggctgagtctcagggcagagtctgagtcccactccgcaccccaccctctgtctggtacagcttaccaaaccaaagtgcccaaagccgtgacatcccggccggcggctcgcaggcccccgccctccgcacgtcacggccgccgggtgcagtgccccctaggggcccctgggacgaggaggaagcgccaggtccttcccgccgccgccgccgccgccgccgccgcctgctcccctggcacgcgccccgccgccctcggcagccgcagctccgtgtcccctgagaaccagccgtcccgcgccatgggcacgcgtctgccgctcgtcctgcgccagctccgccgcccgccccagcccccgggccctccgcgccgcctccgtgtgccctgtcgcgctagcagcggcggcggcggaggcggcggcggtggccgggagggcctgcttggacagcggcggccgcaggatggccaggcccggagcagctgcagccccggcggccgaacgcccgcggcgcgggactccatcgtcagagaagtcattcagaattcaaaagaagttctaagtttattgcaagaaaaaaaccctgccttcaagccggttcttgcaattatccaggcaggtgacgacaacttgatgcaggaaatcaaccagaatttggctgaggaggctggtctgaacatcactcacatttgcctccctccagatagcagtgaagccgagattatagatgaaatcttaaagatcaatgaagataccagagtacatggccttgcccttcagatctctgagaacttgtttagcaacaaagtcctcaatgccttgaaaccagaaaaagatgtggatggagtaacagacataaacctggggaagctggtgcgaggggatgcccatgaatgttttgtttcacctgttgccaaagctgtaattgaacttcttgaaaaatcagtaggtgtcaacctagatggaaagaagattttggtagtgggggcccatgggtctttggaagctgctctacaatgcctgttccagagaaaagggtccatgacaatgagcatccagtggaaaacacgccagcttcaaagcaagcttcacgaggctgacattgtggtcctaggctcacctaagccagaagagattccccttacttggatacaaccaggaactactgttctcaactgctcccatgacttcctgtcagaaagtttgattatcattagaagaatggccatcttttaaagtgattcattgacttgtccctggagaaatcatgagttagatgagagtgtttagtgggaagtgaaaagacccgtccacggtttcggatgagatcctcgttggactgtgatcccaggatattacccaggcccagatcgtagacaacctcccaatggagtcctgcccctacacgggcagggggtgaaataatgattccctttcttaattttctttagccatgaaatttattaaaaatgtatgtct

SEQ ID NO: 297811 - DNA, 369 bp, Homo sapiens
gccattattcaccctgcccacacctgctgcccccttcaacctgatgggcttgtctttgttggcgttcagcatgaagattttattgagaagaaaaggtttggagtttggaagatcactgttttgtagttcgggtgtgttatggggccacagggaaggtaaatggtctcaattttcaggaagttgacatttgccttttctacttcatttccttaaacaaaaattgaaatatcagatgacaaatttaaagagatatatcccatataaaacctaaagttctatgaggctgtattgaacgatagagttaatttgcatcatcagatgttgtggccgctttgtagcatttgctaatctgtaacgcttggttttctc

SEQ ID NO: 297812 - DNA, 476 bp, Homo sapiens
gatgttcacgtttttgaacttacacatattcttctgtataagtaaaatatttcataaaattaaaaatgttttataaaattaggaacagaatttcttaaagatcaacatggtactaatacatcttacaatctgtctttcaaagtttcaatagacttaacttagagtcattttttaaattgcattttgatgccaatataattcatgtgtcattttccgctataatacaatgaaaatccagataatggagatggattttcttctgagtagccacgcatattaggtttcaggctccaattgcctggttttgaattgctctttgccatgtgctgtctgtgaccttgggtgggtcacttcacctcccccaaatctaggtttctccaatacctacctccaggcttgttctaggcatgaagtgcagtgatgatggagaaggcatggactgtggcacaaatagaagagtcaggggttggcagctc

SEQ ID NO: 297813 - DNA, 384 bp, Homo sapiens
cctcgctcctgtcgacctctgacacacatcttaataactgctctgatctgcggctgttttcaggggccaaggggacagggtgtcccctcctctccagtaagtagtaaacaggagtggtggcctgaagagatcacaggctaggatttggaggagctgtcctggtttgggtactgcctagctgggaggttgcaagcaggtcaccctggcttagtgcccttggcttttaaccccaactgccctcttcccttctgaggacagtaataaaaaataaaaatggagtgatcttagccacataccttggggtggctgtgcagagccataaagatgaaagaaaggcctgcctgtctccctccttccttcctttccttgtttaaaaaaaaaaaa

SEQ ID NO: 297814 - DNA, 8134 bp, Homo sapiens
cggggcgtgcgcgtcctcctccccaggcccgccgcctccctgccaagaatctgagagaggccgagtggagttcggtccttctctgaacagttttagctgagagtaccagcatccaactgggagcgttgtcattgcatttccacattcccaggaaagcccaggtgctggctgccagctgctgcgccccccatgtagaaggtgcacctcctgggagcaggcacgtcttttggctcttctgaccatggagagataggacggtccctgcagcccgcgcgacagaaagctgtgccgccaccaccggccgcgtccgtccttcggatggatcgcaacagagaggccgagatggagctgaggcgaggccccagccccaccagggccggccggggccacgaggtggatggggacaaggctacctgccacacctgctgcatctgcggcaagagcttccccttccagagctcgctttcgcagcacatgcgcaagcacacgggcgagaagccctacaagtgtccctactgcgaccaccgggcttcccagaagggcaacctgaagattcacatccggagccaccgcacggggactctgattcagggacacgagccggaggcgggcgaggcgccgctgggtgagatgcgcgcctccgagggcctggacgcctgcgccagccccaccaagagcgcctctgcctgcaaccggctgctgaacggggcctcgcaggccgacggcgccagggtcctgaacggggcctcgcaggccgacagcggcagagtcctgctgcggagcagcaagaagggggcagaggggtccgcatgcgccccgggggaggccaaggcagcggtccagtgctccttctgcaagagccagttcgagcgtaagaaggacctggagctgcacgtgcaccaggcgcacaagccgttcaagtgcaggctgtgcagctacgcgacgctgcgggaggagtcgctgctgagccacatcgagagggaccacatcaccgcgcaggggcccggcagcggcgaggcctgcgtggagaacggcaagcccgagctgagccccggggagttcccgtgcgaggtgtgtggccaggccttcagccagacctggttcctgaaggcgcacatgaagaagcaccggggctccttcgaccacggctgccacatctgcggccgtaggttcaaggagccctggttcctcaagaaccacatgaaggcgcacggccccaagacgggcagcaagaacaggcccaagagtgagctggaccccatcgccaccatcaacaacgtggtccaggaggaggtgatcgtcgccggcctgagcctctacgaggtctgcgccaagtgcgggaacctgtttacaaacctggacagcttgaacgcccacaatgccatccaccgcagagtcgaggccagccgcacgcgcgccccggccgaggagggggcggaggggccctcggacaccaagcagttctttctccagtgcctgaacctgaggccgtcggcggccggcgactcgtgccctggcacgcaggccggacggcgggtggctgagctggacccggtcaacagctaccaggcctggcagctggccacgcggggtaaggtggccgagccggccgagtacctcaagtacggggcctgggacgaggcgctggccggggacgtggccttcgacaaggacaggcgcgagtacgtcctggtgagccaggagaagcgcaagcgtgagcaggatgcaccagccgcgcaggggcccccgcggaagcgcgcgagcgggcctggggaccccgcgcccgccggccacctcgatccccgctcggccgcgcgccccaaccgcagggccgcagccaccaccggccagggcaagtcctccgagtgcttcgagtgcggcaagatcttccgcacctatcatcagatggtgctgcactcacgcgtgcatcgccgcgcgcgccgcgagagggacagtgacggggacagggcggcgcgggcccgctgcggatcactcagtgagggtgactcggcctcccagcccagcagccctggctccgcctgtgccgctgctgactccccgggctctggcctggccgacgaggctgccgaagacagtggtgaggagggcgcccctgaacctgcaccagggggacagccgcgccgctgctgcttttccgaagaggtgacttcgaccgagctctccagtggagaccagagtcacaagatgggagataacgcctcggaaagagacaccggcgagtccaaggcagggatcgcagcttctgtgtccatacttgaaaacagtagcagagagacttctagaaggcaagagcagcacagattttctatggacttaaagatgccagcatttcaccccaagcaggaggtgcccgtccctggtgatggtgtggagttcccttccagtacgggagcggagggccagacgggtcaccctgcagaaaagctgtccgatttgcacaacaaggaacactctgggggagggaagcgggcgctggccccagacctcatgccgctagatttaagtgcgaggtcgacgcgggatgaccccagcaataaggagacggcctcctccctgcaggcggctttagtcgttcacccgtgtccttactgcagccacaagacctactaccccgaggtcctgtggatgcacaaacgcatctggcaccgcgtcagctgcaactccgtggctcccccgtggattcagcccaatggttacaaaagcatcagaagcaatttggttttcctttcccggagcggacgcacgggccccccgcctgccctcggtggcaaagaatgccagcctttgctccttgctcggttcacccgcactcaggtgccaggggggatgccggggtccaaaagtggctcttctcccctgggagtggtcacaaaagccgctagcatgcctaagaataaggagagccattccggaggtccctgcgctctgtgggcgcccggccctgacgggtatcgacagaccaaaccttgtcacggccaggagccacatggcgcggccacacaggggcccctggccaagcccaggcaggaggctagctccaaaccggtgcctgccccgggtggcgggggcttcagcaggagcgccacccctacgcccaccgtcatcgcccgggctggcgcgcagccctcggccaatagcaagcctgtggagaagtttggggtccccccagcgggggctggctttgcccccacaaataagcacagtgccccggactccctgaaagccaaattcagtgctcagcctcagggtccacctcctgcaaagggcgaagggggcgctcctcctctacctccccgcgagcccccctcgaaggcagcccaggagctgaggactctggccacctgtgctgcggggtccaggggcgacgcggccttgcaggcccagcccggcgtggctggggcgccccccgtcctacactccatcaaacaggagccagtggccgaggggcatgagaagcgcctggacatcctcaacatctttaagacgtacattccaaaggactttgcgaccctctaccagggatggggtgtcagcggccctgggttggagcacagagggacactccggacgcaggcccggccaggagagttcgtctgcatcgagtgcggaaagagcttccaccagcccggccacctcagggcccacatgcgggcacactcagtggtgtttgagtccgatgggcctcggggttctgaagttcataccacctccgcagacgcccccaaacaagggagagaccattctaacacaggtaccgtccagacagtgcctctgagaaagggaacctaaaggcgtgtttccgacgcaccccaggtccccgtaacggccattagcagtaccctcacgatgtcccagcagcctcccacctgtgacctggccgctccatggaagaacagccggggaactcctgagcagacacctcacatcccgagccgctgcgctggagtggaaactgaaggcagatgcctctccttgttaaacgttcagaaataaatgaagatgctatattctagaaatacatgtagatactatatacgcatttacgtgctcatcgtccatagtcccatattttcttataataaacagtagtactggcaggcacagtaggggcacaaggcatctgtcttattcaagacaagtttgagacactggaaaaaaagatacttgttgtgtgtgttggacagagtggcgaggctgagcactgtcacaggggcctcccatgttaagagggactgtggggatgatgtcagaacaagacgtggtggatttgaggttgatcgagtattaatactactgcctctccttgtcttagtgggtatttaaaatagtaaataagagagaggaaggaggtgacgttcaggtgctgtgggaagcaggcttggcggaggggtatgatgatgagaccctcattgttcactggctccatcgcactcctccctggggccgtgtgcctgttccattcttcccaccattcgaactgagcgaatctggcaaaggagacacgtctgtgggaatgcgtagattccgcctcggaagagagctagcgcaacactaagaaaagcaggcttcttgtttattctcaggacctttttgtaacagggctacattctgcaaactgcttacaaaggaagactatacgtcttaacaaattatttagccactgagtcctcccgattcggacctgttttagtaatggcagaagaatccctgagcaggttcaggtgccctagatgactagggtgctgagctctggcgccttctgtccccactctttgcctccccgccccttccctgagccaccccagcaagtgggtgtcttttctccctgggcctggtgacctccacaggatgagtgactttgttcataaagggtggggatcaccagccccttgggtgggggacggcttcatatacctcttcctcagtaatgcaaatgcgagtttttgtggtgggggttaaggcccataacaaaggatcttaaaccatgcagtgtacgcaattgaaatggtattccacagatataaatattttcttttcccattgccgtgacactatgtgtgatggtaatatttctgagagtttcagatttttgcacatatgattttatgcattatcaaaagttactgctgccttgaatgaaaatgttctgtgaaattttttgcaaaagctttactaggtttttttttaattgtgaaattttgtaaaggcaggaaatggattaaaacgagcatgctaaatatatttttcaaaaaagcaataattttacatgtacagaaattatcctaacctttaatactggcgagagcaacagtttacttaatacggtaatggactagtgcagtttttgtagacagtgggcttctgatacaaagtcttgtttaaacacagacacacacacacacaaacacacacacacaccctaaagtgtgggtttcctgttctaatgatttgttgaatattattatattattattattattattattattattgttattgttattagtaatgtttggttctggattctacttgttactgagtttaaattacttgacggttcaggttactttgcaacactttcaaacgatgcaatgtaactggctagcttatatatatatatatatatatatatatatatttttttttttttttttacttatttttttctgatattcttacaccagatatgtacgaaaatgatctgtcctgttggtgtaattaggaatgtccatgcagatacagttaaacaactgtaattgactgttctgtaaagttattttgggcaaagttgcggagacacattcctctgtccacctaagaaatcagaagactcttctgttgatttatgtttaatcatttcagtagtttccccacagtgatcatttctgcattttctggcttttgttttcttggctgaaagtgaatggtgactgttaggaatgtcagggactagtgacccagtcctgtttctctgtgttttagttattaaaaagaaattctgtacccaaagtgacacgaaagtgtagtctacatttttactgtttcagaagcggcatggaaaagtgcagttggcctttggagctggaagtgtcttgctggtgaggctccatcctggaggctctggtggggagtgggctggcgctggggccctgccggccgcgtgctggatccttcctggcttgcaggagagcaggcgtggaggacagtcagcttgcggggccgcgcagggtgcacagagtgcaggaggaaggttttcacccagttaaacagactggggagcccccccaagaacgccatcccttgaggccagctgtgggcaggcctggatgtgtggtcccttccttccacccatcgtcagtattgtgttggtttgttaatttgttgatttggtcatagtatttaatatgatttgtgtttccttatttatttagccaccgttttgattgcctttttttttccgaatggtaatttctgcatgatacacttctgtacgttgtcttctgactgttacagactttctactacctctcccgatctgctgtttccttgtttcttaacaggattttttacagtgttgcgtctaatgtaacttagacaataaagggtttggttgtctacactgcagcttctcggtgtctctcccctgctttccgctcgctgcttcccgctctgcccctgctggggcctggctgcaccctggcctgccttcctatactctcctgtttcccgctcatatctcttcctcatttttgcgttcaaataacacacagctaatgagcttctaaaaatcttttcaggttgttcacttgtattccttaatttgaagaatgaatatttaaattctctcaaaagtcagatattgaggatcttctctgggaaattggccactgtacctgcccacctttctgcctggttccctggaaggtcttattgtcatcttagacggacagatttcattctcagcaccatacagatttggcttcaaagccaggtgaattttgcctttgaggctctgaaaagtattaagtgttttaagaggtcccccaatatttacttatttattttttaaaccaagaaagacactggttccctgaaaagcaggtgcttcaggaagtagcaattgggagttgcatacagttacttcgtcagagaaaggagcgcccagtatgacaggcccccacccctgatccggccactgtgcacaggtcgctgagggtgtgagaacacctctgcaggggctccggcacatgtgggtttcatcgtctcacactccttcaggctgcaggggttgagtgcagaaagggcaagcttcatctccatggtgcctctccaggctggcaactctggtcggcctctgttctttggacagagagggtgtaggttacagggtcagtagggatgctttctggatcaaagaaagtgggtgtagtgcttagtctgttgtgtggaagagggcacctcctgggctttcgtggctggagactgtctaccaacattccttccttcaaactagacaaaccctcctctgccacccccagcaaattctcagaggtttccaagctgtagaaaaaggaaggaaggaaggacggcattcacatagctttactttccgcttcaaaatgtcttaagtagcatatgttgttttactgcttttaactttggtgagttctaatttcagaacgttttgttcactgagcaaaaaaacagatgaaacaaccacaggccaggacttcaagtgaggaggacgcctttgtttgccgtggttggtgggagcacacgccggagcccggtaacgtgcctgtgggagtgaccaagggccacccgcccaagggaaaatgttcattcttcatcagctttgctaattctgctttgaggcagtaaaatgcaaaagaccatagaatttgtatttctttttttaaaatacaatttataacattatattttgtactctttatattagaatttgtaactagattgatgtatttaactatttctgaaaaagtaattcaatgttttagttgtgtgataaaaatatttagataaaacatattcattctattggaatttgaaataaataaaaacatcttggagttctgagatttgtaagacattt

SEQ ID NO: 297815 - DNA, 8080 bp, Homo sapiens
cggggcgtgcgcgtcctcctccccaggcccgccgcctccctgccaagaatctgagagaggccgagtggagttcggtccttctctgaacagttttagctgagagtaccagcatccaactgggagcgttgtcattgcatttccacattcccaggaaagcccaggtgctggctgccagctgctgcgccccccatgtagaaggtgcacctcctgggagcaggcacgtcttttggctcttctgaccatggagagataggacggtccctgcagcccgcgcgacagaaagctgtgccgccaccaccggccgcgtccgtccttcggatggatcgcaacagagaggccgagatggagctgaggcgaggccccagccccaccagggccggccggggccacgaggtggatggggacaaggctacctgccacacctgctgcatctgcggcaagagcttccccttccagagctcgctttcgcagcacatgcgcaagcacacgggcgagaagccctacaagtgtccctactgcgaccaccgggcttcccagaagggcaacctgaagattcacatccggagccaccgcacggggactctgattcagggacacgagccggaggcgggcgaggcgccgctgggtgagatgcgcgcctccgagggcctggacgcctgcgccagccccaccaagagcgcctctgcctgcaaccggctgctgaacggggcctcgcaggccgacggcgccagggtcctgaacggggcctcgcaggccgacagcggcagagtcctgctgcggagcagcaagaagggggcagaggggtccgcatgcgccccgggggaggccaaggcagcggtccagtgctccttctgcaagagccagttcgagcgtaagaaggacctggagctgcacgtgcaccaggcgcacaagccgttcaagtgcaggctgtgcagctacgcgacgctgcgggaggagtcgctgctgagccacatcgagagggaccacatcaccgcgcaggggcccggcagcggcgaggcctgcgtggagaacggcaagcccgagctgagccccggggagttcccgtgcgaggtgtgtggccaggccttcagccagacctggttcctgaaggcgcacatgaagaagcaccggggctccttcgaccacggctgccacatctgcggccgtaggttcaaggagccctggttcctcaagaaccacatgaaggcgcacggccccaagacgggcagcaagaacaggcccaagagtgagctggaccccatcgccaccatcaacaacgtggtccaggaggaggtgatcgtcgccggcctgagcctctacgaggtctgcgccaagtgcgggaacctgtttacaaacctggacagcttgaacgcccacaatgccatccaccgcagagtcgaggccagccgcacgcgcgccccggccgaggagggggcggaggggccctcggacaccaagcagttctttctccagtgcctgaacctgaggccgtcggcggccggcgactcgtgccctggcacgcaggccggacggcgggtggctgagctggacccggtcaacagctaccaggcctggcagctggccacgcggggtaaggtggccgagccggccgagtacctcaagtacggggcctgggacgaggcgctggccggggacgtggccttcgacaaggacaggcgcgagtacgtcctggtgagccaggagaagcgcaagcgtgagcaggatgcaccagccgcgcaggggcccccgcggaagcgcgcgagcgggcctggggaccccgcgcccgccggccacctcgatccccgctcggccgcgcgccccaaccgcagggccgcagccaccaccggccagggcaagtcctccgagtgcttcgagtgcggcaagatcttccgcacctatcatcagatggtgctgcactcacgcgtgcatcgccgcgcgcgccgcgagagggacagtgacggggacagggcggcgcgggcccgctgcggatcactcagtgagggtgactcggcctcccagcccagcagccctggctccgcctgtgccgctgctgactccccgggctctggcctggccgacgaggctgccgaagacagtggtgaggagggcgcccctgaacctgcaccagggggacagccgcgccgctgctgcttttccgaagaggtgacttcgaccgagctctccagtggagaccagagtcacaagatgggagataacgcctcggaaagagacaccggcgagtccaaggcagggatcgcagcttctgtgtccatacttgaaaacagtagcagagagacttctagaaggcaagagcagcacagattttctatggacttaaagatgccagcatttcaccccaagcaggaggtgcccgtccctggtgatggtgtggagttcccttccagtacgggagcggagggccagacgggtcaccctgcagaaaagctgtccgatttgcacaacaaggaacactctgggggagggaagcgggcgctggccccagacctcatgccgctagatttaagtgcgaggtcgacgcgggatgaccccagcaataaggagacggcctcctccctgcaggcggctttagtcgttcacccgtgtccttactgcagccacaagacctactaccccgaggtcctgtggatgcacaaacgcatctggcaccgcgtcagctgcaactccgtggctcccccgtggattcagcccaatggttacaaaagcatcagaagcaatttggttttcctttcccggagcggacgcacgggccccccgcctgccctcggtggcaaagaatgccagcctttgctccttgctcggttcacccgcactcaggtgccaggggggatgccggggtccaaaagtggctcttctcccctgggagtggtcacaaaagccgctagcatgcctaagaataaggagagccattccggaggtccctgcgctctgtgggcgcccggccctgacgggtatcgacagaccaaaccttgtcacggccaggagccacatggcgcggccacacaggggcccctggccaagcccaggcaggaggctagctccaaaccggtgcctgccccgggtggcgggggcttcagcaggagcgccacccctacgcccaccgtcatcgcccgggctggcgcgcagccctcggccaatagcaagcctgtggagaagtttggggtccccccagcgggggctggctttgcccccacaaataagcacagtgccccggactccctgaaagccaaattcagtgctcagcctcagggtccacctcctgcaaagggcgaagggggcgctcctcctctacctccccgcgagcccccctcgaaggcagcccaggagctgaggactctggccacctgtgctgcggggtccaggggcgacgcggccttgcaggcccagcccggcgtggctggggcgccccccgtcctacactccatcaaacaggagccagtggccgaggggcatgagaagcgcctggacatcctcaacatctttaagacgtacattccaaaggactttgcgaccctctaccagggatggggtgtcagcggccctgggttggagcacagagggacactccggacgcaggcccggccaggagagttcgtctgcatcgagtgcggaaagagcttccaccagcccggccacctcagggcccacatgcgggcacactcagtggtgtttgagtccgatgggcctcggggttctgaagttcataccacctccgcagacgcccccaaacaagggagagaccattctaacacaggtaccgtccagacagtgcctctgagaaagggaacctaaaggcgtgtttccgacgcaccccaggtccccgtaacggccattagcagtaccctcacgatgtcccagcagcctcccacctgtgacctggccgctccatggaagaacagccggggaactcctgagcagacacctcacatcccgagccgctgcgctggagtggaaactgaaggcagatgcctctccttgttaaacgttcagaaataaatgaagatgctatattctagaaatacatgtagatactatatacgcatttacgtgctcatcgtccatagtcccatattttcttataataaacagtagtactggcaggcacagtaggggcacaaggcatctgtcttattcaagacaagtttgagacactggaaaaaaagatacttgttgtgtgtgttggacagagtggcgaggctgagcactgtcacaggggcctcccatgttaagagggactgtggggatgatgtcagaacaagacgtggtggatttgaggttgatcgagtattaatactactgcctctccttgtcttagtgggtatttaaaatagtaaataagagagaggaaggaggtgacgttcaggtgctgtgggaagcaggcttggcggaggggtatgatgatgagaccctcattgttcactggctccatcgcactcctccctggggccgtgtgcctgttccattcttcccaccattcgaactgagcgaatctggcaaaggagacacgtctgtgggaatgcgtagattccgcctcggaagagagctagcgcaacactaagaaaagcaggcttcttgtttattctcaggacctttttgtaacagggctacattctgcaaactgcttacaaaggaagactatacgtcttaacaaattatttagccactgagtcctcccgattcggacctgttttagtaatggcagaagaatccctgagcaggttcaggtgccctagatgactagggtgctgagctctggcgccttctgtccccactctttgcctccccgccccttccctgagccaccccagcaagtgggtgtcttttctccctgggcctggtgacctccacaggatgagtgactttgttcataaagggtggggatcaccagccccttgggtgggggacggcttcatatacctcttcctcagtaatgcaaatgcgagtttttgtggtgggggttaaggcccataacaaaggatcttaaaccatgcagtgtacgcaattgaaatggtattccacagatataaatattttcttttcccattgccgtgacactatgtgtgatggtaatatttctgagagtttcagatttttgcacatatgattttatgcattatcaaaagttactgctgccttgaatgaaaatgttctgtgaaattttttgcaaaagctttactaggtttttttttaattgtgaaattttgtaaaggcaggaaatggattaaaacgagcatgctaaatatatttttcaaaaaagcaataattttacatgtacagaaattatcctaacctttaatactggcgagagcaacagtttacttaatacggtaatggactagtgcagtttttgtagacagtgggcttctgatacaaagtcttgtttaaacacagacacacacacacacaaacacacacacacaccctaaagtgtgggtttcctgttctaatgatttgttgaatattattatattattattattattattattattattgttattgttattagtaatgtttggttctggattctacttgttactgagtttaaattacttgacggttcaggttactttgcaacactttcaaacgatgcaatgtaactggctagcttatatatatatatatatatatatatatatatttttttttttttttttacttatttttttctgatattcttacaccagatatgtacgaaaatgatctgtcctgttggtgtaattaggaatgtccatgcagatacagttaaacaactgtaattgactgttctgtaaagttattttgggcaaagttgcggagacacattcctctgtccacctaagaaatcagaagactcttctgttgatttatgtttaatcatttcagtagtttccccacagtgatcatttctgcattttctggcttttgttttcttggctgaaagtgaatggtgactgttaggaatgtcagggactagtgacccagtcctgtttctctgtgttttagttattaaaaagaaattctgtacccaaagtgacacgaaagtgtagtctacatttttactgtttcagaagcggcatggaaaagtgcagttggcctttggagctggaagtgtcttgctggtgaggctccatcctggaggctctggtggggagtgggctggcgctggggccctgccggccgcgtgctggatccttcctggcttgcaggagagcaggcgtggaggacagtcagcttgcggggccgcgcagggtgcacagagtgcaggaggaaggttttcacccagttaaacagactggggagcccccccaagaacgccatcccttgaggccagctgtgggcaggcctggatgtgtggtcccttccttccacccatcgtcagtattgtgttggtttgttaatttgttgatttggtcatagtatttaatatgatttgtgtttccttatttatttagccaccgttttgattgcctttttttttccgaatggtaatttctgcatgatacacttctgtacgttgtcttctgactgttacagactttctactacctctcccgatctgctgtttccttgtttcttaacaggattttttacagtgttgcgtctaatgtaacttagacaataaagggtttggttgtctacactgcagcttctcggtgtctctcccctgctttccgctcgctgcttcccgctctgcccctgctggggcctggctgcaccctggcctgccttcctatactctcctgtttcccgctcatatctcttcctcatttttgcgttcaaataacacacagctaatgagcttctaaaaatcttttcaggttgttcacttgtattccttaatttgaagaatgaatatttaaattctctcaaaagtcagatattgaggatcttctctgggaaattggccactgtacctgcccacctttctgcctggttccctggaaggtcttattgtcatcttagacggacagatttcattctcagcaccatacagatttggcttcaaagccaggtgaattttgcctttgaggctctgaaaagtattaagtgttttaagaggtcccccaatatttacttatttattttttaaaccaagaaagacactggttccctgaaagaaaggagcgcccagtatgacaggcccccacccctgatccggccactgtgcacaggtcgctgagggtgtgagaacacctctgcaggggctccggcacatgtgggtttcatcgtctcacactccttcaggctgcaggggttgagtgcagaaagggcaagcttcatctccatggtgcctctccaggctggcaactctggtcggcctctgttctttggacagagagggtgtaggttacagggtcagtagggatgctttctggatcaaagaaagtgggtgtagtgcttagtctgttgtgtggaagagggcacctcctgggctttcgtggctggagactgtctaccaacattccttccttcaaactagacaaaccctcctctgccacccccagcaaattctcagaggtttccaagctgtagaaaaaggaaggaaggaaggacggcattcacatagctttactttccgcttcaaaatgtcttaagtagcatatgttgttttactgcttttaactttggtgagttctaatttcagaacgttttgttcactgagcaaaaaaacagatgaaacaaccacaggccaggacttcaagtgaggaggacgcctttgtttgccgtggttggtgggagcacacgccggagcccggtaacgtgcctgtgggagtgaccaagggccacccgcccaagggaaaatgttcattcttcatcagctttgctaattctgctttgaggcagtaaaatgcaaaagaccatagaatttgtatttctttttttaaaatacaatttataacattatattttgtactctttatattagaatttgtaactagattgatgtatttaactatttctgaaaaagtaattcaatgttttagttgtgtgataaaaatatttagataaaacatattcattctattggaatttgaaataaataaaaacatcttggagttctgagatttgtaagacattt

SEQ ID NO: 297816 - DNA, 7447 bp, Homo sapiens
cggggcgtgcgcgtcctcctccccaggcccgccgcctccctgccaagaatctgagagaggccgagtggagttcggtccttctctgaacagttttagctgagagtaccagcatccaactgggagcgttgtcattgcatttccacattcccaggaaagcccaggtgctggctgccagctgctgcgccccccatgtagaaggtgcacctcctgggagcaggcacgtcttttggctcttctgaccatggagagataggacggtccctgcagcccgcgcgacagaaagctgtgccgccaccaccggccgcgtccgtccttcggatggatcgcaacagagaggccgagatggagctgaggcgaggccccagccccaccagggccggccggggccacgaggtggatggggacaaggctacctgccacacctgctgcatctgcggcaagagcttccccttccagagctcgctttcgcagcacatgcgcaagcacacgggcgagaagccctacaagtgtccctactgcgaccaccgggcttcccagaagggcaacctgaagattcacatccggagccaccgcacggggactctgattcagggacacgagccggaggcgggcgaggcgccgctgggtgagatgcgcgcctccgagggcctggacgcctgcgccagccccaccaagagcgcctctgcctgcaaccggctgctgaacggggcctcgcaggccgacggcgccagggtcctgaacggggcctcgcaggccgacagcggcagagtcctgctgcggagcagcaagaagggggcagaggggtccgcatgcgccccgggggaggccaaggcagcggtccagtgctccttctgcaagagccagttcgagcgtaagaaggacctggagctgcacgtgcaccaggcgcacaagccgttcaagtgcaggctgtgcagctacgcgacgctgcgggaggagtcgctgctgagccacatcgagagggaccacatcaccgcgcaggggcccggcagcggcgaggcctgcgtggagaacggcaagcccgagctgagccccggggagttcccgtgcgaggtgtgtggccaggccttcagccagacctggttcctgaaggcgcacatgaagaagcaccggggctccttcgaccacggctgccacatctgcggccgtaggttcaaggagccctggttcctcaagaaccacatgaaggcgcacggccccaagacgggcagcaagaacaggcccaagagtgagctggaccccatcgccaccatcaacaacgtggtccaggaggaggtgatcgtcgccggcctgagcctctacgaggtctgcgccaagtgcgggaacctgtttacaaacctggacagcttgaacgcccacaatgccatccaccgcagagtcgaggccagccgcacgcgcgccccggccgaggagggggcggaggggccctcggacaccaagcagttctttctccagtgcctgaacctgaggccgtcggcggccggcgactcgtgccctggcacgcaggccggacggcgggtggctgagctggacccggtcaacagctaccaggcctggcagctggccacgcggggtaaggtggccgagccggccgagtacctcaagtacggggcctgggacgaggcgctggccggggacgtggccttcgacaaggacaggcgcgagtacgtcctggtgagccaggagaagcgcaagcgtgagcaggatgcaccagccgcgcaggggcccccgcggaagcgcgcgagcgggcctggggaccccgcgcccgccggccacctcgatccccgctcggccgcgcgccccaaccgcagggccgcagccaccaccggccagggcaagtcctccgagtgcttcgagtgcggcaagatcttccgcacctatcatcagatggtgctgcactcacgcgtgcatcgccgcgcgcgccgcgagagggacagtgacggggacagggcggcgcgggcccgctgcggatcactcagtgagggtgactcggcctcccagcccagcagccctggctccgcctgtgccgctgctgactccccgggctctggcctggccgacgaggctgccgaagacagtggtgaggagggcgcccctgaacctgcaccagggggacagccgcgccgctgctgcttttccgaagaggtgacttcgaccgagctctccagtggagaccagagtcacaagatgggagataacgcctcggaaagagacaccggcgagtccaaggcagggatcgcagcttctgtgtccatacttgaaaacagtagcagagagacttctagaaggcaagagcagcacagattttctatggacttaaagatgccagcatttcaccccaagcaggaggtgcccgtccctggtgatggtgtggagttcccttccagtacgggagcggagggccagacgggtcaccctgcagaaaagctgtccgatttgcacaacaaggaacactctgggggagggaagcgggcgctggccccagacctcatgccgctagatttaagtgcgaggtcgacgcgggatgaccccagcaataaggagacggcctcctccctgcaggcggctttagtcgttcacccgtgtccttactgcagccacaagacctactaccccgaggtcctgtggatgcacaaacgcatctggcaccgcgtcagctgcaactccgtggctcccccgtggattcagcccaatggttacaaaagcatcagaagcaatttggttttcctttcccggagcggacgcacgggccccccgcctgccctcggtggcaaagaatgccagcctttgctccttgctcggttcacccgcactcaggtgccaggggggatgccggggtccaaaagtggctcttctcccctgggagtggtcacaaaagccgctagcatgcctaagaataaggagagccattccggaggtccctgcgctctgtgggcgcccggccctgacgggtatcgacagaccaaaccttgtcacggccaggagccacatggcgcggccacacaggggcccctggccaagcccaggcaggaggctagctccaaaccggtgcctgccccgggtggcgggggcttcagcaggagcgccacccctacgcccaccgtcatcgcccgggctggcgcgcagccctcggccaatagcaagcctgtggagaagtttggggtccccccagcgggggctggctttgcccccacaaataagcacagtgccccggactccctgaaagccaaattcagtgctcagcctcagggtccacctcctgcaaagggcgaagggggcgctcctcctctacctccccgcgagcccccctcgaaggcagcccaggagctgaggactctggccacctgtgctgcggggtccaggggcgacgcggccttgcaggcccagcccggcgtggctggggcgccccccgtcctacactccatcaaacaggagccagtggccgaggggcatgagaagcgcctggacatcctcaacatctttaagacgtacattccaaaggactttgcgaccctctaccagggatggggtgtcagcggccctgggttggagcacagagggacactccggacgcaggcccggccaggagagttcgtctgcatcgagtgcggaaagagcttccaccagcccggccacctcagggcccacatgcgggcacactcagtggtgtttgagtccgatgggcctcggggttctgaagttcataccacctccgcagacgcccccaaacaagggagagaccattctaacacaggtaccgtccagacagtgcctctgagaaagggaacctaaaggcgtgtttccgacgcaccccaggtccccgtaacggccattagcagtaccctcacgatgtcccagcagcctcccacctgtgacctggccgctccatggaagaacagccggggaactcctgagcagacacctcacatcccgagccgctgcgctggagtggaaactgaaggcagatgcctctccttgttaaacgttcagaaataaatgaagatgctatattctagaaatacatgtagatactatatacgcatttacgtgctcatcgtccatagtcccatattttcttataataaacagtagtactggcaggcacagtaggggcacaaggcatctgtcttattcaagacaagtttgagacactggaaaaaaagatacttgttgtgtgtgttggacagagtggcgaggctgagcactgtcacaggggcctcccatgttaagagggactgtggggatgatgtcagaacaagacgtggtggatttgaggttgatcgagtattaatactactgcctctccttgtcttagtgggtatttaaaatagtaaataagagagaggaaggaggtgacgttcaggtgctgtgggaagcaggcttggcggaggggtatgatgatgagaccctcattgttcactggctccatcgcactcctccctggggccgtgtgcctgttccattcttcccaccattcgaactgagcgaatctggcaaaggagacacgtctgtgggaatgcgtagattccgcctcggaagagagctagcgcaacactaagaaaagcaggcttcttgtttattctcaggacctttttgtaacagggctacattctgcaaactgcttacaaaggaagactatacgtcttaacaaattatttagccactgagtcctcccgattcggacctgttttagtaatggcagaagaatccctgagcaggttcaggtgccctagatgactagggtgctgagctctggcgccttctgtccccactctttgcctccccgccccttccctgagccaccccagcaagtgggtgtcttttctccctgggcctggtgacctccacaggatgagtgactttgttcataaagggtggggatcaccagccccttgggtgggggacggcttcatatacctcttcctcagtaatgcaaatgcgagtttttgtggtgggggttaaggcccataacaaaggatcttaaaccatgcagtgtacgcaattgaaatggtattccacagatataaatattttcttttcccattgccgtgacactatgtgtgatggtaatatttctgagagtttcagatttttgcacatatgattttatgcattatcaaaagttactgctgccttgaatgaaaatgttctgtgaaattttttgcaaaagctttactaggtttttttttaattgtgaaattttgtaaaggcaggaaatggattaaaacgagcatgctaaatatatttttcaaaaaagcaataattttacatgtacagaaattatcctaacctttaatactggcgagagcaacagtttacttaatacggtaatggactagtgcagtttttgtagacagtgggcttctgatacaaagtcttgtttaaacacagacacacacacacacaaacacacacacacaccctaaagtgtgggtttcctgttctaatgatttgttgaatattattatattattattattattattattattattgttattgttattagtaatgtttggttctggattctacttgttactgagtttaaattacttgacggttcaggttactttgcaacactttcaaacgatgcaatgtaactggctagcttatatatatatatatatatatatatatatatttttttttttttttttacttatttttttctgatattcttacaccagatatgtacgaaaatgatctgtcctgttggtgtaattaggaatgtccatgcagatacagttaaacaactgtaattgactgttctgtaaagttattttgggcaaagttgcggagacacattcctctgtccacctaagaaatcagaagactcttctgttgatttatgtttaatcatttcagtagtttccccacagtgatcatttctgcattttctggcttttgttttcttggctgaaagtgaatggtgactgttaggaatgtcagggactagtgacccagtcctgtttctctgtgttttagttattaaaaagaaattctgtacccaaagtgacacgaaagtgtagtctacatttttactgtttcagaagcggcatggaaaagtgcagttggcctttggagctggaagtgtcttgctggtgaggctccatcctggaggctctggtggggagtgggctggcgctggggccctgccggccgcgtgctggatccttcctggcttgcaggagagcaggcgtggaggacagtcagcttgcggggccgcgcagggtgcacagagtgcaggaggaaggttttcacccagttaaacagactggggagcccccccaagaacgccatcccttgaggccagctgtgggcaggcctggatgtgtggtcccttccttccacccatcgtcagtattgtgttggtttgttaatttgttgatttggtcatagtatttaatatgatttgtgtttccttatttatttagccaccgttttgattgcctttttttttccgaatggtaatttctgcatgatacacttctgtacgttgtcttctgactgttacagactttctactacctctcccgatctgctgtttccttgtttcttaacaggattttttacagtgttgcgtctaatgtaacttagacaataaagggtttggttgtctacactgcagcttctcggtgtctctcccctgctttccgctcgctgcttcccgctctgcccctgctggggcctggctgcaccctggcctgccttcctatactctcctgtttcccgctcatatctcttcctcatttttgcgttcaaataacacacagctaatgagcttctaaaaatcttttcaggttgttcacttgtattccttaatttgaagaatgaatatttaaattctctcaaaagtcagatattgaggatcttctctgggaaattggccactgtacctgcccacctttctgcctggttccctggaaggtcttattgtcatcttagacggacagatttcattctcagcaccatacagatttggcttcaaagccagaacgttttgttcactgagcaaaaaaacagatgaaacaaccacaggccaggacttcaagtgaggaggacgcctttgtttgccgtggttggtgggagcacacgccggagcccggtaacgtgcctgtgggagtgaccaagggccacccgcccaagggaaaatgttcattcttcatcagctttgctaattctgctttgaggcagtaaaatgcaaaagaccatagaatttgtatttctttttttaaaatacaatttataacattatattttgtactctttatattagaatttgtaactagattgatgtatttaactatttctgaaaaagtaattcaatgttttagttgtgtgataaaaatatttagataaaacatattcattctattggaatttgaaataaataaaaacatcttggagttctgagatttgtaagacattt

SEQ ID NO: 297817 - DNA, 7583 bp, Homo sapiens
cggggcgtgcgcgtcctcctccccaggcccgccgcctccctgccaagaatctgagagaggccgagtggagttcggtccttctctgaacagttttagctgagagtaccagcatccaactgggagcgttgtcattgcatttccacattcccaggaaagcccaggtgctggctgccagctgctgcgccccccatgtagaaggtgcacctcctgggagcaggcacgtcttttggctcttctgaccatggagagataggacggtccctgcagcccgcgcgacagaaagctgtgccgccaccaccggccgcgtccgtccttcggatggatcgcaacagagaggccgagatggagctgaggcgaggccccagccccaccagggccggccggggccacgaggtggatggggacaaggctacctgccacacctgctgcatctgcggcaagagcttccccttccagagctcgctttcgcagcacatgcgcaagcacacgggcgagaagccctacaagtgtccctactgcgaccaccgggcttcccagaagggcaacctgaagattcacatccggagccaccgcacggggactctgattcagggacacgagccggaggcgggcgaggcgccgctgggtgagatgcgcgcctccgagggcctggacgcctgcgccagccccaccaagagcgcctctgcctgcaaccggctgctgaacggggcctcgcaggccgacggcgccagggtcctgaacggggcctcgcaggccgacagcggcagagtcctgctgcggagcagcaagaagggggcagaggggtccgcatgcgccccgggggaggccaaggcagcggtccagtgctccttctgcaagagccagttcgagcgtaagaaggacctggagctgcacgtgcaccaggcgcacaagccgttcaagtgcaggctgtgcagctacgcgacgctgcgggaggagtcgctgctgagccacatcgagagggaccacatcaccgcgcaggggcccggcagcggcgaggcctgcgtggagaacggcaagcccgagctgagccccggggagttcccgtgcgaggtgtgtggccaggccttcagccagacctggttcctgaaggcgcacatgaagaagcaccggggctccttcgaccacggctgccacatctgcggccgtaggttcaaggagccctggttcctcaagaaccacatgaaggcgcacggccccaagacgggcagcaagaacaggcccaagagtgagctggaccccatcgccaccatcaacaacgtggtccaggaggaggtgatcgtcgccggcctgagcctctacgaggtctgcgccaagtgcgggaacctgtttacaaacctggacagcttgaacgcccacaatgccatccaccgcagagtcgaggccagccgcacgcgcgccccggccgaggagggggcggaggggccctcggacaccaagcagttctttctccagtgcctgaacctgaggccgtcggcggccggcgactcgtgccctggcacgcaggccggacggcgggtggctgagctggacccggtcaacagctaccaggcctggcagctggccacgcggggtaaggtggccgagccggccgagtacctcaagtacggggcctgggacgaggcgctggccggggacgtggccttcgacaaggacaggcgcgagtacgtcctggtgagccaggagaagcgcaagcgtgagcaggatgcaccagccgcgcaggggcccccgcggaagcgcgcgagcgggcctggggaccccgcgcccgccggccacctcgatccccgctcggccgcgcgccccaaccgcagggccgcagccaccaccggccagggcaagtcctccgagtgcttcgagtgcggcaagatcttccgcacctatcatcagatggtgctgcactcacgcgtgcatcgccgcgcgcgccgcgagagggacagtgacggggacagggcggcgcgggcccgctgcggatcactcagtgagggtgactcggcctcccagcccagcagccctggctccgcctgtgccgctgctgactccccgggctctggcctggccgacgaggctgccgaagacagtggtgaggagggcgcccctgaacctgcaccagggggacagccgcgccgctgctgcttttccgaagaggtgacttcgaccgagctctccagtggagaccagagtcacaagatgggagataacgcctcggaaagagacaccggcgagtccaaggcagggatcgcagcttctgtgtccatacttgaaaacagtagcagagagacttctagaaggcaagagcagcacagattttctatggacttaaagatgccagcatttcaccccaagcaggaggtgcccgtccctggtgatggtgtggagttcccttccagtacgggagcggagggccagacgggtcaccctgcagaaaagctgtccgatttgcacaacaaggaacactctgggggagggaagcgggcgctggccccagacctcatgccgctagatttaagtgcgaggtcgacgcgggatgaccccagcaataaggagacggcctcctccctgcaggcggctttagtcgttcacccgtgtccttactgcagccacaagacctactaccccgaggtcctgtggatgcacaaacgcatctggcaccgcgtcagctgcaactccgtggctcccccgtggattcagcccaatggttacaaaagcatcagaagcaatttggttttcctttcccggagcggacgcacgggccccccgcctgccctcggtggcaaagaatgccagcctttgctccttgctcggttcacccgcactcaggtgccaggggggatgccggggtccaaaagtggctcttctcccctgggagtggtcacaaaagccgctagcatgcctaagaataaggagagccattccggaggtccctgcgctctgtgggcgcccggccctgacgggtatcgacagaccaaaccttgtcacggccaggagccacatggcgcggccacacaggggcccctggccaagcccaggcaggaggctagctccaaaccggtgcctgccccgggtggcgggggcttcagcaggagcgccacccctacgcccaccgtcatcgcccgggctggcgcgcagccctcggccaatagcaagcctgtggagaagtttggggtccccccagcgggggctggctttgcccccacaaataagcacagtgccccggactccctgaaagccaaattcagtgctcagcctcagggtccacctcctgcaaagggcgaagggggcgctcctcctctacctccccgcgagcccccctcgaaggcagcccaggagctgaggactctggccacctgtgctgcggggtccaggggcgacgcggccttgcaggcccagcccggcgtggctggggcgccccccgtcctacactccatcaaacaggagccagtggccgaggggcatgagaagcgcctggacatcctcaacatctttaagacgtacattccaaaggactttgcgaccctctaccagggatggggtgtcagcggccctgggttggagcacagagggacactccggacgcaggcccggccaggagagttcgtctgcatcgagtgcggaaagagcttccaccagcccggccacctcagggcccacatgcgggcacactcagtggtgtttgagtccgatgggcctcggggttctgaagttcataccacctccgcagacgcccccaaacaagggagagaccattctaacacaggtaccgtccagacagtgcctctgagaaagggaacctaaaggcgtgtttccgacgcaccccaggtccccgtaacggccattagcagtaccctcacgatgtcccagcagcctcccacctgtgacctggccgctccatggaagaacagccggggaactcctgagcagacacctcacatcccgagccgctgcgctggagtggaaactgaaggcagatgcctctccttgttaaacgttcagaaataaatgaagatgctatattctagaaatacatgtagatactatatacgcatttacgtgctcatcgtccatagtcccatattttcttataataaacagtagtactggcaggcacagtaggggcacaaggcatctgtcttattcaagacaagtttgagacactggaaaaaaagatacttgttgtgtgtgttggacagagtggcgaggctgagcactgtcacaggggcctcccatgttaagagggactgtggggatgatgtcagaacaagacgtggtggatttgaggttgatcgagtattaatactactgcctctccttgtcttagtgggtatttaaaatagtaaataagagagaggaaggaggtgacgttcaggtgctgtgggaagcaggcttggcggaggggtatgatgatgagaccctcattgttcactggctccatcgcactcctccctggggccgtgtgcctgttccattcttcccaccattcgaactgagcgaatctggcaaaggagacacgtctgtgggaatgcgtagattccgcctcggaagagagctagcgcaacactaagaaaagcaggcttcttgtttattctcaggacctttttgtaacagggctacattctgcaaactgcttacaaaggaagactatacgtcttaacaaattatttagccactgagtcctcccgattcggacctgttttagtaatggcagaagaatccctgagcaggttcaggtgccctagatgactagggtgctgagctctggcgccttctgtccccactctttgcctccccgccccttccctgagccaccccagcaagtgggtgtcttttctccctgggcctggtgacctccacaggatgagtgactttgttcataaagggtggggatcaccagccccttgggtgggggacggcttcatatacctcttcctcagtaatgcaaatgcgagtttttgtggtgggggttaaggcccataacaaaggatcttaaaccatgcagtgtacgcaattgaaatggtattccacagatataaatattttcttttcccattgccgtgacactatgtgtgatggtaatatttctgagagtttcagatttttgcacatatgattttatgcattatcaaaagttactgctgccttgaatgaaaatgttctgtgaaattttttgcaaaagctttactaggtttttttttaattgtgaaattttgtaaaggcaggaaatggattaaaacgagcatgctaaatatatttttcaaaaaagcaataattttacatgtacagaaattatcctaacctttaatactggcgagagcaacagtttacttaatacggtaatggactagtgcagtttttgtagacagtgggcttctgatacaaagtcttgtttaaacacagacacacacacacacaaacacacacacacaccctaaagtgtgggtttcctgttctaatgatttgttgaatattattatattattattattattattattattattgttattgttattagtaatgtttggttctggattctacttgttactgagtttaaattacttgacggttcaggttactttgcaacactttcaaacgatgcaatgtaactggctagcttatatatatatatatatatatatatatatatttttttttttttttttacttatttttttctgatattcttacaccagatatgtacgaaaatgatctgtcctgttggtgtaattaggaatgtccatgcagatacagttaaacaactgtaattgactgttctgtaaagttattttgggcaaagttgcggagacacattcctctgtccacctaagaaatcagaagactcttctgttgatttatgtttaatcatttcagtagtttccccacagtgatcatttctgcattttctggcttttgttttcttggctgaaagtgaatggtgactgttaggaatgtcagggactagtgacccagtcctgtttctctgtgttttagttattaaaaagaaattctgtacccaaagtgacacgaaagtgtagtctacatttttactgtttcagaagcggcatggaaaagtgcagttggcctttggagctggaagtgtcttgctggtgaggctccatcctggaggctctggtggggagtgggctggcgctggggccctgccggccgcgtgctggatccttcctggcttgcaggagagcaggcgtggaggacagtcagcttgcggggccgcgcagggtgcacagagtgcaggaggaaggttttcacccagttaaacagactggggagcccccccaagaacgccatcccttgaggccagctgtgggcaggcctggatgtgtggtcccttccttccacccatcgtcagtattgtgttggtttgttaatttgttgatttggtcatagtatttaatatgatttgtgtttccttatttatttagccaccgttttgattgcctttttttttccgaatggtaatttctgcatgatacacttctgtacgttgtcttctgactgttacagactttctactacctctcccgatctgctgtttccttgtttcttaacaggattttttacagtgttgcgtctaatgtaacttagacaataaagggtttggttgtctacactgcagcttctcggtgtctctcccctgctttccgctcgctgcttcccgctctgcccctgctggggcctggctgcaccctggcctgccttcctatactctcctgtttcccgctcatatctcttcctcatttttgcgttcaaataacacacagctaatgagcttctaaaaatcttttcaggttgttcacttgtattccttaatttgaagaatgaatatttaaattctctcaaaagtcagatattgaggatcttctctgggaaattggccactgtacctgcccacctttctgcctggttccctggaaggtcttattgtcatcttagacggacagatttcattctcagcaccatacagatttggcttcaaagccaggtgaattttgcctttgaggctctgaaaagtattaagtgttttaagaggtcccccaatatttacttatttattttttaaaccaagaaagacactggttccctgaaaagcaggtgcttcaggaagtagcaattgggagttgcatacagttacttcgtcagagaaaggagcgcccagtatgacaggcccccacccctgatccggccactgtgcacaggtcgctgagggtgtgagaacacctctgcaggggctccggcacatgtgggagtgaccaagggccacccgcccaagggaaaatgttcattcttcatcagctttgctaattctgctttgaggcagtaaaatgcaaaagaccatagaatttgtatttctttttttaaaatacaatttataacattatattttgtactctttatattagaatttgtaactagattgatgtatttaactatttctgaaaaagtaattcaatgttttagttgtgtgataaaaatatttagataaaacatattcattctattggaatttgaaataaataaaaacatcttggagttctgagatttgtaagacattt

SEQ ID NO: 297818 - DNA, 7641 bp, Homo sapiens
cggggcgtgcgcgtcctcctccccaggcccgccgcctccctgccaagaatctgagagaggccgagtggagttcggtccttctctgaacagttttagctgagagtaccagcatccaactgggagcgttgtcattgcatttccacattcccaggaaagcccaggtgctggctgccagctgctgcgccccccatgtagaaggtgcacctcctgggagcaggcacgtcttttggctcttctgaccatggagagataggacggtccctgcagcccgcgcgacagaaagctgtgccgccaccaccggccgcgtccgtccttcggatggatcgcaacagagaggccgagatggagctgaggcgaggccccagccccaccagggccggccggggccacgaggtggatggggacaaggctacctgccacacctgctgcatctgcggcaagagcttccccttccagagctcgctttcgcagcacatgcgcaagcacacgggcgagaagccctacaagtgtccctactgcgaccaccgggcttcccagaagggcaacctgaagattcacatccggagccaccgcacggggactctgattcagggacacgagccggaggcgggcgaggcgccgctgggtgagatgcgcgcctccgagggcctggacgcctgcgccagccccaccaagagcgcctctgcctgcaaccggctgctgaacggggcctcgcaggccgacggcgccagggtcctgaacggggcctcgcaggccgacagcggcagagtcctgctgcggagcagcaagaagggggcagaggggtccgcatgcgccccgggggaggccaaggcagcggtccagtgctccttctgcaagagccagttcgagcgtaagaaggacctggagctgcacgtgcaccaggcgcacaagccgttcaagtgcaggctgtgcagctacgcgacgctgcgggaggagtcgctgctgagccacatcgagagggaccacatcaccgcgcaggggcccggcagcggcgaggcctgcgtggagaacggcaagcccgagctgagccccggggagttcccgtgcgaggtgtgtggccaggccttcagccagacctggttcctgaaggcgcacatgaagaagcaccggggctccttcgaccacggctgccacatctgcggccgtaggttcaaggagccctggttcctcaagaaccacatgaaggcgcacggccccaagacgggcagcaagaacaggcccaagagtgagctggaccccatcgccaccatcaacaacgtggtccaggaggaggtgatcgtcgccggcctgagcctctacgaggtctgcgccaagtgcgggaacctgtttacaaacctggacagcttgaacgcccacaatgccatccaccgcagagtcgaggccagccgcacgcgcgccccggccgaggagggggcggaggggccctcggacaccaagcagttctttctccagtgcctgaacctgaggccgtcggcggccggcgactcgtgccctggcacgcaggccggacggcgggtggctgagctggacccggtcaacagctaccaggcctggcagctggccacgcggggtaaggtggccgagccggccgagtacctcaagtacggggcctgggacgaggcgctggccggggacgtggccttcgacaaggacaggcgcgagtacgtcctggtgagccaggagaagcgcaagcgtgagcaggatgcaccagccgcgcaggggcccccgcggaagcgcgcgagcgggcctggggaccccgcgcccgccggccacctcgatccccgctcggccgcgcgccccaaccgcagggccgcagccaccaccggccagggcaagtcctccgagtgcttcgagtgcggcaagatcttccgcacctatcatcagatggtgctgcactcacgcgtgcatcgccgcgcgcgccgcgagagggacagtgacggggacagggcggcgcgggcccgctgcggatcactcagtgagggtgactcggcctcccagcccagcagccctggctccgcctgtgccgctgctgactccccgggctctggcctggccgacgaggctgccgaagacagtggtgaggagggcgcccctgaacctgcaccagggggacagccgcgccgctgctgcttttccgaagaggtgacttcgaccgagctctccagtggagaccagagtcacaagatgggagataacgcctcggaaagagacaccggcgagtccaaggcagggatcgcagcttctgtgtccatacttgaaaacagtagcagagagacttctagaaggcaagagcagcacagattttctatggacttaaagatgccagcatttcaccccaagcaggaggtgcccgtccctggtgatggtgtggagttcccttccagtacgggagcggagggccagacgggtcaccctgcagaaaagctgtccgatttgcacaacaaggaacactctgggggagggaagcgggcgctggccccagacctcatgccgctagatttaagtgcgaggtcgacgcgggatgaccccagcaataaggagacggcctcctccctgcaggcggctttagtcgttcacccgtgtccttactgcagccacaagacctactaccccgaggtcctgtggatgcacaaacgcatctggcaccgcgtcagctgcaactccgtggctcccccgtggattcagcccaatggttacaaaagcatcagaagcaatttggttttcctttcccggagcggacgcacgggccccccgcctgccctcggtggcaaagaatgccagcctttgctccttgctcggttcacccgcactcaggtgccaggggggatgccggggtccaaaagtggctcttctcccctgggagtggtcacaaaagccgctagcatgcctaagaataaggagagccattccggaggtccctgcgctctgtgggcgcccggccctgacgggtatcgacagaccaaaccttgtcacggccaggagccacatggcgcggccacacaggggcccctggccaagcccaggcaggaggctagctccaaaccggtgcctgccccgggtggcgggggcttcagcaggagcgccacccctacgcccaccgtcatcgcccgggctggcgcgcagccctcggccaatagcaagcctgtggagaagtttggggtccccccagcgggggctggctttgcccccacaaataagcacagtgccccggactccctgaaagccaaattcagtgctcagcctcagggtccacctcctgcaaagggcgaagggggcgctcctcctctacctccccgcgagcccccctcgaaggcagcccaggagctgaggactctggccacctgtgctgcggggtccaggggcgacgcggccttgcaggcccagcccggcgtggctggggcgccccccgtcctacactccatcaaacaggagccagtggccgaggggcatgagaagcgcctggacatcctcaacatctttaagacgtacattccaaaggactttgcgaccctctaccagggatggggtgtcagcggccctgggttggagcacagagggacactccggacgcaggcccggccaggagagttcgtctgcatcgagtgcggaaagagcttccaccagcccggccacctcagggcccacatgcgggcacactcagtggtgtttgagtccgatgggcctcggggttctgaagttcataccacctccgcagacgcccccaaacaagggagagaccattctaacacaggtaccgtccagacagtgcctctgagaaagggaacctaaaggcgtgtttccgacgcaccccaggtccccgtaacggccattagcagtaccctcacgatgtcccagcagcctcccacctgtgacctggccgctccatggaagaacagccggggaactcctgagcagacacctcacatcccgagccgctgcgctggagtggaaactgaaggcagatgcctctccttgttaaacgttcagaaataaatgaagatgctatattctagaaatacatgtagatactatatacgcatttacgtgctcatcgtccatagtcccatattttcttataataaacagtagtactggcaggcacagtaggggcacaaggcatctgtcttattcaagacaagtttgagacactggaaaaaaagatacttgttgtgtgtgttggacagagtggcgaggctgagcactgtcacaggggcctcccatgttaagagggactgtggggatgatgtcagaacaagacgtggtggatttgaggttgatcgagtattaatactactgcctctccttgtcttagtgggtatttaaaatagtaaataagagagaggaaggaggtgacgttcaggtgctgtgggaagcaggcttggcggaggggtatgatgatgagaccctcattgttcactggctccatcgcactcctccctggggccgtgtgcctgttccattcttcccaccattcgaactgagcgaatctggcaaaggagacacgtctgtgggaatgcgtagattccgcctcggaagagagctagcgcaacactaagaaaagcaggcttcttgtttattctcaggacctttttgtaacagggctacattctgcaaactgcttacaaaggaagactatacgtcttaacaaattatttagccactgagtcctcccgattcggacctgttttagtaatggcagaagaatccctgagcaggttcaggtgccctagatgactagggtgctgagctctggcgccttctgtccccactctttgcctccccgccccttccctgagccaccccagcaagtgggtgtcttttctccctgggcctggtgacctccacaggatgagtgactttgttcataaagggtggggatcaccagccccttgggtgggggacggcttcatatacctcttcctcagtaatgcaaatgcgagtttttgtggtgggggttaaggcccataacaaaggatcttaaaccatgcagtgtacgcaattgaaatggtattccacagatataaatattttcttttcccattgccgtgacactatgtgtgatggtaatatttctgagagtttcagatttttgcacatatgattttatgcattatcaaaagttactgctgccttgaatgaaaatgttctgtgaaattttttgcaaaagctttactaggtttttttttaattgtgaaattttgtaaaggcaggaaatggattaaaacgagcatgctaaatatatttttcaaaaaagcaataattttacatgtacagaaattatcctaacctttaatactggcgagagcaacagtttacttaatacggtaatggactagtgcagtttttgtagacagtgggcttctgatacaaagtcttgtttaaacacagacacacacacacacaaacacacacacacaccctaaagtgtgggtttcctgttctaatgatttgttgaatattattatattattattattattattattattattgttattgttattagtaatgtttggttctggattctacttgttactgagtttaaattacttgacggttcaggttactttgcaacactttcaaacgatgcaatgtaactggctagcttatatatatatatatatatatatatatatatttttttttttttttttacttatttttttctgatattcttacaccagatatgtacgaaaatgatctgtcctgttggtgtaattaggaatgtccatgcagatacagttaaacaactgtaattgactgttctgtaaagttattttgggcaaagttgcggagacacattcctctgtccacctaagaaatcagaagactcttctgttgatttatgtttaatcatttcagtagtttccccacagtgatcatttctgcattttctggcttttgttttcttggctgaaagtgaatggtgactgttaggaatgtcagggactagtgacccagtcctgtttctctgtgttttagttattaaaaagaaattctgtacccaaagtgacacgaaagtgtagtctacatttttactgtttcagaagcggcatggaaaagtgcagttggcctttggagctggaagtgtcttgctggtgaggctccatcctggaggctctggtggggagtgggctggcgctggggccctgccggccgcgtgctggatccttcctggcttgcaggagagcaggcgtggaggacagtcagcttgcggggccgcgcagggtgcacagagtgcaggaggaaggttttcacccagttaaacagactggggagcccccccaagaacgccatcccttgaggccagctgtgggcaggcctggatgtgtggtcccttccttccacccatcgtcagtattgtgttggtttgttaatttgttgatttggtcatagtatttaatatgatttgtgtttccttatttatttagccaccgttttgattgcctttttttttccgaatggtaatttctgcatgatacacttctgtacgttgtcttctgactgttacagactttctactacctctcccgatctgctgtttccttgtttcttaacaggattttttacagtgttgcgtctaatgtaacttagacaataaagggtttggttgtctacactgcagcttctcggtgtctctcccctgctttccgctcgctgcttcccgctctgcccctgctggggcctggctgcaccctggcctgccttcctatactctcctgtttcccgctcatatctcttcctcatttttgcgttcaaataacacacagctaatgagcttctaaaaatcttttcaggttgttcacttgtattccttaatttgaagaatgaatatttaaattctctcaaaagtcagatattgaggatcttctctgggaaattggccactgtacctgcccacctttctgcctggttccctggaaggtcttattgtcatcttagacggacagatttcattctcagcaccatacagatttggcttcaaagccaggtgaattttgcctttgaggctctgaaaagtattaagtgttttaagaggtcccccaatatttacttatttattttttaaaccaagaaagacactggttccctgaaagaaaggagcgcccagtatgacaggcccccacccctgatccggccactgtgcacaggtcgctgagggtgtgagaacacctctgcaggggctccggcacatgtgggtttcatcgtctcacactccttcaggctgcaggggttgagtgcagaaagggcaagcttcatctccatggtgcctctccaggctggcaactctggtcggcctctgttctttggacagagagggtgtaggttacagggtcagtagggatgctttctgccacccccaaagtcctcccacgtgctccatctcgctcgccctcctcccctcctccctcctcccccacacccagcacccccctccccatcctcacctgcgtccctccacccccacccgcccccctccctcccactcccaccgcgcccctcctcctcctcgcccgccccccacccccgccgcctcccccgctctcccccccctccctccctccctcctcctcccctatgccgtaccctccaccttcaccccccccctgcccctccccc

SEQ ID NO: 297819 - DNA, 7961 bp, Homo sapiens
cggggcgtgcgcgtcctcctccccaggcccgccgcctccctgccaagaatctgagagaggccgagtggagttcggtccttctctgaacagttttagctgagagtaccagcatccaactgggagcgttgtcattgcatttccacattcccaggaaagcccaggtgctggctgccagctgctgcgccccccatgtagaaggtgcacctcctgggagcaggcacgtcttttggctcttctgaccatggagagataggacggtccctgcagcccgcgcgacagaaagctgtgccgccaccaccggccgcgtccgtccttcggatggatcgcaacagagaggccgagatggagctgaggcgaggccccagccccaccagggccggccggggccacgaggtggatggggacaaggctacctgccacacctgctgcatctgcggcaagagcttccccttccagagctcgctttcgcagcacatgcgcaagcacacgggcgagaagccctacaagtgtccctactgcgaccaccgggcttcccagaagggcaacctgaagattcacatccggagccaccgcacggggactctgattcagggacacgagccggaggcgggcgaggcgccgctgggtgagatgcgcgcctccgagggcctggacgcctgcgccagccccaccaagagcgcctctgcctgcaaccggctgctgaacggggcctcgcaggccgacggcgccagggtcctgaacggggcctcgcaggccgacagcggcagagtcctgctgcggagcagcaagaagggggcagaggggtccgcatgcgccccgggggaggccaaggcagcggtccagtgctccttctgcaagagccagttcgagcgtaagaaggacctggagctgcacgtgcaccaggcgcacaagccgttcaagtgcaggctgtgcagctacgcgacgctgcgggaggagtcgctgctgagccacatcgagagggaccacatcaccgcgcaggggcccggcagcggcgaggcctgcgtggagaacggcaagcccgagctgagccccggggagttcccgtgcgaggtgtgtggccaggccttcagccagacctggttcctgaaggcgcacatgaagaagcaccggggctccttcgaccacggctgccacatctgcggccgtaggttcaaggagccctggttcctcaagaaccacatgaaggcgcacggccccaagacgggcagcaagaacaggcccaagagtgagctggaccccatcgccaccatcaacaacgtggtccaggaggaggtgatcgtcgccggcctgagcctctacgaggtctgcgccaagtgcgggaacctgtttacaaacctggacagcttgaacgcccacaatgccatccaccgcagagtcgaggccagccgcacgcgcgccccggccgaggagggggcggaggggccctcggacaccaagcagttctttctccagtgcctgaacctgaggccgtcggcggccggcgactcgtgccctggcacgcaggccggacggcgggtggctgagctggacccggtcaacagctaccaggcctggcagctggccacgcggggtaaggtggccgagccggccgagtacctcaagtacggggcctgggacgaggcgctggccggggacgtggccttcgacaaggacaggcgcgagtacgtcctggtgagccaggagaagcgcaagcgtgagcaggatgcaccagccgcgcaggggcccccgcggaagcgcgcgagcgggcctggggaccccgcgcccgccggccacctcgatccccgctcggccgcgcgccccaaccgcagggccgcagccaccaccggccagggcaagtcctccgagtgcttcgagtgcggcaagatcttccgcacctatcatcagatggtgctgcactcacgcgtgcatcgccgcgcgcgccgcgagagggacagtgacggggacagggcggcgcgggcccgctgcggatcactcagtgagggtgactcggcctcccagcccagcagccctggctccgcctgtgccgctgctgactccccgggctctggcctggccgacgaggctgccgaagacagtggtgaggagggcgcccctgaacctgcaccagggggacagccgcgccgctgctgcttttccgaagaggtgacttcgaccgagctctccagtggagaccagagtcacaagatgggagataacgcctcggaaagagacaccggcgagtccaaggcagggatcgcagcttctgtgtccatacttgaaaacagtagcagagagacttctagaaggcaagagcagcacagattttctatggacttaaagatgccagcatttcaccccaagcaggaggtgcccgtccctggtgatggtgtggagttcccttccagtacgggagcggagggccagacgggtcaccctgcagaaaagctgtccgatttgcacaacaaggaacactctgggggagggaagcgggcgctggccccagacctcatgccgctagatttaagtgcgaggtcgacgcgggatgaccccagcaataaggagacggcctcctccctgcaggcggctttagtcgttcacccgtgtccttactgcagccacaagacctactaccccgaggtcctgtggatgcacaaacgcatctggcaccgcgtcagctgcaactccgtggctcccccgtggattcagcccaatggttacaaaagcatcagaagcaatttggttttcctttcccggagcggacgcacgggccccccgcctgccctcggtggcaaagaatgccagcctttgctccttgctcggttcacccgcactcaggtgccaggggggatgccggggtccaaaagtggctcttctcccctgggagtggtcacaaaagccgctagcatgcctaagaataaggagagccattccggaggtccctgcgctctgtgggcgcccggccctgacgggtatcgacagaccaaaccttgtcacggccaggagccacatggcgcggccacacaggggcccctggccaagcccaggcaggaggctagctccaaaccggtgcctgccccgggtggcgggggcttcagcaggagcgccacccctacgcccaccgtcatcgcccgggctggcgcgcagccctcggccaatagcaagcctgtggagaagtttggggtccccccagcgggggctggctttgcccccacaaataagcacagtgccccggactccctgaaagccaaattcagtgctcagcctcagggtccacctcctgcaaagggcgaagggggcgctcctcctctacctccccgcgagcccccctcgaaggcagcccaggagctgaggactctggccacctgtgctgcggggtccaggggcgacgcggccttgcaggcccagcccggcgtggctggggcgccccccgtcctacactccatcaaacaggagccagtggccgaggggcatgagaagcgcctggacatcctcaacatctttaagacgtacattccaaaggactttgcgaccctctaccagggatggggtgtcagcggccctgggttggagcacagaggggagagaccattctaacacaggtaccgtccagacagtgcctctgagaaagggaacctaaaggcgtgtttccgacgcaccccaggtccccgtaacggccattagcagtaccctcacgatgtcccagcagcctcccacctgtgacctggccgctccatggaagaacagccggggaactcctgagcagacacctcacatcccgagccgctgcgctggagtggaaactgaaggcagatgcctctccttgttaaacgttcagaaataaatgaagatgctatattctagaaatacatgtagatactatatacgcatttacgtgctcatcgtccatagtcccatattttcttataataaacagtagtactggcaggcacagtaggggcacaaggcatctgtcttattcaagacaagtttgagacactggaaaaaaagatacttgttgtgtgtgttggacagagtggcgaggctgagcactgtcacaggggcctcccatgttaagagggactgtggggatgatgtcagaacaagacgtggtggatttgaggttgatcgagtattaatactactgcctctccttgtcttagtgggtatttaaaatagtaaataagagagaggaaggaggtgacgttcaggtgctgtgggaagcaggcttggcggaggggtatgatgatgagaccctcattgttcactggctccatcgcactcctccctggggccgtgtgcctgttccattcttcccaccattcgaactgagcgaatctggcaaaggagacacgtctgtgggaatgcgtagattccgcctcggaagagagctagcgcaacactaagaaaagcaggcttcttgtttattctcaggacctttttgtaacagggctacattctgcaaactgcttacaaaggaagactatacgtcttaacaaattatttagccactgagtcctcccgattcggacctgttttagtaatggcagaagaatccctgagcaggttcaggtgccctagatgactagggtgctgagctctggcgccttctgtccccactctttgcctccccgccccttccctgagccaccccagcaagtgggtgtcttttctccctgggcctggtgacctccacaggatgagtgactttgttcataaagggtggggatcaccagccccttgggtgggggacggcttcatatacctcttcctcagtaatgcaaatgcgagtttttgtggtgggggttaaggcccataacaaaggatcttaaaccatgcagtgtacgcaattgaaatggtattccacagatataaatattttcttttcccattgccgtgacactatgtgtgatggtaatatttctgagagtttcagatttttgcacatatgattttatgcattatcaaaagttactgctgccttgaatgaaaatgttctgtgaaattttttgcaaaagctttactaggtttttttttaattgtgaaattttgtaaaggcaggaaatggattaaaacgagcatgctaaatatatttttcaaaaaagcaataattttacatgtacagaaattatcctaacctttaatactggcgagagcaacagtttacttaatacggtaatggactagtgcagtttttgtagacagtgggcttctgatacaaagtcttgtttaaacacagacacacacacacacaaacacacacacacaccctaaagtgtgggtttcctgttctaatgatttgttgaatattattatattattattattattattattattattgttattgttattagtaatgtttggttctggattctacttgttactgagtttaaattacttgacggttcaggttactttgcaacactttcaaacgatgcaatgtaactggctagcttatatatatatatatatatatatatatatatttttttttttttttttacttatttttttctgatattcttacaccagatatgtacgaaaatgatctgtcctgttggtgtaattaggaatgtccatgcagatacagttaaacaactgtaattgactgttctgtaaagttattttgggcaaagttgcggagacacattcctctgtccacctaagaaatcagaagactcttctgttgatttatgtttaatcatttcagtagtttccccacagtgatcatttctgcattttctggcttttgttttcttggctgaaagtgaatggtgactgttaggaatgtcagggactagtgacccagtcctgtttctctgtgttttagttattaaaaagaaattctgtacccaaagtgacacgaaagtgtagtctacatttttactgtttcagaagcggcatggaaaagtgcagttggcctttggagctggaagtgtcttgctggtgaggctccatcctggaggctctggtggggagtgggctggcgctggggccctgccggccgcgtgctggatccttcctggcttgcaggagagcaggcgtggaggacagtcagcttgcggggccgcgcagggtgcacagagtgcaggaggaaggttttcacccagttaaacagactggggagcccccccaagaacgccatcccttgaggccagctgtgggcaggcctggatgtgtggtcccttccttccacccatcgtcagtattgtgttggtttgttaatttgttgatttggtcatagtatttaatatgatttgtgtttccttatttatttagccaccgttttgattgcctttttttttccgaatggtaatttctgcatgatacacttctgtacgttgtcttctgactgttacagactttctactacctctcccgatctgctgtttccttgtttcttaacaggattttttacagtgttgcgtctaatgtaacttagacaataaagggtttggttgtctacactgcagcttctcggtgtctctcccctgctttccgctcgctgcttcccgctctgcccctgctggggcctggctgcaccctggcctgccttcctatactctcctgtttcccgctcatatctcttcctcatttttgcgttcaaataacacacagctaatgagcttctaaaaatcttttcaggttgttcacttgtattccttaatttgaagaatgaatatttaaattctctcaaaagtcagatattgaggatcttctctgggaaattggccactgtacctgcccacctttctgcctggttccctggaaggtcttattgtcatcttagacggacagatttcattctcagcaccatacagatttggcttcaaagccaggtgaattttgcctttgaggctctgaaaagtattaagtgttttaagaggtcccccaatatttacttatttattttttaaaccaagaaagacactggttccctgaaaagcaggtgcttcaggaagtagcaattgggagttgcatacagttacttcgtcagagaaaggagcgcccagtatgacaggcccccacccctgatccggccactgtgcacaggtcgctgagggtgtgagaacacctctgcaggggctccggcacatgtgggtttcatcgtctcacactccttcaggctgcaggggttgagtgcagaaagggcaagcttcatctccatggtgcctctccaggctggcaactctggtcggcctctgttctttggacagagagggtgtaggttacagggtcagtagggatgctttctggatcaaagaaagtgggtgtagtgcttagtctgttgtgtggaagagggcacctcctgggctttcgtggctggagactgtctaccaacattccttccttcaaactagacaaaccctcctctgccacccccagcaaattctcagaggtttccaagctgtagaaaaaggaaggaaggaaggacggcattcacatagctttactttccgcttcaaaatgtcttaagtagcatatgttgttttactgcttttaactttggtgagttctaatttcagaacgttttgttcactgagcaaaaaaacagatgaaacaaccacaggccaggacttcaagtgaggaggacgcctttgtttgccgtggttggtgggagcacacgccggagcccggtaacgtgcctgtgggagtgaccaagggccacccgcccaagggaaaatgttcattcttcatcagctttgctaattctgctttgaggcagtaaaatgcaaaagaccatagaatttgtatttctttttttaaaatacaatttataacattatattttgtactctttatattagaatttgtaactagattgatgtatttaactatttctgaaaaagtaattcaatgttttagttgtgtgataaaaatatttagataaaacatattcattctattggaatttgaaataaataaaaacatcttggagttctgagatttgtaagacattt

SEQ ID NO: 297820 - DNA, 4423 bp, Homo sapiens
  misc_feature (15)..(15): n is a, c, g, or t
aacccccaacccttncccgccagaacgccctccaaacaagggagagaccattctaacacaggtaccgtccagacagtgcctctgagaaagggaacctaaaggcgtgtttccgacgcaccccaggtccccgtaacggccattagcagtaccctcacgatgtcccagcagcctcccacctgtgacctggccgctccatggaagaacagccggggaactcctgagcagacacctcacatcccgagccgctgcgctggagtggaaactgaaggcagatgcctctccttgttaaacgttcagaaataaatgaagatgctatattctagaaatacatgtagatactatatacgcatttacgtgctcatcgtccatagtcccatattttcttataataaacagtagtactggcaggcacagtaggggcacaaggcatctgtcttattcaagacaagtttgagacactggaaaaaaagatacttgttgtgtgtgttggacagagtggcgaggctgagcactgtcacaggggcctcccatgttaagagggactgtggggatgatgtcagaacaagacgtggtggatttgaggttgatcgagtattaatactactgcctctccttgtcttagtgggtatttaaaatagtaaataagagagaggaaggaggtgacgttcaggtgctgtgggaagcaggcttggcggaggggtatgatgatgagaccctcattgttcactggctccatcgcactcctccctggggccgtgtgcctgttccattcttcccaccattcgaactgagcgaatctggcaaaggagacacgtctgtgggaatgcgtagattccgcctcggaagagagctagcgcaacactaagaaaagcaggcttcttgtttattctcaggacctttttgtaacagggctacattctgcaaactgcttacaaaggaagactatacgtcttaacaaattatttagccactgagtcctcccgattcggacctgttttagtaatggcagaagaatccctgagcaggttcaggtgccctagatgactagggtgctgagctctggcgccttctgtccccactctttgcctccccgccccttccctgagccaccccagcaagtgggtgtcttttctccctgggcctggtgacctccacaggatgagtgactttgttcataaagggtggggatcaccagccccttgggtgggggacggcttcatatacctcttcctcagtaatgcaaatgcgagtttttgtggtgggggttaaggcccataacaaaggatcttaaaccatgcagtgtacgcaattgaaatggtattccacagatataaatattttcttttcccattgccgtgacactatgtgtgatggtaatatttctgagagtttcagatttttgcacatatgattttatgcattatcaaaagttactgctgccttgaatgaaaatgttctgtgaaattttttgcaaaagctttactaggtttttttttaattgtgaaattttgtaaaggcaggaaatggattaaaacgagcatgctaaatatatttttcaaaaaagcaataattttacatgtacagaaattatcctaacctttaatactggcgagagcaacagtttacttaatacggtaatggactagtgcagtttttgtagacagtgggcttctgatacaaagtcttgtttaaacacagacacacacacacacaaacacacacacacaccctaaagtgtgggtttcctgttctaatgatttgttgaatattattatattattattattattattattattattgttattgttattagtaatgtttggttctggattctacttgttactgagtttaaattacttgacggttcaggttactttgcaacactttcaaacgatgcaatgtaactggctagcttatatatatatatatatatatatatatatatttttttttttttttttacttatttttttctgatattcttacaccagatatgtacgaaaatgatctgtcctgttggtgtaattaggaatgtccatgcagatacagttaaacaactgtaattgactgttctgtaaagttattttgggcaaagttgcggagacacattcctctgtccacctaagaaatcagaagactcttctgttgatttatgtttaatcatttcagtagtttccccacagtgatcatttctgcattttctggcttttgttttcttggctgaaagtgaatggtgactgttaggaatgtcagggactagtgacccagtcctgtttctctgtgttttagttattaaaaagaaattctgtacccaaagtgacacgaaagtgtagtctacatttttactgtttcagaagcggcatggaaaagtgcagttggcctttggagctggaagtgtcttgctggtgaggctccatcctggaggctctggtggggagtgggctggcgctggggccctgccggccgcgtgctggatccttcctggcttgcaggagagcaggcgtggaggacagtcagcttgcggggccgcgcagggtgcacagagtgcaggaggaaggttttcacccagttaaacagactggggagcccccccaagaacgccatcccttgaggccagctgtgggcaggcctggatgtgtggtcccttccttccacccatcgtcagtattgtgttggtttgttaatttgttgatttggtcatagtatttaatatgatttgtgtttccttatttatttagccaccgttttgattgcctttttttttccgaatggtaatttctgcatgatacacttctgtacgttgtcttctgactgttacagactttctactacctctcccgatctgctgtttccttgtttcttaacaggattttttacagtgttgcgtctaatgtaacttagacaataaagggtttggttgtctacactgcagcttctcggtgtctctcccctgctttccgctcgctgcttcccgctctgcccctgctggggcctggctgcaccctggcctgccttcctatactctcctgtttcccgctcatatctcttcctcatttttgcgttcaaataacacacagctaatgagcttctaaaaatcttttcaggttgttcacttgtattccttaatttgaagaatgaatatttaaattctctcaaaagtcagatattgaggatcttctctgggaaattggccactgtacctgcccacctttctgcctggttccctggaaggtcttattgtcatcttagacggacagatttcattctcagcaccatacagatttggcttcaaagccaggtgaattttgcctttgaggctctgaaaagtattaagtgttttaagaggtcccccaatatttacttatttattttttaaaccaagaaagacactggttccctgaaaagcaggtgcttcaggaagtagcaattgggagttgcatacagttacttcgtcagagaaaggagcgcccagtatgacaggcccccacccctgatccggccactgtgcacaggtcgctgagggtgtgagaacacctctgcaggggctccggcacatgtgggtttcatcgtctcacactccttcaggctgcaggggttgagtgcagaaagggcaagcttcatctccatggtgcctctccaggctggcaactctggtcggcctctgttctttggacagagagggtgtaggttacagggtcagtagggatgctttctggatcaaagaaagtgggtgtagtgcttagtctgttgtgtggaagagggcacctcctgggctttcgtggctggagactgtctaccaacattccttccttcaaactagacaaaccctcctctgccacccccagcaaattctcagaggtttccaagctgtagaaaaaggaaggaaggaaggacggcattcacatagctttactttccgcttcaaaatgtcttaagtagcatatgttgttttactgcttttaactttggtgagttctaatttcagaacgttttgttcactgagcaaaaaaacagatgaaacaaccacaggccaggacttcaagtgaggaggacgcctttgtttgccgtggttggtgggagcacacgccggagcccggtaacgtgcctgtgggagtgaccaagggccacccgcccaagggaaaatgttcattcttcatcagctttgctaattctgctttgaggcagtaaaatgcaaaagaccatagaatttgtatttctttttttaaaatacaatttataacattatattttgtactctttatattagaatttgtaactagattgatgtatttaactatttctgaaaaagtaattcaatgttttagttgtgtgataaaaatatttagataaaacatattcattctattggaatttgaaataaataaaaacatcttggagttctgagatttgtaagacattt

SEQ ID NO: 297821 - DNA, 421 bp, Homo sapiens
caggtcagggggtcttcgcctacttggttggcttgctttgtgaaggtcattgtttgtgttcttggatgttgattagaaaattaataggaaaaatgcatttagaaaccaaaaggcagaaatgagcttttctcctgttctttcctttttctcacccaggggagagaccattctaacacaggtaccgtccagacagtgcctctgagaaagggaacctaaaggcgtgtttccgacgcaccccaggtccccgtaacggccattagcagtaccctcacgatgtcccagcagcctcccacctgtgacctggccgctccatggaagaacagccggggaactcctgagcagacacctcacatcccgagccgctgcgctggagtggaaactgaaggcagatgcctctccttgttaaacgttcagaaataaa

SEQ ID NO: 297822 - DNA, 592 bp, Homo sapiens
atgaacatgaagccggccactgcctctgctctgctcctgctcctgctgggcctggcctggacccaggggagccacggctggggtgcggacgcgtcatcactgcagaaacgtgcaggcagagccgatcagaactacaattacaaccagcatgcgtatcccactgcctatggtgggaagtactcagtcaagacccctgcaaaggggggagtctcaccttcttcctcggcttcccgggtgcaacctggcctgctgcagtgggtgaagttttggtaggcaatttcttgcaaccaccaccgaggccccgaaaagcactggtcgtcagggagctcctccccttggcccccagcctgtgccagccctggcccggctgccacacctctgtttcctaggctggggacccagcttgtctctccttgtttcttcccactgcactgtggtgcttcagtggccaccagcctcgtcacatacaccagcatctttctgtacctcctccctttggtgacctgaagtcactgtgacagttctccaggaaggaggagcttcctacttttgagtttctctgtggaaataaaacatgaatcttgtttcccta

SEQ ID NO: 297823 - DNA, 658 bp, Homo sapiens
attttagtggggcatagacttgtagtttgtgtgattgtgtttgaaacatattatgaagttagcacaataagaaatggatgattttaatattggttatgtgatgtatatgttcgcgtgatatttgatttttattagttgtttattaatattagtatttatctttgttgttgtttcagttgtattctttttttatgttttgtgtttttattttttatttattgtgttttttgtttttttttttgtgtttttttttttttttttgttttgtttccctcggcacacctggccttctccatgctcggaataacttcctgcagcgaccaacaggctaaagagggggaaggtctagggatccagcaccggctcctcctccggcaaccacggtgggagcggcggaggaaatggacataaacccgggaactctgagacgtctcctgggatgtttaactttgacactttctggaagaattttaaatccaagctgggtttcatcaactgggatgccataaacaaggaccagagaagctctcgcatcccgtgacctccagacaaggagccaccagattggatgggagcccccacactccctccttaaaacaccaccctctcatcactaatctcagcccttgcccttgaaataaaccttagctgccccaca

SEQ ID NO: 297824 - DNA, 636 bp, Homo sapiens
ccacaaacacacacaacaccacacacaccctaggctagtacgagctggtgtttaatcggccgaggcacaggctaaagagtgggaagggatccagcaccggctcctcctccggcaaccacggtgggagcggcggaggaaatggacataaacccgggaactctgagacgtctcctgggatgtttaactttgacactttctggaagaattttaaatccaagctgggtttcatcaactgggatgccataaacaagaaccaggtcccgccccccagcacccgagccctcctctacttcagccgactctgggaggatttcaaacagaacactcctttcctcaactggaaagcaattattgagggtgcggacgcgtcatcactgcagaaacgtgcaggcagagccgatcagtgccgggtgcatggtatggcatggaggtggcagctgtatcgttccatgatctactgatttcttaccttgctatgctgtatccgcacttgcctatgtgtgggatcgtacttcagttcttagtacccctgtctacagggtgggagctctcatcctttcttccttcggcttcccggtgtgtcttcctgtgcctgtctgctggtggtgtgaaagttctgggcatggcaagtttctt

SEQ ID NO: 297825 - DNA, 318 bp, Homo sapiens
tctgagaagcccaggcagttgaggacaggagagagaaggctgcagacccagagggagggaggacagggagtcggaaggaggaggacagaggagggcacagagacgcagagcaagggcggcaaggaggagaccctggtgggaggaagacactctggagagagagggggctgggcagagatgaagttccaggggcccctggcctgcctcctgctggccctctgcctgggcagtggggaggctggccccctgcagaagtcagctgctgattttggaaacatccttctgactccgcctatgacgtctacatgatgttccctc

SEQ ID NO: 297826 - DNA, 1435 bp, Homo sapiens
attttagtggggcatagacttgtagtttgtgtgattgtgtttgaaacatattatgaagttagcacaataagaaatggatgattttaatattggttatgtgatgtatatgttcgcgtgatatttgatttttattagttgtttattaatattagtatttatctttgttgttgtttcagttgtattctttttttatgttttgtgtttttattttttatttattgtgttttttgtttttttttttgtgtttttttttttttttttgttttgtttccctcggcacacctggccttctccatgctcggaataacttcctgcagcgaccaacaggctaaagagggggaaggtctagggaggttggaaagaggactggaatctgattggggttccaacaaatctgtaacaccgctgggaacgactgggtcccctttaggtcctttaggacagcgtttgaaatcttgctttcccctgcagggatccagcaccggctcctcctccggcaaccacggtgggagcggcggaggaaatggacataaacccgggtgtgaaaagccagggaatgaagcccgcgggagcggggaatctgggattcagggcttcagaggacagggagtttccagcaacatgagggaaataagcaaagagggcaatcgcctccttggaggctctggagacaattatcggaactctgagacgtctcctgggatgtttaactttgacactttctggaagaattttaaatccaagctgggtttcatcaactgggatgccataaacaagaaccaggtcccgccccccagcacccgagccctcctctacttcagccgactctgggaggatttcaaacagaacactcctttcctcaactggaaagcaattattgagggtgcggacgcgtcatcactgcagaaacgtgcaggcagagccgatcagccgggtgcaggatggcaggaggtggcagctgtaacttccaagaactacaattacaaccagcatgcgtatcccactgcctatggtgggaagtactcagtcaagacccctgcaaaggggggagtctcaccttcttcctcggcttcccgggtgcaacctggcctgctgcagtgggtgaagttttggtaggcaatttcttgcaaccaccaccgaggccccgaaaagcactggtcgtcagggagctcctccccttggcccccagcctgtgccagccctggcccggctgccacacctctgtttcctaggctggggacccagcttgtctctccttgtttcttcccactgcactgtggtgcttcagtggccaccagcctcgtcacatacaccagcatctttctgtacctcctccctttggtgacctgaagtcactgtgacagttctccaggaaggaggagcttcctacttttgagtttctctgtggaaataaaacatgaatcttgtttcccta

SEQ ID NO: 297827 - DNA, 1181 bp, Homo sapiens
attttagtggggcatagacttgtagtttgtgtgattgtgtttgaaacatattatgaagttagcacaataagaaatggatgattttaatattggttatgtgatgtatatgttcgcgtgatatttgatttttattagttgtttattaatattagtatttatctttgttgttgtttcagttgtattctttttttatgttttgtgtttttattttttatttattgtgttttttgtttttttttttgtgtttttttttttttttttgttttgtttccctcggcacacctggccttctccatgctcggaataacttcctgcagcgaccaacaggctaaagagggggaaggtctagggatccagcaccggctcctcctccggcaaccacggtgggagcggcggaggaaatggacataaacccgggtgtgaaaagccagggaatgaagcccgcgggagcggggaatctgggattcagaactctgagacgtctcctgggatgtttaactttgacactttctggaagaattttaaatccaagctgggtttcatcaactgggatgccataaacaagaaccaggtcccgccccccagcacccgagccctcctctacttcagccgactctgggaggatttcaaacagaacactcctttcctcaactggaaagcaattattgagggtgcggacgcgtcatcactgcagaaacgtgcaggcagagccgatcagaactacaattacaaccagcatgcgtatcccactgcctatggtgggaagtactcagtcaagacccctgcaaaggggggagtctcaccttcttcctcggcttcccgggtgcaacctggcctgctgcagtgggtgaagttttggtaggcaatttcttgcaaccaccaccgaggccccgaaaagcactggtcgtcagggagctcctccccttggcccccagcctgtgccagccctggcccggctgccacacctctgtttcctaggctggggacccagcttgtctctccttgtttcttcccactgcactgtggtgcttcagtggccaccagcctcgtcacatacaccagcatctttctgtacctcctccctttggtgacctgaagtcactgtgacagttctccaggaaggaggagcttcctacttttgagtttctctgtggaaataaaacatgaatcttgtttcccta

SEQ ID NO: 297828 - DNA, 1241 bp, Homo sapiens
attttagtggggcatagacttgtagtttgtgtgattgtgtttgaaacatattatgaagttagcacaataagaaatggatgattttaatattggttatgtgatgtatatgttcgcgtgatatttgatttttattagttgtttattaatattagtatttatctttgttgttgtttcagttgtattctttttttatgttttgtgtttttattttttatttattgtgttttttgtttttttttttgtgtttttttttttttttttgttttgtttccctcggcacacctggccttctccatgctcggaataacttcctgcagcgaccaacaggctaaagagggggaaggtctagggatccagcaccggctcctcctccggcaaccacggtgggagcggcggaggaaatggacataaacccgggtgtgaaaagccagggaatgaagcccgcgggagcggggaatctgggattcaggggcaagggtcgagctggggcagtggaggaggtgacgctgttggtggagtcaatactgtgaactctgagacgtctcctgggatgtttaactttgacactttctggaagaattttaaatccaagctgggtttcatcaactgggatgccataaacaagaaccaggtcccgccccccagcacccgagccctcctctacttcagccgactctgggaggatttcaaacagaacactcctttcctcaactggaaagcaattattgagggtgcggacgcgtcatcactgcagaaacgtgcaggcagagccgatcagaactacaattacaaccagcatgcgtatcccactgcctatggtgggaagtactcagtcaagacccctgcaaaggggggagtctcaccttcttcctcggcttcccgggtgcaacctggcctgctgcagtgggtgaagttttggtaggcaatttcttgcaaccaccaccgaggccccgaaaagcactggtcgtcagggagctcctccccttggcccccagcctgtgccagccctggcccggctgccacacctctgtttcctaggctggggacccagcttgtctctccttgtttcttcccactgcactgtggtgcttcagtggccaccagcctcgtcacatacaccagcatctttctgtacctcctccctttggtgacctgaagtcactgtgacagttctccaggaaggaggagcttcctacttttgagtttctctgtggaaataaaacatgaatcttgtttcccta

SEQ ID NO: 297829 - DNA, 1252 bp, Homo sapiens
attttagtggggcatagacttgtagtttgtgtgattgtgtttgaaacatattatgaagttagcacaataagaaatggatgattttaatattggttatgtgatgtatatgttcgcgtgatatttgatttttattagttgtttattaatattagtatttatctttgttgttgtttcagttgtattctttttttatgttttgtgtttttattttttatttattgtgttttttgtttttttttttgtgtttttttttttttttttgttttgtttccctcggcacacctggccttctccatgctcggaataacttcctgcagcgaccaacaggctaaagagggggaaggtctagggaggttggaaagaggactggaatctgattggggttccaacaaatctgtaacaccgctgggaacgactgggtcccctttaggtcctttaggacagcgtttgaaatcttgctttcccctgcagggatccagcaccggctcctcctccggcaaccacggtgggagcggcggaggaaatggacataaacccgggaactctgagacgtctcctgggatgtttaactttgacactttctggaagaattttaaatccaagctgggtttcatcaactgggatgccataaacaagaaccaggtcccgccccccagcacccgagccctcctctacttcagccgactctgggaggatttcaaacagaacactcctttcctcaactggaaagcaattattgagggtgcggacgcgtcatcactgcagaaacgtgcaggcagagccgatcagaactacaattacaaccagcatgcgtatcccactgcctatggtgggaagtactcagtcaagacccctgcaaaggggggagtctcaccttcttcctcggcttcccgggtgcaacctggcctgctgcagtgggtgaagttttggtaggcaatttcttgcaaccaccaccgaggccccgaaaagcactggtcgtcagggagctcctccccttggcccccagcctgtgccagccctggcccggctgccacacctctgtttcctaggctggggacccagcttgtctctccttgtttcttcccactgcactgtggtgcttcagtggccaccagcctcgtcacatacaccagcatctttctgtacctcctccctttggtgacctgaagtcactgtgacagttctccaggaaggaggagcttcctacttttgagtttctctgtggaaataaaacatgaatcttgtttcccta

SEQ ID NO: 297830 - DNA, 1393 bp, Homo sapiens
attttagtggggcatagacttgtagtttgtgtgattgtgtttgaaacatattatgaagttagcacaataagaaatggatgattttaatattggttatgtgatgtatatgttcgcgtgatatttgatttttattagttgtttattaatattagtatttatctttgttgttgtttcagttgtattctttttttatgttttgtgtttttattttttatttattgtgttttttgtttttttttttgtgtttttttttttttttttgttttgtttccctcggcacacctggccttctccatgctcggaataacttcctgcagcgaccaacaggctaaagagggggaaggtctagggaggttggaaagaggactggaatctgattggggttccaacaaatctgtaacaccgctgggaacgactgggtcccctttaggtcctttaggacagcgtttgaaatcttgctttcccctgcagggatccagcaccggctcctcctccggcaaccacggtgggagcggcggaggaaatggacataaacccgggtgtgaaaagccagggaatgaagcccgcgggagcggggaatctgggattcagggcttcagaggacagggagtttccagcaacatgagggaaataagcaaagagggcaatcgcctccttggaggctctggagacaattatcggaactctgagacgtctcctgggatgtttaactttgacactttctggaagaattttaaatccaagctgggtttcatcaactgggatgccataaacaagaaccaggtcccgccccccagcacccgagccctcctctacttcagccgactctgggaggatttcaaacagaacactcctttcctcaactggaaagcaattattgagggtgcggacgcgtcatcactgcagaaacgtgcaggcagagccgatcagaactacaattacaaccagcatgcgtatcccactgcctatggtgggaagtactcagtcaagacccctgcaaaggggggagtctcaccttcttcctcggcttcccgggtgcaacctggcctgctgcagtgggtgaagttttggtaggcaatttcttgcaaccaccaccgaggccccgaaaagcactggtcgtcagggagctcctccccttggcccccagcctgtgccagccctggcccggctgccacacctctgtttcctaggctggggacccagcttgtctctccttgtttcttcccactgcactgtggtgcttcagtggccaccagcctcgtcacatacaccagcatctttctgtacctcctccctttggtgacctgaagtcactgtgacagttctccaggaaggaggagcttcctacttttgagtttctctgtggaaataaaacatgaatcttgtttcccta

SEQ ID NO: 297831 - DNA, 1453 bp, Homo sapiens
attttagtggggcatagacttgtagtttgtgtgattgtgtttgaaacatattatgaagttagcacaataagaaatggatgattttaatattggttatgtgatgtatatgttcgcgtgatatttgatttttattagttgtttattaatattagtatttatctttgttgttgtttcagttgtattctttttttatgttttgtgtttttattttttatttattgtgttttttgtttttttttttgtgtttttttttttttttttgttttgtttccctcggcacacctggccttctccatgctcggaataacttcctgcagcgaccaacaggctaaagagggggaaggtctagggaggttggaaagaggactggaatctgattggggttccaacaaatctgtaacaccgctgggaacgactgggtcccctttaggtcctttaggacagcgtttgaaatcttgctttcccctgcagggatccagcaccggctcctcctccggcaaccacggtgggagcggcggaggaaatggacataaacccgggtgtgaaaagccagggaatgaagcccgcgggagcggggaatctgggattcagggcttcagaggacagggagtttccagcaacatgagggaaataagcaaagagggcaatcgcctccttggaggctctggagacaattatcgggggcaagggtcgagctggggcagtggaggaggtgacgctgttggtggagtcaatactgtgaactctgagacgtctcctgggatgtttaactttgacactttctggaagaattttaaatccaagctgggtttcatcaactgggatgccataaacaagaaccaggtcccgccccccagcacccgagccctcctctacttcagccgactctgggaggatttcaaacagaacactcctttcctcaactggaaagcaattattgagggtgcggacgcgtcatcactgcagaaacgtgcaggcagagccgatcagaactacaattacaaccagcatgcgtatcccactgcctatggtgggaagtactcagtcaagacccctgcaaaggggggagtctcaccttcttcctcggcttcccgggtgcaacctggcctgctgcagtgggtgaagttttggtaggcaatttcttgcaaccaccaccgaggccccgaaaagcactggtcgtcagggagctcctccccttggcccccagcctgtgccagccctggcccggctgccacacctctgtttcctaggctggggacccagcttgtctctccttgtttcttcccactgcactgtggtgcttcagtggccaccagcctcgtcacatacaccagcatctttctgtacctcctccctttggtgacctgaagtcactgtgacagttctccaggaaggaggagcttcctacttttgagtttctctgtggaaataaaacatgaatcttgtttcccta

SEQ ID NO: 297832 - DNA, 666 bp, Homo sapiens
  misc_feature (9)..(9): n is a, c, g, or t
  misc_feature (35)..(37): n is a, c, g, or t
  misc_feature (49)..(49): n is a, c, g, or t
gcagggggnagctagggagagagtttagtctaagnnnggcactccgatnaacagccccacgttcccccacacccggacccccctctacttcagccgactctgggtaggatttcaaacagaacactcctttcctcaactggaaagcaattattgagggtgcggacgcgtcatcactgcagaaacgtgcaggcagagccgatcagaactacaattacaaccagcatgcgtatcccactgcctatggtgggaagtactcagtcaagacccctgcaaaggggggagtctcaccttcttcctcggcttcccgggtgcaacctggcctgctgcagtgggtgaagttttggtaggcaatttcttgcaaccaccaccgaggccccgaaaagcactggtcgtcagggagctcctccccttggcccccagcctgtgccagccctggcccggctgccacacctctgtttcctaggctggggacccagcttgtctctccttgtttcttcccactgcactgtggtgcttcagtggccaccagcctcgtcacatacaccagcatctttctgtacctcctccctttggtgacctgaagtcactgtgacagttctccaggaaggaggagcttcctacttttgagtttctctgtggaaataaaacatgaatcttgtttcccta

SEQ ID NO: 297833 - DNA, 1659 bp, Homo sapiens
attttagtggggcatagacttgtagtttgtgtgattgtgtttgaaacatattatgaagttagcacaataagaaatggatgattttaatattggttatgtgatgtatatgttcgcgtgatatttgatttttattagttgtttattaatattagtatttatctttgttgttgtttcagttgtattctttttttatgttttgtgtttttattttttatttattgtgttttttgtttttttttttgtgtttttttttttttttttgttttgtttccctcggcacacctggccttctccatgctcggaataacttcctgcagcgaccaacaggctaaagagggggaaggtctagggaggttggaaagaggactggaatctgattggggttccaacaaatctgtaacaccgctgggaacgactgggtcccctttaggtcctttaggacagcgtttgaaatcttgctttcccctgcagggatccagcaccggctcctcctccggcaaccacggtgggagcggcggaggaaatggacataaacccgggtgtgaaaagccagggaatgaagcccgcgggagcggggaatctgggattcaggggcaagggtcgagctggggcagtggaggaggtgacgctgttggtggagtcaatactgtggtgagtggaggcaacactccaccttgggctgggaccatggtgtcacacaatcctcgcctcccctcctgccactcagatctcccgactctggctcacaaagtgggttcttctctcatcccatatctccttggttccatagaactctgagacgtctcctgggatgtttaactttgacactttctggaagaattttaaatccaagctgggtttcatcaactgggatgccataaacaagaaccaggtcccgccccccagcacccgagccctcctctacttcagccgactctgggaggatttcaaacagaacactcctttcctcaactggaaagcaattattgagggtgcggacgcgtcatcactgcagaaacgtgcaggcagagccgatcagggtgagtctctgtcctcaagttaccctgcagggcccttggtcccccttggccttgctcccgggatctgggcaatctgaaattctctttcactcctccattcaatggctttctcagccgggtgcaggatggcaggaggtggcagctgtaacttccaagaactacaattacaaccagcatgcgtatcccactgcctatggtgggaagtactcagtcaagacccctgcaaaggggggagtctcaccttcttcctcggcttcccgggtgcaacctggcctgctgcagtgggtgaagttttggtaggcaatttcttgcaaccaccaccgaggccccgaaaagcactggtcgtcagggagctcctccccttggcccccagcctgtgccagccctggcccggctgccacacctctgtttcctaggctggggacccagcttgtctctccttgtttcttcccactgcactgtggtgcttcagtggccaccagcctcgtcacatacaccagcatctttctgtacctcctccctttggtgacctgaagtcactgtgacagttctccaggaaggaggagcttcctacttttgagtttctctgtggaaataaaacatgaatcttgtttcccta

SEQ ID NO: 297834 - DNA, 2007 bp, Homo sapiens
attttagtggggcatagacttgtagtttgtgtgattgtgtttgaaacatattatgaagttagcacaataagaaatggatgattttaatattggttatgtgatgtatatgttcgcgtgatatttgatttttattagttgtttattaatattagtatttatctttgttgttgtttcagttgtattctttttttatgttttgtgtttttattttttatttattgtgttttttgtttttttttttgtgtttttttttttttttttgttttgtttccctcggcacacctggccttctccatgctcggaataacttcctgcagcgaccaacaggctaaagagggggaaggtctagggaggttggaaagaggactggaatctgattggggttccaacaaatctgtaacaccgctgggaacgactgggtcccctttaggtcctttaggacagcgtttgaaatcttgctttcccctgcagggatccagcaccggctcctcctccggcaaccacggtgggagcggcggaggaaatggacataaacccgggtgtgaaaagccagggaatgaagcccgcgggagcggggaatctgggattcaggggcaagggtcgagctggggcagtggaggaggtgacgctgttggtggagtcaatactgtggtgagtggaggcaacactccaccttgggctgggaccatggtgtcacacaatcctcgcctcccctcctgccactcagatctcccgactctggctcacaaagtgggttcttctctcatcccatatctccttggttccatagaactctgagacgtctcctgggatgtttaactttgacactttctggaagaattttaaatccaagctgggtttcatcaactgggatgccataaacaagaaccaggtcccgccccccagcacccgagccctcctctacttcagccgactctgggaggatttcaaacagaacactcctttcctcaactggaaagcaattattgagggtgcggacgcgtcatcactgcagaaacgtgcaggcagagccgatcagggtgagtctctgtcctcaagttaccctgcagggcccttggtcccccttggccttgctcccgggatctgggcaatctgaaattctctttcactcctccattcaatggctttctcagccgggtgcaggatggcaggaggtggcagctgtaacttccaaggtgagacatctaccatggacccgctgggttacgtcctggcacttcttttcttggtctcctaccctcacctcccaagtaacacttgaagagttggcagaggtcttgagggcaggaggaggagtaggaggaggaggcggcggccatttgggctaggacagtaaaggcaggtgagggtgggggccctggctggctggaggagattgtataaaagaaaacacgtgacacaaggaggggagaaggcaggtgttttaggaaaggtctggtccaggcaggaaggtgggatgtttattccagagcaaaatggccttcgtccgtctgttctaaccgccatgcccacttcttccacagaactacaattacaaccagcatgcgtatcccactgcctatggtgggaagtactcagtcaagacccctgcaaaggggggagtctcaccttcttcctcggcttcccgggtgcaacctggcctgctgcagtgggtgaagttttggtaggcaatttcttgcaaccaccaccgaggccccgaaaagcactggtcgtcagggagctcctccccttggcccccagcctgtgccagccctggcccggctgccacacctctgtttcctaggctggggacccagcttgtctctccttgtttcttcccactgcactgtggtgcttcagtggccaccagcctcgtcacatacaccagcatctttctgtacctcctccctttggtgacctgaagtcactgtgacagttctccaggaaggaggagcttcctacttttgagtttctctgtggaaataaaacatgaatcttgtttcccta

SEQ ID NO: 297835 - DNA, 1258 bp, Homo sapiens
attttagtggggcatagacttgtagtttgtgtgattgtgtttgaaacatattatgaagttagcacaataagaaatggatgattttaatattggttatgtgatgtatatgttcgcgtgatatttgatttttattagttgtttattaatattagtatttatctttgttgttgtttcagttgtattctttttttatgttttgtgtttttattttttatttattgtgttttttgtttttttttttgtgtttttttttttttttttgttttgtttccctcggcacacctggccttctccatgctcggaataacttcctgcagcgaccaacaggctaaagagggggaaggtctagggatccagcaccggctcctcctccggcaaccacggtgggagcggcggaggaaatggacataaacccgggtgtgaaaagccagggaatgaagcccgcgggagcggggaatctgggattcagaactctgagacgtctcctgggatgtttaactttgacactttctggaagaattttaaatccaagctgggtttcatcaactgggatgccataaacaagaaccaggtcccgccccccagcacccgagccctcctctacttcagccgactctgggaggatttcaaacagaacactcctttcctcaactggaaagcaattattgagggtgcggacgcgtcatcactgcagaaacgtgcaggcagagccgatcagccgggtgcaggatggcaggaggtggcagctgtaacttccaagaactacaattacaaccagcatgcgtatcccactgcctatggtgggaagtactcagtcaagacccctgcaaaggggggagtctcaccttcttcctcggcttcccgggtgcaacctggcctgctgcagtgggtgaagttttggtaggcggagcaaaagtgaggggcaccacaggcgaacaggcaatttcttgcaaccaccaccgaggccccgaaaagcactggtcgtcagggagctcctccccttggcccccagcctgtgccagccctggcccggctgccacacctctgtttcctaggctggggacccagcttgtctctccttgtttcttcccactgcactgtggtgcttcagtggccaccagcctcgtcacatacaccagcatctttctgtacctcctccctttggtgacctgaagtcactgtgacagttctccaggaaggaggagcttcctacttttgagtttctctgtggaaataaaacatgaatcttgtttcccta

SEQ ID NO: 297836 - DNA, 1359 bp, Homo sapiens
attttagtggggcatagacttgtagtttgtgtgattgtgtttgaaacatattatgaagttagcacaataagaaatggatgattttaatattggttatgtgatgtatatgttcgcgtgatatttgatttttattagttgtttattaatattagtatttatctttgttgttgtttcagttgtattctttttttatgttttgtgtttttattttttatttattgtgttttttgtttttttttttgtgtttttttttttttttttgttttgtttccctcggcacacctggccttctccatgctcggaataacttcctgcagcgaccaacaggctaaagagggggaaggtctagggatccagcaccggctcctcctccggcaaccacggtgggagcggcggaggaaatggacataaacccgggtgtgaaaagccagggaatgaagcccgcgggagcggggaatctgggattcaggggcaagggtcgagctggggcagtggaggaggtgacgctgttggtggagtcaatactgtgaactctgagacgtctcctgggatgtttaactttgacactttctggaagaattttaaatccaagctgggtttcatcaactgggatgccataaacaagaaccaggtcccgccccccagcacccgagccctcctctacttcagccgactctgggaggatttcaaacagaacactcctttcctcaactggaaagcaattattgagggtgcggacgcgtcatcactgcagaaacgtgcaggcagagccgatcagaactacaattacaaccagcatgcgtatcccactgcctatggtgggaagtactcagtcaagacccctgcaaaggggggagtctcaccttcttcctcggcttcccgggtgcaacctggcctgctgcagtgggtgaagttttggtaggtgagtgtcagagtgagccgacccaggccacatcctggcagtggaggcacagtcacccggggcagggccaggatcttggtatatcctcagatctcagtgggcagcgacatgaagtcaggcaatttcttgcaaccaccaccgaggccccgaaaagcactggtcgtcagggagctcctccccttggcccccagcctgtgccagccctggcccggctgccacacctctgtttcctaggctggggacccagcttgtctctccttgtttcttcccactgcactgtggtgcttcagtggccaccagcctcgtcacatacaccagcatctttctgtacctcctccctttggtgacctgaagtcactgtgacagttctccaggaaggaggagcttcctacttttgagtttctctgtggaaataaaacatgaatcttgtttcccta

SEQ ID NO: 297837 - DNA, 1248 bp, Homo sapiens
attttagtggggcatagacttgtagtttgtgtgattgtgtttgaaacatattatgaagttagcacaataagaaatggatgattttaatattggttatgtgatgtatatgttcgcgtgatatttgatttttattagttgtttattaatattagtatttatctttgttgttgtttcagttgtattctttttttatgttttgtgtttttattttttatttattgtgttttttgtttttttttttgtgtttttttttttttttttgttttgtttccctcggcacacctggccttctccatgctcggaataacttcctgcagcgaccaacaggctaaagagggggaaggtctagggatccagcaccggctcctcctccggcaaccacggtgggagcggcggaggaaatggacataaacccgggaactctgagacgtctcctgggatgtttaactttgacactttctggaagaattttaaatccaagctgggtttcatcaactgggatgccataaacaagaaccaggtcccgccccccagcacccgagccctcctctacttcagccgactctgggaggatttcaaacagaacactcctttcctcaactggaaagcaattattgagggtgcggacgcgtcatcactgcagaaacgtgcaggcagagccgatcagaactacaattacaaccagcatgcgtatcccactgcctatggtgggaagtactcagtcaagacccctgcaaaggggggagtctcaccttcttcctcggcttcccgggtgcaacctggcctgctgcagtgggtgaagttttggtaggtgagtgtcagagtgagccgacccaggccacatcctggcagtggaggcacagtcacccggggcagggccaggatcttggtatatcctcagatctcagtgggcagcgacatgaagtcaggcaatttcttgcaaccaccaccgaggccccgaaaagcactggtcgtcagggagctcctccccttggcccccagcctgtgccagccctggcccggctgccacacctctgtttcctaggctggggacccagcttgtctctccttgtttcttcccactgcactgtggtgcttcagtggccaccagcctcgtcacatacaccagcatctttctgtacctcctccctttggtgacctgaagtcactgtgacagttctccaggaaggaggagcttcctacttttgagtttctctgtggaaataaaacatgaatcttgtttcccta

SEQ ID NO: 297838 - DNA, 1373 bp, Homo sapiens
attttagtggggcatagacttgtagtttgtgtgattgtgtttgaaacatattatgaagttagcacaataagaaatggatgattttaatattggttatgtgatgtatatgttcgcgtgatatttgatttttattagttgtttattaatattagtatttatctttgttgttgtttcagttgtattctttttttatgttttgtgtttttattttttatttattgtgttttttgtttttttttttgtgtttttttttttttttttgttttgtttccctcggcacacctggccttctccatgctcggaataacttcctgcagcgaccaacaggctaaagagggggaaggtctagggatccagcaccggctcctcctccggcaaccacggtgggagcggcggaggaaatggacataaacccgggtgtgaaaagccagggaatgaagcccgcgggagcggggaatctgggattcagggcttcagaggacagggagtttccagcaacatgagggaaataagcaaagagggcaatcgcctccttggaggctctggagacaattatcgggggcaagggtcgagctggggcagtggaggaggtgacgctgttggtggagtcaatactgtgaactctgagacgtctcctgggatgtttaactttgacactttctggaagaattttaaatccaagctgggtttcatcaactgggatgccataaacaagaaccaggtcccgccccccagcacccgagccctcctctacttcagccgactctgggaggatttcaaacagaacactcctttcctcaactggaaagcaattattgagggtgcggacgcgtcatcactgcagaaacgtgcaggcagagccgatcagccgggtgcaggatggcaggaggtggcagctgtaacttccaagaactacaattacaaccagcatgcgtatcccactgcctatggtgggaagtactcagtcaagacccctgcaaaggggggagtctcaccttcttcctcggcttcccgggtgcaacctggcctgctgcagtgggtgaagttttggtaggcaatttcttgcaaccaccaccgaggccccgaaaagcactggtcgtcagggagctcctccccttggcccccagcctgtgccagccctggcccggctgccacacctctgtttcctaggctggggacccagcttgtctctccttgtttcttcccactgcactgtggtgcttcagtggccaccagcctcgtcacatacaccagcatctttctgtacctcctccctttggtgacctgaagtcactgtgacagttctccaggaaggaggagcttcctacttttgagtttctctgtggaaataaaacatgaatcttgtttcccta

SEQ ID NO: 297839 - DNA, 1276 bp, Homo sapiens
attttagtggggcatagacttgtagtttgtgtgattgtgtttgaaacatattatgaagttagcacaataagaaatggatgattttaatattggttatgtgatgtatatgttcgcgtgatatttgatttttattagttgtttattaatattagtatttatctttgttgttgtttcagttgtattctttttttatgttttgtgtttttattttttatttattgtgttttttgtttttttttttgtgtttttttttttttttttgttttgtttccctcggcacacctggccttctccatgctcggaataacttcctgcagcgaccaacaggctaaagagggggaaggtctagggatccagcaccggctcctcctccggcaaccacggtgggagcggcggaggaaatggacataaacccgggtgtgaaaagccagggaatgaagcccgcgggagcggggaatctgggattcaggggcaagggtcgagctggggcagtggaggaggtgacgctgttggtggagtcaatactgtgaactctgagacgtctcctgggatgtttaactttgacactttctggaagaattttaaatccaagctgggtttcatcaactgggatgccataaacaagaaccaggtcccgccccccagcacccgagccctcctctacttcagccgactctgggaggatttcaaacagaacactcctttcctcaactggaaagcaattattgagggtgcggacgcgtcatcactgcagaaacgtgcaggcagagccgatcagaactacaattacaaccagcatgcgtatcccactgcctatggtgggaagtactcagtcaagacccctgcaaaggggggagtctcaccttcttcctcggcttcccgggtgcaacctggcctgctgcagtgggtgaagttttggtaggcggagcaaaagtgaggggcaccacaggcgaacaggcaatttcttgcaaccaccaccgaggccccgaaaagcactggtcgtcagggagctcctccccttggcccccagcctgtgccagccctggcccggctgccacacctctgtttcctaggctggggacccagcttgtctctccttgtttcttcccactgcactgtggtgcttcagtggccaccagcctcgtcacatacaccagcatctttctgtacctcctccctttggtgacctgaagtcactgtgacagttctccaggaaggaggagcttcctacttttgagtttctctgtggaaataaaacatgaatcttgtttcccta

SEQ ID NO: 297840 - DNA, 1130 bp, Homo sapiens
attttagtggggcatagacttgtagtttgtgtgattgtgtttgaaacatattatgaagttagcacaataagaaatggatgattttaatattggttatgtgatgtatatgttcgcgtgatatttgatttttattagttgtttattaatattagtatttatctttgttgttgtttcagttgtattctttttttatgttttgtgtttttattttttatttattgtgttttttgtttttttttttgtgtttttttttttttttttgttttgtttccctcggcacacctggccttctccatgctcggaataacttcctgcagcgaccaacaggctaaagagggggaaggtctagggatccagcaccggctcctcctccggcaaccacggtgggagcggcggaggaaatggacataaacccgggaactctgagacgtctcctgggatgtttaactttgacactttctggaagaattttaaatccaagctgggtttcatcaactgggatgccataaacaagaaccaggtcccgccccccagcacccgagccctcctctacttcagccgactctgggaggatttcaaacagaacactcctttcctcaactggaaagcaattattgagggtgcggacgcgtcatcactgcagaaacgtgcaggcagagccgatcagaactacaattacaaccagcatgcgtatcccactgcctatggtgggaagtactcagtcaagacccctgcaaaggggggagtctcaccttcttcctcggcttcccgggtgcaacctggcctgctgcagtgggtgaagttttggtaggcaatttcttgcaaccaccaccgaggccccgaaaagcactggtcgtcagggagctcctccccttggcccccagcctgtgccagccctggcccggctgccacacctctgtttcctaggctggggacccagcttgtctctccttgtttcttcccactgcactgtggtgcttcagtggccaccagcctcgtcacatacaccagcatctttctgtacctcctccctttggtgacctgaagtcactgtgacagttctccaggaaggaggagcttcctacttttgagtttctctgtggaaataaaacatgaatcttgtttcccta

SEQ ID NO: 297841 - DNA, 1172 bp, Homo sapiens
attttagtggggcatagacttgtagtttgtgtgattgtgtttgaaacatattatgaagttagcacaataagaaatggatgattttaatattggttatgtgatgtatatgttcgcgtgatatttgatttttattagttgtttattaatattagtatttatctttgttgttgtttcagttgtattctttttttatgttttgtgtttttattttttatttattgtgttttttgtttttttttttgtgtttttttttttttttttgttttgtttccctcggcacacctggccttctccatgctcggaataacttcctgcagcgaccaacaggctaaagagggggaaggtctagggatccagcaccggctcctcctccggcaaccacggtgggagcggcggaggaaatggacataaacccgggaactctgagacgtctcctgggatgtttaactttgacactttctggaagaattttaaatccaagctgggtttcatcaactgggatgccataaacaagaaccaggtcccgccccccagcacccgagccctcctctacttcagccgactctgggaggatttcaaacagaacactcctttcctcaactggaaagcaattattgagggtgcggacgcgtcatcactgcagaaacgtgcaggcagagccgatcagccgggtgcaggatggcaggaggtggcagctgtaacttccaagaactacaattacaaccagcatgcgtatcccactgcctatggtgggaagtactcagtcaagacccctgcaaaggggggagtctcaccttcttcctcggcttcccgggtgcaacctggcctgctgcagtgggtgaagttttggtaggcaatttcttgcaaccaccaccgaggccccgaaaagcactggtcgtcagggagctcctccccttggcccccagcctgtgccagccctggcccggctgccacacctctgtttcctaggctggggacccagcttgtctctccttgtttcttcccactgcactgtggtgcttcagtggccaccagcctcgtcacatacaccagcatctttctgtacctcctccctttggtgacctgaagtcactgtgacagttctccaggaaggaggagcttcctacttttgagtttctctgtggaaataaaacatgaatcttgtttcccta

SEQ ID NO: 297842 - DNA, 1166 bp, Homo sapiens
attttagtggggcatagacttgtagtttgtgtgattgtgtttgaaacatattatgaagttagcacaataagaaatggatgattttaatattggttatgtgatgtatatgttcgcgtgatatttgatttttattagttgtttattaatattagtatttatctttgttgttgtttcagttgtattctttttttatgttttgtgtttttattttttatttattgtgttttttgtttttttttttgtgtttttttttttttttttgttttgtttccctcggcacacctggccttctccatgctcggaataacttcctgcagcgaccaacaggctaaagagggggaaggtctagggatccagcaccggctcctcctccggcaaccacggtgggagcggcggaggaaatggacataaacccgggtgtgaaaagccagggaatgaagcccgcgggagcggggaatctgggattcagaactctgagacgtctcctgggatgtttaactttgacactttctggaagaattttaaatccaagctgggtttcatcaactgggatgccataaacaaggatttcaaacagaacactcctttcctcaactggaaagcaattattgagggtgcggacgcgtcatcactgcagaaacgtgcaggcagagccgatcagccgggtgcaggatggcaggaggtggcagctgtaacttccaagaactacaattacaaccagcatgcgtatcccactgcctatggtgggaagtactcagtcaagacccctgcaaaggggggagtctcaccttcttcctcggcttcccgggtgcaacctggcctgctgcagtgggtgaagttttggtaggcaatttcttgcaaccaccaccgaggccccgaaaagcactggtcgtcagggagctcctccccttggcccccagcctgtgccagccctggcccggctgccacacctctgtttcctaggctggggacccagcttgtctctccttgtttcttcccactgcactgtggtgcttcagtggccaccagcctcgtcacatacaccagcatctttctgtacctcctccctttggtgacctgaagtcactgtgacagttctccaggaaggaggagcttcctacttttgagtttctctgtggaaataaaacatgaatcttgtttcccta

SEQ ID NO: 297843 - DNA, 1243 bp, Homo sapiens
attttagtggggcatagacttgtagtttgtgtgattgtgtttgaaacatattatgaagttagcacaataagaaatggatgattttaatattggttatgtgatgtatatgttcgcgtgatatttgatttttattagttgtttattaatattagtatttatctttgttgttgtttcagttgtattctttttttatgttttgtgtttttattttttatttattgtgttttttgtttttttttttgtgtttttttttttttttttgttttgtttccctcggcacacctggccttctccatgctcggaataacttcctgcagcgaccaacaggctaaagagggggaaggtctagggatccagcaccggctcctcctccggcaaccacggtgggagcggcggaggaaatggacataaacccgggtgtgaaaagccagggaatgaagcccgcgggagcggggaatctgggattcagaactctgagacgtctcctgggatgtttaactttgacactttctggaagaattttaaatccaagctgggtttcatcaactgggatgccataaacaagaaccaggtcccgccccccagcacccgagccctcctctacttcagccgactctgggaggatttcaaacagaacactcctttcctcaactggaaagcaattattgagggtgcggacgcgtcatcactgcagaaacgtgcaggcagagccgatcagaactacaattacaaccagcatgcgtatcccactgcctatggtgggaagtactcagtcaagacccctgcaaaggggggagtctcaccttcttcctcggcttcccgggtgcaacctggcctgctgcagtgggtgaagttttggtaggcaatttcttgcaaccaccaccgaggccccgaaaagcactggtcgtcagggagctcctccccttggcccccagcctgtgccagccctggcccggctgccacacctctgtttcctaggctggggacccagcttgtctctccttgtttcttcccactgcactgtggtgcttcagtggccaccagcctcgtcacatacaccagcatctttctgtacctcctccctttggtgacctgaagtcactgtgacagttctccaggaaggaggagcttcctacttttgagtttctctgtggaaataaaacatgaatcttgtttccctaaaaaaatgccttaaatcaacatacgccaaaagaaaaaatatggcctcattggcctaacgggg

SEQ ID NO: 297844 - DNA, 2418 bp, Homo sapiens
attttagtggggcatagacttgtagtttgtgtgattgtgtttgaaacatattatgaagttagcacaataagaaatggatgattttaatattggttatgtgatgtatatgttcgcgtgatatttgatttttattagttgtttattaatattagtatttatctttgttgttgtttcagttgtattctttttttatgttttgtgtttttattttttatttattgtgttttttgtttttttttttgtgtttttttttttttttttgttttgtttccctcggcacacctggccttctccatgctcggaataacttcctgcagcgaccaacaggctaaagagggggaaggtctagggatccagcaccggctcctcctccggcaaccacggtgggagcggcggaggaaatggacataaacccgggtgtgaaaagccagggaatgaagcccgcgggagcggggaatctgggattcaggggcaagggtcgagctggggcagtggaggaggtgacgctgttggtggagtcaatactgtgaactctgagacgtctcctgggatgtttaactttgacactttctggaagaattttaaatccaagctgggtttcatcaactgggatgccataaacaagaaccaggtcccgccccccagcacccgagccctcctctacttcagccgactctgggaggatttcaaacagaacactcctttcctcaactggaaagcaattattgagggtgcggacgcgtcatcactgcagaaacgtgcaggcagagccgatcagaactacaattacaaccagcatgcgtatcccactgcctatggtgggaagtactcagtcaagacccctgcaaaggggggagtctcaccttcttcctcggcttcccgggtgcaacctggcctgctgcagtgggtgaagttttggtaggtgagtgtcagagtgagccgacccaggccacatcctggcagtggaggcacagtcacccggggcagggccaggatcttggtatatcctcagatctcagtgggcagcgacatgaagtcaggtatgctctgggtgcgtgctctaaaggtgataaggaagaggggacctcatggtggggtgtggagaaagacccataataaagtgatctagggctgggtgcagtggctcatgcctgtaatctctgtgctttgggaggctggggtgggaggatcacttgagtctgggagtttgagaccagactgggcaatatagcaagaccccatctctaaaagaacaaaacaaaacaaaccaaaacaaaacaaaccattccagcctgggaaacatggcaaaaccccgtctactaaaaatacaaaaaattagccaggtgaggtggtgcatgattgtaatcccagctactctggaggctgaggtgggagaatcacctgagcttgggaggttgaggctgctgcgaactgcgattgcaccgctgcactccagcctgggcaatcacagtgagaccttgtctcaaaacaaacaaacaaacaaatgaaaaaccttagccaggcatggtgacacatgcctgtagttctagctacttggaaggcagaggcaggaagatcgcttgagcccaggagttcaaaactgcagtgagctatgatcacaccattgcactccaagtctgggcaacagagggagaccctgtctggaaagaaagagagaaagagagagagagagaaagagggaaagaaagcaagcaagagagaaagaagaaagaaaatgacctaggaccctcggaaagcaccttagggtgggaccacataggcacagctctgagaagatggtgttctagatggagcacagggaccgggatagagatgttacaggggaactgtggagaaaagagcctcctggtggaagggttcagaggtgggacgcagcgaggctgcatgggcgagaggtgatagcttggctcggcagaaccacaaactctgttttaggcggagcaaaagtgaggggcaccacaggcgaacaggtaggacagcaaaagaatggtgggtgcccagacgctgggtgaaaagatgccccgtttccgcaggcttaggagtggccacgtgctaccatttgattttctttcttctaggcaatttcttgcaaccaccaccgaggccccgaaaagcactggtcgtcagggagctcctccccttggcccccagcctgtgccagccctggcccggctgccacacctctgtttcctaggctggggacccagcttgtctctccttgtttcttcccactgcactgtggtgcttcagtggccaccagcctcgtcacatacaccagcatctttctgtacctcctccctttggtgacctgaagtcactgtgacagttctccaggaaggaggagcttcctacttttgagtttctctgtggaaataaaacatgaatcttgtttcccta

SEQ ID NO: 297845 - DNA, 1073 bp, Homo sapiens
attttagtggggcatagacttgtagtttgtgtgattgtgtttgaaacatattatgaagttagcacaataagaaatggatgattttaatattggttatgtgatgtatatgttcgcgtgatatttgatttttattagttgtttattaatattagtatttatctttgttgttgtttcagttgtattctttttttatgttttgtgtttttattttttatttattgtgttttttgtttttttttttgtgtttttttttttttttttgttttgtttccctcggcacacctggccttctccatgctcggaataacttcctgcagcgaccaacaggctaaagagggggaaggtctagggatccagcaccggctcctcctccggcaaccacggtgggagcggcggaggaaatggacataaacccgggaactctgagacgtctcctgggatgtttaactttgacactttctggaagaattttaaatccaagctgggtttcatcaactgggatgccataaacaaggatttcaaacagaacactcctttcctcaactggaaagcaattattgagggtgcggacgcgtcatcactgcagaaacgtgcaggcagagccgatcagaactacaattacaaccagcatgcgtatcccactgcctatggtgggaagtactcagtcaagacccctgcaaaggggggagtctcaccttcttcctcggcttcccgggtgcaacctggcctgctgcagtgggtgaagttttggtaggcaatttcttgcaaccaccaccgaggccccgaaaagcactggtcgtcagggagctcctccccttggcccccagcctgtgccagccctggcccggctgccacacctctgtttcctaggctggggacccagcttgtctctccttgtttcttcccactgcactgtggtgcttcagtggccaccagcctcgtcacatacaccagcatctttctgtacctcctccctttggtgacctgaagtcactgtgacagttctccaggaaggaggagcttcctacttttgagtttctctgtggaaataaaacatgaatcttgtttcccta

SEQ ID NO: 297846 - DNA, 1394 bp, Homo sapiens
attttagtggggcatagacttgtagtttgtgtgattgtgtttgaaacatattatgaagttagcacaataagaaatggatgattttaatattggttatgtgatgtatatgttcgcgtgatatttgatttttattagttgtttattaatattagtatttatctttgttgttgtttcagttgtattctttttttatgttttgtgtttttattttttatttattgtgttttttgtttttttttttgtgtttttttttttttttttgttttgtttccctcggcacacctggccttctccatgctcggaataacttcctgcagcgaccaacaggctaaagagggggaaggtctagggatccagcaccggctcctcctccggcaaccacggtgggagcggcggaggaaatggacataaacccgggtgtgaaaagccagggaatgaagcccgcgggagcggggaatctgggattcaggggcaagggtcgagctggggcagtggaggaggtgacgctgttggtggagtcaatactgtgaactctgagacgtctcctgggatgtttaactttgacactttctggaagaattttaaatccaagctgggtttcatcaactgggatgccataaacaagaaccaggtcccgccccccagcacccgagccctcctctacttcagccgactctgggaggatttcaaacagaacactcctttcctcaactggaaagcaattattgagggtgcggacgcgtcatcactgcagaaacgtgcaggcagagccgatcagaactacaattacaaccagcatgcgtatcccactgcctatggtgggaagtactcagtcaagacccctgcaaaggggggagtctcaccttcttcctcggcttcccgggtgcaacctggcctgctgcagtgggtgaagttttggtaggtgagtgtcagagtgagccgacccaggccacatcctggcagtggaggcacagtcacccggggcagggccaggatcttggtatatcctcagatctcagtgggcagcgacatgaagtcaggcggagcaaaagtgaggggcaccacaggcgaacaggcaatttcttgcaaccaccaccgaggccccgaaaagcactggtcgtcagggagctcctccccttggcccccagcctgtgccagccctggcccggctgccacacctctgtttcctaggctggggacccagcttgtctctccttgtttcttcccactgcactgtggtgcttcagtggccaccagcctcgtcacatacaccagcatctttctgtacctcctccctttggtgacctgaagtcactgtgacagttctccaggaaggaggagcttcctacttttgagtttctctgtggaaataaaacatgaatcttgtttcccta

SEQ ID NO: 297847 - DNA, 1425 bp, Homo sapiens
  misc_feature (1404)..(1404): n is a, c, g, or t
attttagtggggcatagacttgtagtttgtgtgattgtgtttgaaacatattatgaagttagcacaataagaaatggatgattttaatattggttatgtgatgtatatgttcgcgtgatatttgatttttattagttgtttattaatattagtatttatctttgttgttgtttcagttgtattctttttttatgttttgtgtttttattttttatttattgtgttttttgtttttttttttgtgtttttttttttttttttgttttgtttccctcggcacacctggccttctccatgctcggaataacttcctgcagcgaccaacaggctaaagagggggaaggtctagggatccagcaccggctcctcctccggcaaccacggtgggagcggcggaggaaatggacataaacccgggtgtgaaaagccagggaatgaagcccgcgggagcggggaatctgggattcaggggcaagggtcgagctggggcagtggaggaggtgacgctgttggtggagtcaatactgtgaactctgagacgtctcctgggatgtttaactttgacactttctggaagaattttaaatccaagctgggtttcatcaactgggatgccataaacaagaaccaggtcccgccccccagcacccgagccctcctctacttcagccgactctgggaggatttcaaacagaacactcctttcctcaactggaaagcaattattgagggtgcggacgcgtcatcactgcagaaacgtgcaggcagagccgatcagaactacaattacaaccagcatgcgtatcccactgcctatggtgggaagtactcagtcaagacccctgcaaaggggggagtctcaccttcttcctcggcttcccgggtgcaacctggcctgctgcagtgggtgaagttttggtaggtgagtgtcagagtgagccgacccaggccacatcctggcagtggaggcacagtcacccggggcagggccaggatcttggtatatcctcagatctcagtgggcagcgacatgaagtcaggcggagcaaaagtgaggggcaccacaggcgaacaggcaatttcttgcaaccaccaccgaggccccgaaaagcactggtcgtcagggagctcctccccttggcccccagcctgtgccagccctggcccggctgccacacctctgtttcctaggctggggacccagcttgtctctccttgtttcttcccactgcactgtggtgcttcagtggccaccagcctcgtcacatacaccagcatctttctgtacctcctccctttggtgacctgaagtcactgtgacagttctccaggaaggaggagcttcctacttttgagtttctctgtggaaataaaacatgaatcttgtttccctaaaaaaaaaanaaaatagagcctgttgggctt

SEQ ID NO: 297848 - DNA, 819 bp, Homo sapiens
attttagtggggcatagacttgtagtttgtgtgattgtgtttgaaacatattatgaagttagcacaataagaaatggatgattttaatattggttatgtgatgtatatgttcgcgtgatatttgatttttattagttgtttattaatattagtatttatctttgttgttgtttcagttgtattctttttttatgttttgtgtttttattttttatttattgtgttttttgtttttttttttgtgtttttttttttttttttgttttgtttccctcggcacacctggccttctccatgctcggaataacttcctgcagcgaccaacaggctaaagagggggaaggtctagggaggttggaaagaggactggaatctgattggggttccaacaaatctgtaacaccgctgggaacgactgggtcccctttaggtcctttaggacagcgtttgaaatcttgctttcccctgcagggatccagcaccggctcctcctccggcaaccacggtgggagcggcggaggaaatggacataaacccgggaactctgagacgtctcctgggatgtttaactttgacactttctggaagaattttaaatccaagctgggtttcatcaactgggatgccataaacaaggaccagagaagctctcgcatcccgtgacctccagacaaggagccaccagattggatgggagcccccacactccctccttaaaacaccaccctctcatcactaatctcagcccttgcccttgaaataaaccttagctgccccacaaaaaaaaaaaaaaaaaaaaaaaaaaaaaaaggggggggc

SEQ ID NO: 297849 - DNA, 1069 bp, Homo sapiens
attttagtggggcatagacttgtagtttgtgtgattgtgtttgaaacatattatgaagttagcacaataagaaatggatgattttaatattggttatgtgatgtatatgttcgcgtgatatttgatttttattagttgtttattaatattagtatttatctttgttgttgtttcagttgtattctttttttatgttttgtgtttttattttttatttattgtgttttttgtttttttttttgtgtttttttttttttttttgttttgtttccctcggcacacctggccttctccatgctcggaataacttcctgcagcgaccaacaggctaaagagggggaaggtctagggaggttggaaagaggactggaatctgattggggttccaacaaatctgtaacaccgctgggaacgactgggtcccctttaggtcctttaggacagcgtttgaaatcttgctttcccctgcagggatccagcaccggctcctcctccggcaaccacggtgggagcggcggaggaaatggacataaacccgggtgtgaaaagccagggaatgaagcccgcgggagcggggaatctgggattcaggggcaagggtcgagctggggcagtggaggaggtgacgctgttggtggagtcaatactgtggtgagtggaggcaacactccaccttgggctgggaccatggtgtcacacaatcctcgcctcccctcctgccactcagatctcccgactctggctcacaaagtgggttcttctctcatcccatatctccttggttccatagaactctgagacgtctcctgggatgtttaactttgacactttctggaagaattttaaatccaagctgggtttcatcaactgggatgccataaacaaggaccagagaagctctcgcatcccgtgacctccagacaaggagccaccagattggatgggagcccccacactccctccttaaaacaccaccctctcatcactaatctcagcccttgcccttgaaataaaccttagctgccccacaaaaaaaaaaaaaaaaaaaaaaaaaaaaaaaggggggggc

SEQ ID NO: 297850 - DNA, 668 bp, Homo sapiens
ctggaaaagtttcttgtaaagccccggctcttagagccaggctggcaacctttgatatgcaaatgtaagccattagaaaccaggtccacccaggccaggtgtggtggctcacgcctgtaatcccaacactttgggaagcctaggcaggtggatcacctgaggtcaggagttcgagaccagcctggccaacatggtgaaaccccgcctctaataaaaacacaaaaaactagccaggtgtgctgctgtgtgtctgtaatcccagctacttgggaggctgaggcaggagaactgcttgaacccaggaggcagaggttgcagtgagctgagattgcatcattgcactccagcctgggcgacagcaagactctgtcaaaaaaaaaaaaaaaaaaaaaaaaacagccaggcgtggtagcacgcctgtagtcccagctacttgggaggctgagatgggaggatcaccctcgactggggaagttgaggctgcagtgagctgaaatcgcaccactgcactccagcctgggtgacagactgagaccctgtcaaataaataatgtatgtatgtatatatgtatgtatgtatgttaacctcatcccaaaacatcctcacagaacatccagaataatgtttgaccaaatatctgggcaccaatggcacattcaagttgaca

SEQ ID NO: 297851 - DNA, 254 bp, Homo sapiens
gtccttgggaagttttcattttttaaagcatctctggaaaagtttcttgtaaagccccggctcttagagccaggctggcaacctttgatatgcaaatgtaagccattagaaaccaggtccacccaggccaggtgtggtggctcacgcctgtaatcccaacactttgggaagcctaggcaggtggatcacctgaggtcaggagttcgagaccagcctggccaacatggtgaaaccccgcctctaataaaaacaca

SEQ ID NO: 297852 - DNA, 680 bp, Homo sapiens
caatatgttcattacagtgctattcttactagcaaggacacagaatcaacctaagtgcccagcaacactgaattgaatgaaaaaaatgtggtacataaacaccatggaaatctatgcagccaccaaacacagcaaaatcatgtccttttcagcaacatggatggaactagaggctattatcctaagcaacctaatgcaagaacagaaaactacatactgcatgttcccattggaaagtggcagctacacattgaattcacatgaaccagaggcactggagatcactagacaggtgagacaggaggggcacctgggctgaaaaaccacctgttgggtaccatgcttactgtttgagtgatgagatcattgggacaccaagcctcagccttccaaaatctacccatgtaacaaacctgtatgtgtaccctttaatctataataaaggttaaaattaaagattcgtaagtaaaataaaatgacatagagccctccaaaaaatggggttaactgagtggaacgagagaactttgcactatgaacgctaacccagatcaaaaactaaactctagtcatttaaaataatcgtaagttgtatatgatgataattgtataaaagttatacgtgaaagtgccaaaccctaaaattaaacactgtataatgaaattataaaaaatttcca

SEQ ID NO: 297853 - DNA, 161 bp, Homo sapiens
gcggccgcctactactactactgctcgaattcaagcttctaacgatgtacgggctcatgcctgggaagtgttgtggtgggggctcccaggaggactggcccagagagccctgagatagcggggatcctgaactggactgaataaaacgtggtctcccactg

SEQ ID NO: 297854 - DNA, 530 bp, Homo sapiens
cgctgacgcatgcgcatagctaaccgcacccggttcagctcgcctttcttggccagaggcgccggttggactcacgggcggggcatgatggtggtgggtacgggcacctcgctggcgctctcctccctcctgtccctgctgctctttgctgggatgcagatgtacagccgtcagctggcctccaccgagtggctcaccatccagggcggcctgcttggttcgggtctcttcgtgttctcgctcactgccttcaataatctggagaatcttgtctttggcaaaggattccaagcaaagatcttccctgagattctcctgtgcctcctgttggctctctttgcatctggcctcatccaccgagtctgtgtcaccacctgcttcatcttctccatggttggtctgtactacatcaacaagatctcctccaccctgtaccaggcagcagctccagtcctcacaccagccaaggtcacaggcaagagcaagaagagaaactgaccctgaatgttcaataaagttgattctttgta

SEQ ID NO: 297855 - DNA, 1806 bp, Homo sapiens
ccgctccacctctcaagcagccagcgcctgcctgaatctgttctgccccctccccacccatttcaccaccaccatgacaccgggcacccagtctcctttcttcctgctgctgctcctcacagtgcttacagttgttacaggttctggtcatgcaagctctaccccaggtggagaaaaggagacttcggctacccagagaagttcagtgcccagctctactgagaagaatgctgtgagtatgaccagcagcgtactctccagccacagccccggttcaggctcctccaccactcagggacaggatgtcactctggccccggccacggaaccagcttcaggttcagctgccacctggggacaggatgtcacctcggtcccagtcaccaggccagccctgggctccaccaccccgccagcccacgatgtcacctcagccccggacaacaagccagccccgggctccaccgcccccccagcccacggtgtcacctcggccccggacaccaggccggccccgggctccaccgcccccccagcccatggtgtcacctcggccccggacaacaggcccgccttgggctccaccgcccctccagtccacaatgtcacctcggcctcaggctctgcatcaggctcagcttctactctggtgcacaacggcacctctgccagggctaccacaaccccagccagcaagagcactccattctcaattcccagccaccactctgatactcctaccacccttgccagccatagcaccaagactgatgccagtagcactcaccatagcacggtacctcctctcacctcctccaatcacagcacttctccccagttgtctactggggtctctttctttttcctgtcttttcacatttcaaacctccagtttaattcctctctggaagatcccagcaccgactactaccaagagctgcagagagacatttctgaaatgtttttgcagatttataaacaagggggttttctgggcctctccaatattaagttcaggccaggatctgtggtggtacaattgactctggccttccgagaaggtaccatcaatgtccacgacgtggagacacagttcaatcagtataaaacggaagcagcctctcgatataacctgacgatctcagacgtcagcgtgagtgatgtgccatttcctttctctgcccagtctggggctggggtgccaggctggggcatcgcgctgctggtgctggtctgtgttctggttgcgctggccattgtctatctcattgccttggctgtctgtcagtgccgccgaaagaactacgggcagctggacatctttccagcccgggatacctaccatcctatgagcgagtaccccacctaccacacccatgggcgctatgtgccccctagcagtaccgatcgtagcccctatgagaaggtttctgcaggtaatggtggcagcagcctctcttacacaaacccagcagtggcagccacttctgccaacttgtaggggcacgtcgcccgctgagctgagtggccagccagtgccattccactccactcaggttcttcagggccagagcccctgcaccctgtttgggctggtgagctgggagttcaggtgggctgctcacagcctccttcagaggccccaccaatttctcggacacttctcagtgtgtggaagctcatgtgggcccctgagggctcatgcctgggaagtgttgtggtgggggctcccaggaggactggcccagagagccctgagatagcggggatcctgaactggactgaataaaacgtggtctcccactg

SEQ ID NO: 297856 - DNA, 462 bp, Homo sapiens
aggccaagaattgggcaagaggctggtgggtacgggcacctcgctggcgctctcctccctcctgtccctgctgctctttgctgggatgcagatgtacagccgtcagctggcctccaccgagtggctcaccatccagggcggcctgcttggttcgggtctcttcgtgttctcgctcactgccttcaataatctggagaatcttgtctttggcaaaggattccaagcaaagatcttccctgagattctcctgtgcctcctgttggctctctttgcatctggcctcatccaccgagtctgtgtcaccacctgcttcatcttctccatggttggtctgtactacatcaacaagatctcctccaccctgtaccaggcagcagctccagtcctcacaccagccaaggtcacaggcaagagcaagaagagaaactgaccctgaatgttcaataaagttgattctttgta

SEQ ID NO: 297857 - DNA, 790 bp, Homo sapiens
  misc_feature (597)..(598): n is a, c, g, or t
cgctgacgcatgcgcatagctaaccgcacccggttcagctcgcctttcttggccagaggcgccggttggactcacgggcggggcatgatggtggtgggtacgggcacctcgctggcgctctcctccctcctgtccctgctgctctttgctgggatgcagatgtacagccgtcagctggcctccaccgagtggctcaccatccagggcggcctgcttggttcgggtctcttcgtgttctcgctcactgccttcaataatctggagaatcttgtctttggcaaaggattccaagcaaagatcttccctgagattctcctgtgcctcctgttggctctctttgcatctggcctcatccaccgagtctgtgtcaccacctgcttcatcttctccatggttggtctgtactacatcaacaagatctcctccaccctgtaccaggcagcagctccagtcctcacaccagccaaggtcacaggcaagagcaagaagagaaactgaccctgaatgttcaataaagttgattctttgtagcacaaaaaaaaaaaaaaaaaaaaaaaaaaaaactttttgggcggcctgggcccggaaaagtttttnnaaaccccatccgtttgggggcgcggcccacgtggtttcgggacactgggcccaacgcggtcccaagggaaaccggctcacaggggttgggttctccccaataaaaaacccggggccacgggcgttttgacaatccgaggcgctctggggcttcgggtcttcacggaccaagagtgataatccccgggggggg

SEQ ID NO: 297858 - DNA, 3262 bp, Homo sapiens
  misc_feature (1481)..(1481): n is a, c, g, or t
  misc_feature (1502)..(1502): n is a, c, g, or t
  misc_feature (1510)..(1511): n is a, c, g, or t
  misc_feature (1516)..(1516): n is a, c, g, or t
  misc_feature (1521)..(1521): n is a, c, g, or t
  misc_feature (1528)..(1528): n is a, c, g, or t
  misc_feature (1532)..(1532): n is a, c, g, or t
  misc_feature (1534)..(1535): n is a, c, g, or t
  misc_feature (1537)..(1537): n is a, c, g, or t
  misc_feature (1539)..(1539): n is a, c, g, or t
  misc_feature (1541)..(1541): n is a, c, g, or t
  misc_feature (1550)..(1550): n is a, c, g, or t
  misc_feature (1552)..(1552): n is a, c, g, or t
  misc_feature (1595)..(1595): n is a, c, g, or t
  misc_feature (1614)..(1614): n is a, c, g, or t
  misc_feature (1616)..(1617): n is a, c, g, or t
  misc_feature (1620)..(1620): n is a, c, g, or t
  misc_feature (1629)..(1630): n is a, c, g, or t
  misc_feature (1649)..(1649): n is a, c, g, or t
  misc_feature (1652)..(1652): n is a, c, g, or t
  misc_feature (1659)..(1660): n is a, c, g, or t
  misc_feature (1664)..(1664): n is a, c, g, or t
  misc_feature (1679)..(1680): n is a, c, g, or t
  misc_feature (1691)..(1692): n is a, c, g, or t
  misc_feature (1698)..(1698): n is a, c, g, or t
  misc_feature (1709)..(1709): n is a, c, g, or t
  misc_feature (1713)..(1713): n is a, c, g, or t
  misc_feature (1718)..(1718): n is a, c, g, or t
  misc_feature (1721)..(1721): n is a, c, g, or t
  misc_feature (1731)..(1731): n is a, c, g, or t
  misc_feature (1735)..(1735): n is a, c, g, or t
  misc_feature (1749)..(1749): n is a, c, g, or t
  misc_feature (1761)..(1761): n is a, c, g, or t
  misc_feature (1764)..(1765): n is a, c, g, or t
  misc_feature (1769)..(1770): n is a, c, g, or t
  misc_feature (1772)..(1772): n is a, c, g, or t
  misc_feature (1774)..(1774): n is a, c, g, or t
  misc_feature (1777)..(1778): n is a, c, g, or t
  misc_feature (1781)..(1781): n is a, c, g, or t
  misc_feature (1784)..(1784): n is a, c, g, or t
  misc_feature (1788)..(1788): n is a, c, g, or t
  misc_feature (1790)..(1790): n is a, c, g, or t
  misc_feature (1793)..(1793): n is a, c, g, or t
  misc_feature (1795)..(1797): n is a, c, g, or t
  misc_feature (1806)..(1806): n is a, c, g, or t
  misc_feature (1808)..(1808): n is a, c, g, or t
  misc_feature (1813)..(1813): n is a, c, g, or t
  misc_feature (1816)..(1816): n is a, c, g, or t
  misc_feature (1824)..(1824): n is a, c, g, or t
  misc_feature (1843)..(1845): n is a, c, g, or t
  misc_feature (1850)..(1850): n is a, c, g, or t
  misc_feature (1853)..(1853): n is a, c, g, or t
  misc_feature (1858)..(1858): n is a, c, g, or t
  misc_feature (1864)..(1864): n is a, c, g, or t
  misc_feature (1867)..(1867): n is a, c, g, or t
  misc_feature (1877)..(1878): n is a, c, g, or t
  misc_feature (1886)..(1886): n is a, c, g, or t
  misc_feature (1899)..(1899): n is a, c, g, or t
  misc_feature (1902)..(1902): n is a, c, g, or t
  misc_feature (1907)..(1908): n is a, c, g, or t
  misc_feature (1915)..(1915): n is a, c, g, or t
  misc_feature (1921)..(1921): n is a, c, g, or t
  misc_feature (1923)..(1925): n is a, c, g, or t
  misc_feature (1930)..(1930): n is a, c, g, or t
  misc_feature (1944)..(1944): n is a, c, g, or t
  misc_feature (1948)..(1948): n is a, c, g, or t
  misc_feature (1951)..(1951): n is a, c, g, or t
  misc_feature (1953)..(1953): n is a, c, g, or t
  misc_feature (1957)..(1957): n is a, c, g, or t
  misc_feature (1960)..(1960): n is a, c, g, or t
  misc_feature (1967)..(1967): n is a, c, g, or t
  misc_feature (1972)..(1972): n is a, c, g, or t
  misc_feature (1985)..(1986): n is a, c, g, or t
  misc_feature (1990)..(1991): n is a, c, g, or t
  misc_feature (1995)..(1995): n is a, c, g, or t
  misc_feature (2000)..(2001): n is a, c, g, or t
  misc_feature (2004)..(2005): n is a, c, g, or t
  misc_feature (2010)..(2010): n is a, c, g, or t
  misc_feature (2016)..(2016): n is a, c, g, or t
  misc_feature (2027)..(2028): n is a, c, g, or t
  misc_feature (2030)..(2030): n is a, c, g, or t
  misc_feature (2032)..(2033): n is a, c, g, or t
  misc_feature (2035)..(2036): n is a, c, g, or t
  misc_feature (2040)..(2040): n is a, c, g, or t
  misc_feature (2057)..(2057): n is a, c, g, or t
  misc_feature (2070)..(2071): n is a, c, g, or t
  misc_feature (2076)..(2076): n is a, c, g, or t
  misc_feature (2078)..(2078): n is a, c, g, or t
  misc_feature (2543)..(2544): n is a, c, g, or t
  misc_feature (2547)..(2548): n is a, c, g, or t
  misc_feature (2565)..(2565): n is a, c, g, or t
  misc_feature (2573)..(2573): n is a, c, g, or t
  misc_feature (2576)..(2576): n is a, c, g, or t
  misc_feature (2579)..(2580): n is a, c, g, or t
  misc_feature (2604)..(2604): n is a, c, g, or t
  misc_feature (2612)..(2612): n is a, c, g, or t
  misc_feature (2615)..(2617): n is a, c, g, or t
  misc_feature (2619)..(2619): n is a, c, g, or t
  misc_feature (2631)..(2631): n is a, c, g, or t
  misc_feature (2634)..(2634): n is a, c, g, or t
  misc_feature (2640)..(2640): n is a, c, g, or t
  misc_feature (2643)..(2643): n is a, c, g, or t
  misc_feature (2649)..(2649): n is a, c, g, or t
  misc_feature (2651)..(2651): n is a, c, g, or t
  misc_feature (2653)..(2653): n is a, c, g, or t
  misc_feature (2658)..(2659): n is a, c, g, or t
  misc_feature (2661)..(2661): n is a, c, g, or t
  misc_feature (2671)..(2671): n is a, c, g, or t
  misc_feature (2674)..(2674): n is a, c, g, or t
  misc_feature (2684)..(2684): n is a, c, g, or t
  misc_feature (2696)..(2696): n is a, c, g, or t
  misc_feature (2698)..(2698): n is a, c, g, or t
  misc_feature (2702)..(2703): n is a, c, g, or t
  misc_feature (2708)..(2709): n is a, c, g, or t
  misc_feature (2712)..(2713): n is a, c, g, or t
  misc_feature (2715)..(2717): n is a, c, g, or t
  misc_feature (2742)..(2742): n is a, c, g, or t
  misc_feature (2744)..(2744): n is a, c, g, or t
  misc_feature (2749)..(2751): n is a, c, g, or t
  misc_feature (2754)..(2754): n is a, c, g, or t
  misc_feature (2756)..(2759): n is a, c, g, or t
  misc_feature (2763)..(2764): n is a, c, g, or t
  misc_feature (2766)..(2766): n is a, c, g, or t
  misc_feature (2768)..(2770): n is a, c, g, or t
  misc_feature (2790)..(2790): n is a, c, g, or t
  misc_feature (2792)..(2792): n is a, c, g, or t
  misc_feature (2808)..(2810): n is a, c, g, or t
  misc_feature (2822)..(2822): n is a, c, g, or t
  misc_feature (2836)..(2836): n is a, c, g, or t
  misc_feature (2841)..(2841): n is a, c, g, or t
  misc_feature (2843)..(2844): n is a, c, g, or t
cgctgacgcatgcgcatagctaaccgcacccggttcagctcgcctttcttggccagaggcgccggttggactcacgggcggggcatgatggtggtgggtacgggcacctcgctggcgctctcctccctcctgtccctgctgctctttgctgggatgcagatgtacagccgtcagctggcctccaccgagtggctcaccatccagggcggcctgcttggttcgggtctcttcgtgttctcgctcactgtatcctccctgcagttggagggggcgggccacgtaggcatgtgcccttccccttccccacacagctctgtccccgttgcacaccctactccttaactccctcaaccaggccttcaataatctggagaatcttgtctttggcaaaggattccaagcaaagatcttccctgagaatgcttaggtgaaaggttgttaaggagaaatatatttactgaagctgtctgaagacagatgacgcttttcgattctgcaccttgtatagctcctggagttggagctggaagagaaggcctttgaaagcaagaaactttggtaccttctggccagctcccagggaaggtttgaggggaacaggcaaatttgggctgatgttttgcatctattcgctgggaggcggtccttgttcccaccagaagaagcagcaggaccaagttcactatggagttctgatgtgaagttaactcaatattagagaattctacttatttgagggaattgtgaagagcctaaatactagaggcaccaaatatctatggcagcaggaatcctgaccaaatcagaataactgttagattatttcctgtttggaataattcttgttcaattgctcatgtaatcaagaattgatgattcagttatttatggagaattaagtttataaagcaaattaagtgtcaaggccagattacttaaggaatgccacgtgctcagaaattcacagcagatgcaatctcatgtaaaaccctcatgtggtaaaacaaagatctatcatggttgcccttaatcttttctctttttttttttttttttttttgagacaaggctttactctgtcgcttaggctggagtgcagggatgtgatcactgaagccttgacctggtctcaagcaatcttccctcctcagtcttaccagtagctgggactaccagtgagtgccaccacacccagctactgttttaagtttttgtagagatggggtttcaccacattgcccaggctggtctcgaactcctgggctcaagtgatcctcctatttcagcctcccagagtgctggaattacaggtgtgagccactgtgcctggctgccctcatttctttgcccccctctaggacttgctttctccgcatagcccttttgcaggcttcagagttctttccatccagtagccccgggacttctctctgttagattttgtttccatatgtattaccttcacttgcttcttttttttnttttttttgagatggagtctngctctgtnncccangctgnagtgcantggngnnancncngctcactgnancctctgcctcccaggttcaagcgattctcctgcctcagcctcncgagtagctgggattacangnntgngccaccatnnctggctaatttttgtattnttngtagagnnaggntttcaccatgttggnnaggctggtctnnaactcntgaccttgtgntccncccgnctnggcctcccanagtnctgggattacaggngtgagccactgngcnnggcnntncngtnnctnctnaaananacnannngctgggtgngntggcncangcctgtantcctagcactttgggaggnnnaggcnggnggatngcttgngcncaggagttcnngaccagcntgggcaacatggnganacccnntctctcnaaaaanannnaaaanttagccgggcatgntggnacncncctntantcccagntactngggaggctgaggnnggannatcncttgnnccnnggagncaaggntgcagtgagcnnananngnnccantgcactccagcctgggngacagagtgagannctgcntnaaaaataaaaaaaaataataaaaaaagaaaagatgccattgtggtggggcaaagttcttggcccactttgccttctctgccctctccacctgggcaggtggggccctgtttgtctttgcttttgtcctctcaccttctctcccatcatattccaggtaacctaaaatcctttcctgcccccatgaagaagtagatccaagcactctgccctccaacctgtgtccagggagcaaggccttcaacttccaccactggtcacccagcttaatgaattgactctcattgtctggcttcttttggaaagggtttaactgggttccccaaatgggaacacaccttgcccttcagactctgttgtccatcacctttccttttcccttttatgggaggaaagccagggtagggaagttatgtgagatttggggcagagctggtaaaaaaaagcatacatctacatccatgttnnttnnttttttttttttttttngagacggngtntcnntctgttgcccaggctggagtgcantggtgcgntcnnngntcactgcaactntgncttccnggntcaagngntnctccnncntcagcctccngantagctgggantacaggcatggnancacnntactnnctnntnnnttttttttttaattttttttttttntnaagannnggntnnnncttnntngnnnaggctggtctcaaactcctngnctcaagtgatctgccnnnctcagcctcccnaagtgctgggattncaggngnnagccaccacactcaacctcctacctccatgttctgggtatcattaaggtaatcagaatcctcctgctgtagtcacgcttacccttctaagcaggttccccaggattcagagagccccggatttctcctggactccatgtgcagatgcctagtatttccattctgaccgttgccctccttgttcttcttgcctccctagttctcctgtgcctcctgttggctctctttgcatctggcctcatccaccgagtctgtgtcaccacctgcttcatcttctccatggttggtctgtactacatcaacaagatctcctccaccctgtaccaggcagcagctccagtcctcacaccagccaaggtcacaggcaagagcaagaagagaaactgaccctgaatgttcaataaagttgattctttgta

SEQ ID NO: 297859 - DNA, 587 bp, Homo sapiens
cgctgacgcatgcgcatagctaaccgcacccggttcagctcgcctttcttggccagaggcgccggttggactcacgggcggggcatgatggtggtgggtacgggcacctcgctggcgctctcctccctcctgtccctgctgctctttgctgggatgcagatgtacagccgtcagctggcctccaccgagtggctcaccatccagggcggcctgcttggttcgggtctcttcgtgttctcgctcactgccttcaataatctggagaatcttgtctttggcaaaggattccaagcaaagatcttccctgagattctcctgtgcctcctgttggctctctttgcatctggcctcatccaccgagtctgtgtcaccacctgcttcatcttctccatggttggtctgtactacatcaacaagatctcctccaccctgtaccaggcagcagctccagtcctcacaccagccaagatttactcatcggccaagatttactcatcggccaagatttactcatcggccaagatttactcatcgaccaagatttactcatcgaccaagatttactcatcggccaagattactcatcg

SEQ ID NO: 297860 - DNA, 1117 bp, Homo sapiens
  misc_feature (924)..(925): n is a, c, g, or t
cgctgacgcatgcgcatagctaaccgcacccggttcagctcgcctttcttggccagaggcgccggttggactcacgggcggggcatgatggaacaggaccggtggggtccccaggaagtcctagagggggtcggggtttgggtggacaagctttcctcgtcctctcccgacagagctgacgtgtcctgggttccaccgggagcgggcatttccaccggacgggagggttcggggtgtccggggctggggaatacgtaggggttgccgcgcggtgtggggagttggggcgtgtggctgcagtcccgggagttcttggagggggtcggcccaccgagcttccggaccggctgatctgcccgtagcttgccggagggagggcggagcctgactctccgtcccttctcccatcccctccagttggtgggtacgggcacctcgctggcgctctcctccctcctgtccctgctgctctttgctgggatgcagatgtacagccgtcagctggcctccaccgagtggctcaccatccagggcggcctgcttggttcgggtctcttcgtgttctcgctcactgccttcaataatctggagaatcttgtctttggcaaaggattccaagcaaagatcttccctgagattctcctgtgcctcctgttggctctctttgcatctggcctcatccaccgagtctgtgtcaccacctgcttcatcttctccatggttggtctgtactacatcaacaagatctcctccaccctgtaccaggcagcagctccagtcctcacaccagccaaggtcacaggcaagagcaagaagagaaactgaccctgaatgttcaataaagttgattctttgtagcacaaaaaaaaaaaaaaaaaaaaaaaaaaaaactttttgggcggcctgggcccggaaaagtttttnnaaaccccatccgtttgggggcgcggcccacgtggtttcgggacactgggcccaacgcggtcccaagggaaaccggctcacaggggttgggttctccccaataaaaaacccggggccacgggcgttttgacaatccgaggcgctctggggcttcgggtcttcacggaccaagagtgataatccccgggggggg

SEQ ID NO: 297861 - DNA, 378 bp, Homo sapiens
cgctgacgcatgcgcatagctaaccgcacccggttcagctcgcctttcttggccagaggcgccggttggactcacgggcggggcatgatggtggtgggtacgggcacctcgctggcgctctcctccctcctgtccctgctgctctttgctgggatgcagatgtacagccgtcagctggcctccaccgagtggctcaccatccagggcggcctgcttggttcgggtctcttcgtgttctcgctcactgccttcaataatctggagaatcttgtctttggcaaaggattccaagcaaagatcttccctgagattctccgtgccccgtggcctcttgaacggccaacaccgggcggtaaacaccgctcaatctcagggggg

SEQ ID NO: 297862 - DNA, 1895 bp, Homo sapiens
ccgctccacctctcaagcagccagcgcctgcctgaatctgttctgccccctccccacccatttcaccaccaccatgacaccgggcacccagtctcctttcttcctgctgctgctcctcacagtgcttacagctaccacagcccctaaacccgcaacagttgttacaggttctggtcatgcaagctctaccccaggtggagaaaaggagacttcggctacccagagaagttcagtgcccagctctactgagaagaatgctgtgagtatgaccagcagcgtactctccagccacagccccggttcaggctcctccaccactcagggacaggatgtcactctggccccggccacggaaccagcttcaggttcagctgccacctggggacaggatgtcacctcggtcccagtcaccaggccagccctgggctccaccaccccgccagcccacgatgtcacctcagccccggacaacaagccagccccgggctccaccgcccccccagcccacggtgtcacctcggccccggacaccaggccggccccgggctccaccgcccccccagcccacggtgtcacctctcggccccggacaccaggccggccccgggctccaccgcccccccagcccatggtgtcacctcggccccggacaacaggcccgccttgggctccaccgcccctccagtccacaatgtcacctcggcctcaggctctgcatcaggctcagcttctactctggtgcacaacggcacctctgccagggctaccacaaccccagccagcaagagcactccattctcaattcccagccaccactctgatactcctaccacccttgccagccatagcaccaagactgatgccagtagcactcaccatagcacggtacctcctctcacctcctccaatcacagcacttctccccagttgtctactggggtctctttctttttcctgtcttttcacatttcaaacctccagtttaattcctctctggaagatcccagcaccgactactaccaagagctgcagagagacatttctgaaatgtttttgcagatttataaacaagggggttttctgggcctctccaatattaagttcaggccaggatctgtggtggtacaattgactctggccttccgagaaggtaccatcaatgtccacgacgtggagacacagttcaatcagtataaaacggaagcagcctctcgatataacctgacgatctcagacgtcagcgtgagtgatgtgccatttcctttctctgcccagtctggggctggggtgccaggctggggcatcgcgctgctggtgctggtctgtgttctggttgcgctggccattgtctatctcattgccttggctgtctgtcagtgccgccgaaagaactacgggcagctggacatctttccagcccgggatacctaccatcctatgagcgagtaccccacctaccacacccatgggcgctatgtgccccctagcagtaccgatcgtagcccctatgagaaggtttctgcaggtaatggtggcagcagcctctcttacacaaacccagcagtggcagccacttctgccaacttgtaggggcacgtcgcccgctgagctgagtggccagccagtgccattccactccactcaggttcttcagggccagagcccctgcaccctgtttgggctggtgagctgggagttcaggtgggctgctcacagcctccttcagaggccccaccaatttctcggacacttctcagtgtgtggaagctcatgtgggcccctgagggctcatgcctgggaagtgttgtggtgggggctcccaggaggactggcccagagagccctgagatagcggggatcctgaactggactgaataaaacgtggtctcccactg

SEQ ID NO: 297863 - DNA, 1991 bp, Homo sapiens
gtcgctctagaggacccctcataggttcgcagggccatgagccaaggcctatgggcagagagaaggaggctgctgcagggaaggaggcggccaacccaggggttactgaggctgcccactccccagtcctcctggtattatttctctggtggccagagcttatattttcttcttgctcttatttttccttcataaagacccaaccctatgactttaacttcttacagctaccacagcccctaaacccgcaacagttgttacaggttctggtcatgcaagctctaccccaggtggagaaaaggagacttcggctacccagagaagttcagtgcccagctctactgagaagaatgctgtgagtatgaccagcagcgtactctccagccacagccccggttcaggctcctccaccactcagggacaggatgtcactctggccccggccacggaaccagcttcaggttcagctgccacctggggacaggatgtcacctcggtcccagtcaccaggccagccctgggctccaccaccccgccagcccacgatgtcacctcagccccggacaacaagccagccccgggctccaccgcccccccagcccacggtgtcacctcggccccggacaccaggccggccccgggctccaccgcccccccagcccacggtgtcacctctcggccccggacaccaggccggccccgggctccaccgcccccccagcccatggtgtcacctcggccccggacaacaggcccgccttgggctccaccgcccctccagtccacaatgtcacctcggcctcaggctctgcatcaggctcagcttctactctggtgcacaacggcacctctgccagggctaccacaaccccagccagcaagagcactccattctcaattcccagccaccactctgatactcctaccacccttgccagccatagcaccaagactgatgccagtagcactcaccatagcacggtacctcctctcacctcctccaatcacagcacttctccccagttgtctactggggtctctttctttttcctgtcttttcacatttcaaacctccagtttaattcctctctggaagatcccagcaccgactactaccaagagctgcagagagacatttctgaaatgtttttgcagatttataaacaagggggttttctgggcctctccaatattaagttcaggccaggatctgtggtggtacaattgactctggccttccgagaaggtaccatcaatgtccacgacgtggagacacagttcaatcagtataaaacggaagcagcctctcgatataacctgacgatctcagacgtcagcgtgagtgatgtgccatttcctttctctgcccagtctggggctggggtgccaggctggggcatcgcgctgctggtgctggtctgtgttctggttgcgctggccattgtctatctcattgccttggctgtctgtcagtgccgccgaaagaactacgggcagctggacatctttccagcccgggatacctaccatcctatgagcgagtaccccacctaccacacccatgggcgctatgtgccccctagcagtaccgatcgtagcccctatgagaaggtttctgcaggtaatggtggcagcagcctctcttacacaaacccagcagtggcagccacttctgccaacttgtaggggcacgtcgcccgctgagctgagtggccagccagtgccattccactccactcaggttcttcagggccagagcccctgcaccctgtttgggctggtgagctgggagttcaggtgggctgctcacagcctccttcagaggccccaccaatttctcggacacttctcagtgtgtggaagctcatgtgggcccctgagggctcatgcctgggaagtgttgtggtgggggctcccaggaggactggcccagagagccctgagatagcggggatcctgaactggactgaataaaacgtggtctcccactg

SEQ ID NO: 297864 - DNA, 1864 bp, Homo sapiens
ggtagcgcaagcagaacacagaccagcaccagcagcgcgatgccccagccgggcacccagtctcctttcttcctgctgctgctcctcacagtgcttacagctaccacagcccctaaacccgcaacagttgttacaggttctggtcatgcaagctctaccccaggtggagaaaaggagacttcggctacccagagaagttcagtgcccagctctactgagaagaatgctgtgagtatgaccagcagcgtactctccagccacagccccggttcaggctcctccaccactcagggacaggatgtcactctggccccggccacggaaccagcttcaggttcagctgccacctggggacaggatgtcacctcggtcccagtcaccaggccagccctgggctccaccaccccgccagcccacgatgtcacctcagccccggacaacaagccagccccgggctccaccgcccccccagcccacggtgtcacctcggccccggacaccaggccggccccgggctccaccgcccccccagcccacggtgtcacctctcggccccggacaccaggccggccccgggctccaccgcccccccagcccatggtgtcacctcggccccggacaacaggcccgccttgggctccaccgcccctccagtccacaatgtcacctcggcctcaggctctgcatcaggctcagcttctactctggtgcacaacggcacctctgccagggctaccacaaccccagccagcaagagcactccattctcaattcccagccaccactctgatactcctaccacccttgccagccatagcaccaagactgatgccagtagcactcaccatagcacggtacctcctctcacctcctccaatcacagcacttctccccagttgtctactggggtctctttctttttcctgtcttttcacatttcaaacctccagtttaattcctctctggaagatcccagcaccgactactaccaagagctgcagagagacatttctgaaatgtttttgcagatttataaacaagggggttttctgggcctctccaatattaagttcaggccaggatctgtggtggtacaattgactctggccttccgagaaggtaccatcaatgtccacgacgtggagacacagttcaatcagtataaaacggaagcagcctctcgatataacctgacgatctcagacgtcagcgtgagtgatgtgccatttcctttctctgcccagtctggggctggggtgccaggctggggcatcgcgctgctggtgctggtctgtgttctggttgcgctggccattgtctatctcattgccttggctgtctgtcagtgccgccgaaagaactacgggcagctggacatctttccagcccgggatacctaccatcctatgagcgagtaccccacctaccacacccatgggcgctatgtgccccctagcagtaccgatcgtagcccctatgagaaggtttctgcaggtaatggtggcagcagcctctcttacacaaacccagcagtggcagccacttctgccaacttgtaggggcacgtcgcccgctgagctgagtggccagccagtgccattccactccactcaggttcttcagggccagagcccctgcaccctgtttgggctggtgagctgggagttcaggtgggctgctcacagcctccttcagaggccccaccaatttctcggacacttctcagtgtgtggaagctcatgtgggcccctgagggctcatgcctgggaagtgttgtggtgggggctcccaggaggactggcccagagagccctgagatagcggggatcctgaactggactgaataaaacgtggtctcccactg

SEQ ID NO: 297865 - DNA, 1775 bp, Homo sapiens
ccgctccacctctcaagcagccagcgcctgcctgaatctgttctgccccctccccacccatttcaccaccaccatgacaccgggcacccagtctcctttcttcctgctgctgctcctcacagtgcttacagctaccacagcccctaaacccgcaacagttgttacaggttctggtcatgcaagctctaccccaggtggagaaaaggagacttcggctacccagagaagttcagtgcccagctctactgagaagaatgctgtgagtatgaccagcagcgtactctccagccacagccccggttcaggctcctccaccactcagggacaggatgtcactctggccccggccacggaaccagcttcaggttcagctgccacctggggacaggatgtcacctcggtcccagtcaccaggccagccctgggctccaccaccccgccagcccacgatgtcacctcagccccggacaacaagccagccccgggctccaccgcccccccagcccacggtgtcacctcggccccggacaccaggccggccccgggctccaccgcccccccagcccacggtgtcacctctcggcctcaggctctgcatcaggctcagcttctactctggtgcacaacggcacctctgccagggctaccacaaccccagccagcaagagcactccattctcaattcccagccaccactctgatactcctaccacccttgccagccatagcaccaagactgatgccagtagcactcaccatagcacggtacctcctctcacctcctccaatcacagcacttctccccagttgtctactggggtctctttctttttcctgtcttttcacatttcaaacctccagtttaattcctctctggaagatcccagcaccgactactaccaagagctgcagagagacatttctgaaatgtttttgcagatttataaacaagggggttttctgggcctctccaatattaagttcaggccaggatctgtggtggtacaattgactctggccttccgagaaggtaccatcaatgtccacgacgtggagacacagttcaatcagtataaaacggaagcagcctctcgatataacctgacgatctcagacgtcagcgtgagtgatgtgccatttcctttctctgcccagtctggggctggggtgccaggctggggcatcgcgctgctggtgctggtctgtgttctggttgcgctggccattgtctatctcattgccttggctgtctgtcagtgccgccgaaagaactacgggcagctggacatctttccagcccgggatacctaccatcctatgagcgagtaccccacctaccacacccatgggcgctatgtgccccctagcagtaccgatcgtagcccctatgagaaggtttctgcaggtaatggtggcagcagcctctcttacacaaacccagcagtggcagccacttctgccaacttgtaggggcacgtcgcccgctgagctgagtggccagccagtgccattccactccactcaggttcttcagggccagagcccctgcaccctgtttgggctggtgagctgggagttcaggtgggctgctcacagcctccttcagaggccccaccaatttctcggacacttctcagtgtgtggaagctcatgtgggcccctgagggctcatgcctgggaagtgttgtggtgggggctcccaggaggactggcccagagagccctgagatagcggggatcctgaactggactgaataaaacgtggtctcccactg

SEQ ID NO: 297866 - DNA, 1123 bp, Homo sapiens
gaattgagaatggagtgctcttgctggctggggttgtggtagccctggcagaggtgccgttgtgcaccagagtagaagctgagcctgatgccagtagcactcaccatagcacggtacctcctctcacctcctccaatcacagcacttctccccagttgtctactggggtctctttctttttcctgtcttttcacatttcaaacctccagtttaattcctctctggaagatcccagcaccgactactaccaagagctgcagagagacatttctgaaatgtttttgcagatttataaacaagggggttttctgggcctctccaatattaagttcaggccaggatctgtggtggtacaattgactctggccttccgagaaggtaccatcaatgtccacgacgtggagacacagttcaatcagtataaaacggaagcagcctctcgatataacctgacgatctcagacgtcagcgtgagtgatgtgccatttcctttctctgcccagtctggggctggggtgccaggctggggcatcgcgctgctggtgctggtctgtgttctggttgcgctggccattgtctatctcattgccttggctgtctgtcagtgccgccgaaagaactacgggcagctggacatctttccagcccgggatacctaccatcctatgagcgagtaccccacctaccacacccatgggcgctatgtgccccctagcagtaccgatcgtagcccctatgagaaggtttctgcaggtaatggtggcagcagcctctcttacacaaacccagcagtggcagccacttctgccaacttgtaggggcacgtcgcccgctgagctgagtggccagccagtgccattccactccactcaggttcttcagggccagagcccctgcaccctgtttgggctggtgagctgggagttcaggtgggctgctcacagcctccttcagaggccccaccaatttctcggacacttctcagtgtgtggaagctcatgtgggcccctgagggctcatgcctgggaagtgttgtggtgggggctcccaggaggactggcccagagagccctgagatagcggggatcctgaactggactgaataaaacgtggtctcccactg

SEQ ID NO: 297867 - DNA, 1146 bp, Homo sapiens
ccgctccacctctcaagcagccagcgcctgcctgaatctgttctgccccctccccacccatttcaccaccaccatgacaccgggcacccagtctcctttcttcctgctgctgctcctcacagtgcttacagttgttacaggttctggtcatgcaagctctaccccaggtggagaaaaggagacttcggctacccagagaagttcagtgcccagctctactgagaagaatgcttttaattcctctctggaagatcccagcaccgactactaccaagagctgcagagagacatttctgaaatgtttttgcagatttataaacaagggggttttctgggcctctccaatattaagttcaggccaggatctgtggtggtacaattgactctggccttccgagaaggtaccatcaatgtccacgacgtggagacacagttcaatcagtataaaacggaagcagcctctcgatataacctgacgatctcagacgtcagcgtgagtgatgtgccatttcctttctctgcccagtctggggctggggtgccaggctggggcatcgcgctgctggtgctggtctgtgttctggttgcgctggccattgtctatctcattgccttggctgtctgtcagtgccgccgaaagaactacgggcagctggacatctttccagcccgggatacctaccatcctatgagcgagtaccccacctaccacacccatgggcgctatgtgccccctagcagtaccgatcgtagcccctatgagaaggtttctgcaggtaatggtggcagcagcctctcttacacaaacccagcagtggcagccacttctgccaacttgtaggggcacgtcgcccgctgagctgagtggccagccagtgccattccactccactcaggttcttcagggccagagcccctgcaccctgtttgggctggtgagctgggagttcaggtgggctgctcacagcctccttcagaggccccaccaatttctcggacacttctcagtgtgtggaagctcatgtgggcccctgagggctcatgcctgggaagtgttgtggtgggggctcccaggaggactggcccagagagccctgagatagcggggatcctgaactggactgaataaaacgtggtctcccactg

SEQ ID NO: 297868 - DNA, 1200 bp, Homo sapiens
ccgctccacctctcaagcagccagcgcctgcctgaatctgttctgccccctccccacccatttcaccaccaccatgacaccgggcacccagtctcctttcttcctgctgctgctcctcacagtgcttacagttgttacaggttctggtcatgcaagctctaccccaggtggagaaaaggagacttcggctacccagagaagttcagtgcccagctctactgagaagaatgctttgtctactggggtctctttctttttcctgtcttttcacatttcaaacctccagtttaattcctctctggaagatcccagcaccgactactaccaagagctgcagagagacatttctgaaatgtttttgcagatttataaacaagggggttttctgggcctctccaatattaagttcaggccaggatctgtggtggtacaattgactctggccttccgagaaggtaccatcaatgtccacgacgtggagacacagttcaatcagtataaaacggaagcagcctctcgatataacctgacgatctcagacgtcagcgtgagtgatgtgccatttcctttctctgcccagtctggggctggggtgccaggctggggcatcgcgctgctggtgctggtctgtgttctggttgcgctggccattgtctatctcattgccttggctgtctgtcagtgccgccgaaagaactacgggcagctggacatctttccagcccgggatacctaccatcctatgagcgagtaccccacctaccacacccatgggcgctatgtgccccctagcagtaccgatcgtagcccctatgagaaggtttctgcaggtaatggtggcagcagcctctcttacacaaacccagcagtggcagccacttctgccaacttgtaggggcacgtcgcccgctgagctgagtggccagccagtgccattccactccactcaggttcttcagggccagagcccctgcaccctgtttgggctggtgagctgggagttcaggtgggctgctcacagcctccttcagaggccccaccaatttctcggacacttctcagtgtgtggaagctcatgtgggcccctgagggctcatgcctgggaagtgttgtggtgggggctcccaggaggactggcccagagagccctgagatagcggggatcctgaactggactgaataaaacgtggtctcccactg

SEQ ID NO: 297869 - DNA, 1173 bp, Homo sapiens
ccgctccacctctcaagcagccagcgcctgcctgaatctgttctgccccctccccacccatttcaccaccaccatgacaccgggcacccagtctcctttcttcctgctgctgctcctcacagtgcttacagctaccacagcccctaaacccgcaacagttgttacaggttctggtcatgcaagctctaccccaggtggagaaaaggagacttcggctacccagagaagttcagtgcccagctctactgagaagaatgcttttaattcctctctggaagatcccagcaccgactactaccaagagctgcagagagacatttctgaaatgtttttgcagatttataaacaagggggttttctgggcctctccaatattaagttcaggccaggatctgtggtggtacaattgactctggccttccgagaaggtaccatcaatgtccacgacgtggagacacagttcaatcagtataaaacggaagcagcctctcgatataacctgacgatctcagacgtcagcgtgagtgatgtgccatttcctttctctgcccagtctggggctggggtgccaggctggggcatcgcgctgctggtgctggtctgtgttctggttgcgctggccattgtctatctcattgccttggctgtctgtcagtgccgccgaaagaactacgggcagctggacatctttccagcccgggatacctaccatcctatgagcgagtaccccacctaccacacccatgggcgctatgtgccccctagcagtaccgatcgtagcccctatgagaaggtttctgcaggtaatggtggcagcagcctctcttacacaaacccagcagtggcagccacttctgccaacttgtaggggcacgtcgcccgctgagctgagtggccagccagtgccattccactccactcaggttcttcagggccagagcccctgcaccctgtttgggctggtgagctgggagttcaggtgggctgctcacagcctccttcagaggccccaccaatttctcggacacttctcagtgtgtggaagctcatgtgggcccctgagggctcatgcctgggaagtgttgtggtgggggctcccaggaggactggcccagagagccctgagatagcggggatcctgaactggactgaataaaacgtggtctcccactg

SEQ ID NO: 297870 - DNA, 1071 bp, Homo sapiens
ccgctccacctctcaagcagccagcgcctgcctgaatctgttctgccccctccccacccatttcaccaccaccatgacaccgggcacccagtctcctttcttcctgctgctgctcctcacagtgcttacagttgttacaggttctggtcatgcaagctctaccccaggtggagaaaaggagacttcggctacccagagaagttcagtgcccagctctactgagaagaatgctatcccagcaccgactactaccaagagctgcagagagacatttctgaaatggccaggatctgtggtggtacaattgactctggccttccgagaaggtaccatcaatgtccacgacgtggagacacagttcaatcagtataaaacggaagcagcctctcgatataacctgacgatctcagacgtcagcgtgagtgatgtgccatttcctttctctgcccagtctggggctggggtgccaggctggggcatcgcgctgctggtgctggtctgtgttctggttgcgctggccattgtctatctcattgccttggctgtctgtcagtgccgccgaaagaactacgggcagctggacatctttccagcccgggatacctaccatcctatgagcgagtaccccacctaccacacccatgggcgctatgtgccccctagcagtaccgatcgtagcccctatgagaaggtttctgcaggtaatggtggcagcagcctctcttacacaaacccagcagtggcagccacttctgccaacttgtaggggcacgtcgcccgctgagctgagtggccagccagtgccattccactccactcaggttcttcagggccagagcccctgcaccctgtttgggctggtgagctgggagttcaggtgggctgctcacagcctccttcagaggccccaccaatttctcggacacttctcagtgtgtggaagctcatgtgggcccctgagggctcatgcctgggaagtgttgtggtgggggctcccaggaggactggcccagagagccctgagatagcggggatcctgaactggactgaataaaacgtggtctcccactg

SEQ ID NO: 297871 - DNA, 1992 bp, Homo sapiens
ccgctccacctctcaagcagccagcgcctgcctgaatctgttctgccccctccccacccatttcaccaccaccatgacaccgggcacccagtctcctttcttcctgctgctgctcctcacagtgcttacagctaccacagcccctaaacccgcaacagttgttacaggttctggtcatgcaagctctaccccaggtggagaaaaggagacttcggctacccagagaagttcagtgcccagctctactgagaagaatgctgtgagtatgaccagcagcgtactctccagccacagccccggttcaggctcctccaccactcagggacaggatgtcactctggccccggccacggaaccagcttcaggttcagctgccacctggggacaggatgtcacctcggtcccagtcaccaggccagccctgggctccaccaccccgccagcccacgatgtcacctcagccccggacaacaagccagccccgggctccaccgcccccccagcccacggtgtcacctcggccccggacaccaggccggccccgggctccaccgcccccccagcccacggtgtcacctctcggcctcaggctctgcatcaggctcagcttctactctggtgcacaacggcacctctgccagggctaccacaaccccagccagcaagagcactccattctcaattcccagccaccactctgatactcctaccacccttgccagccatagcaccaagactgatgccagtagcactcaccatagcacggtacctcctctcacctcctccaatcacagcacttctccccagttgtctactggggtctctttctttttcctgtcttttcacatttcaaacctccagtttaattcctctctggaagatcccagcaccgactactaccaagagctgcagagagacatttctgaaatgtttttgcagatttataaacaagggggttttctgggcctctccaatattaagttcaggccaggatctgtggtggtacaattgactctggccttccgagaaggtaccatcaatgtccacgacgtggagacacagttcaatcagtataaaacggaagcagcctctcgatataacctgacgatctcagacgtcagcgtgagtgatgtgccatttcctttctctgcccagtctggggctggggtgccaggctggggcatcgcgctgctggtgctggtctgtgttctggttgcgctggccattgtctatctcattgccttggctgtctgtcagtgccgccgaaagaactacgggcagctggacatctttccagcccgggatacctaccatcctatgagcgagtaccccacctaccacacccatgggcgctatgtgccccctagcagtaccgatcgtagcccctatgagaagagtggcagcagacgcaccaggtacgaggaaagcctgaggaccagggcggtggccgaggatgccccctcgacgcattatttcctccctgtcgcaagagggcgctgcgtccaggcactgagaggaagaaagaggagaacgcgaggagtagcaagtccgcgtggtgggtacgggcacctcgctggcgctctcctccctcctgtccctgctgctctttgctgggatgcagatgtacagccgtcagctggcctccaccgagtggctcaccatccagggcggcctgcttggttcgggtctcttcgtgttctcgctcactgccttcaataatctggagaatcttgtctttggcaaaggattccaagcaaagatcttccctgagattctcctgtgcctcctgttggctctctttgcatctggcctcatccaccgagtctgtgtcaccacctgcttcatcttctccatggttggtctgtactacatcaacaagatctcctccaccctgtaccaggcagcagctccagtcctcacaccagccaaggtcacaggcaagagcaagaagagaaactgaccctgaatgttcaataaagttgattctttgta

SEQ ID NO: 297872 - DNA, 1879 bp, Homo sapiens
ccgctccacctctcaagcagccagcgcctgcctgaatctgttctgccccctccccacccatttcaccaccaccatgacaccgggcacccagtctcctttcttcctgctgctgctcctcacagtgcttacagctaccacagcccctaaacccgcaacagttgttacaggttctggtcatgcaagctctaccccaggtggagaaaaggagacttcggctacccagagaagttcagtgcccagctctactgagaagaatgctgtgagtatgaccagcagcgtactctccagccacagccccggttcaggctcctccaccactcagggacaggatgtcactctggccccggccacggaaccagcttcaggttcagctgccacctggggacaggatgtcacctcggtcccagtcaccaggccagccctgggctccaccaccccgccagcccacgatgtcacctcagccccggacaacaagccagccccgggctccaccgcccccccagcccacggtgtcacctcggccccggacaccaggccggccccgggctccaccgcccccccagcccacggtgtcacctctcggcctcaggctctgcatcaggctcagcttctactctggtgcacaacggcacctctgccagggctaccacaaccccagccagcaagagcactccattctcaattcccagccaccactctgatactcctaccacccttgccagccatagcaccaagactgatgccagtagcactcaccatagcacggtacctcctctcacctcctccaatcacagcacttctccccagttgtctactggggtctctttctttttcctgtcttttcacatttcaaacctccagtttaattcctctctggaagatcccagcaccgactactaccaagagctgcagagagacatttctgaaatgtttttgcagatttataaacaagggggttttctgggcctctccaatattaagttcaggccaggatctgtggtggtacaattgactctggccttccgagaaggtaccatcaatgtccacgacgtggagacacagttcaatcagtataaaacggaagcagcctctcgatataacctgacgatctcagacgtcagcgtgagtgatgtgccatttcctttctctgcccagtctggggctggggtgccaggctggggcatcgcgctgctggtgctggtctgtgttctggttgcgctggccattgtctatctcattgccttggctgtctgtcagtgccgccgaaagaactacgggcagctggacatctttccagcccgggatacctaccatcctatgagcgagtaccccacctaccacacccatgggcgctatgtgccccctagcagtaccgatcgtagcccctatgagaaggtttctgcaggtaatggtggcagcagcctctcttacacaaacccagcagtggcagccacttctgccaacttgtaggggcacgtcgcccgctgagctgagtggccagccagtgccattccactccactcaggttcttcagggccagagcccctgcaccctgtttgggctggtgagctgggagttcaggtgggctgctcacagcctccttcagaggccccaccaatttctcggacacttctcagtgtgtggaagctcatgtgggcccctgagggctcatgcctgggaagtgttgtggtgggggctcccaggaggactggcccagagagccctgagatagcggggatcctgaactggactgaataaaacgtggtctcccactgaaaagacataaaaaaagaaaaagacaaagacgagcaaaaagacaaaaagaggcaaaaacaacaaaacacaacaaacaaaaaaaagcacacacaaaaaaaagaag

SEQ ID NO: 297873 - DNA, 1582 bp, Homo sapiens
ccgctccacctctcaagcagccagcgcctgcctgaatctgttctgccccctccccacccatttcaccaccaccatgacaccgggcacccagtctcctttcttcctgctgctgctcctcacagtgcttacagctaccacagcccctaaacccgcaacagttgttacaggttctggtcatgcaagctctaccccaggtggagaaaaggagacttcggctacccagagaagttcagtgcccagctctactgagaagaatgctgtgagtatgaccagcagcgtactctccagccacagccccggttcaggctcctccaccactcagggacaggatgtcactctggccccggccacggaaccagcttcaggttcagctgccacctggggacaggatgtcacctcggtcccagtcaccaggccagccctgggctccaccaccccgccagcccacgatgtcacctcagccccggacaacaagccagccccgggctccaccgcccccccagcccacggtgtcacctcggccccggacaccaggccggccccgggctccaccgcccccccagcccacggtgtcacctctcggcctcaggctctgcatcaggctcagcttctactctggtgcacaacggcacctctgccagggctaccacaaccccagccagcaagagcactccattctcaattcccagccaccactctgatactcctaccacccttgccagccatagcaccaagactgatgccagtagcactcaccatagcacggtacctcctctcacctcctccaatcacagcacttctccccagttgtctactggggtctctttctttttcctgtcttttcacatttcaaacctccagtttaattcctctctggaagatcccagcaccgactactaccaagagctgcagagagacatttctgaaatgtgagtgatgtgccatttcctttctctgcccagtctggggctggggtgccaggctggggcatcgcgctgctggtgctggtctgtgttctggttgcgctggccattgtctatctcattgccttggctgtctgtcagtgccgccgaaagaactacgggcagctggacatctttccagcccgggatacctaccatcctatgagcgagtaccccacctaccacacccatgggcgctatgtgccccctagcagtaccgatcgtagcccctatgagaaggtttctgcaggtaatggtggcagcagcctctcttacacaaacccagcagtggcagccacttctgccaacttgtaggggcacgtcgcccgctgagctgagtggccagccagtgccattccactccactcaggttcttcagggccagagcccctgcaccctgtttgggctggtgagctgggagttcaggtgggctgctcacagcctccttcagaggccccaccaatttctcggacacttctcagtgtgtggaagctcatgtgggcccctgagggctcatgcctgggaagtgttgtggtgggggctcccaggaggactggcccagagagccctgagatagcggggatcctgaactggactgaataaaacgtggtctcccactg

SEQ ID NO: 297874 - DNA, 2792 bp, Homo sapiens
ccgctccacctctcaagcagccagcgcctgcctgaatctgttctgccccctccccacccatttcaccaccaccatgacaccgggcacccagtctcctttcttcctgctgctgctcctcacagtgcttacagctaccacagcccctaaacccgcaacagttgttacaggttctggtcatgcaagctctaccccaggtggagaaaaggagacttcggctacccagagaagttcagtgcccagctctactgagaagaatgctgtgagtatgaccagcagcgtactctccagccacagccccggttcaggctcctccaccactcagggacaggatgtcactctggccccggccacggaaccagcttcaggttcagctgccacctggggacaggatgtcacctcggtcccagtcaccaggccagccctgggctccaccaccccgccagcccacgatgtcacctcagccccggacaacaagccagccccgggctccaccgcccccccagcccacggtgtcacctcggccccggacaccaggccggccccgggctccaccgcccccccagcccacggtgtcacctctcggcctcaggctctgcatcaggctcagcttctactctggtgcacaacggcacctctgccagggctaccacaaccccagccagcaagagcactccattctcaattcccagccaccactctgatactcctaccacccttgccagccatagcaccaagactgatgccagtagcactcaccatagcacggtacctcctctcacctcctccaatcacagcacttctccccagttgtctactggggtctctttctttttcctgtcttttcacatttcaaacctccagtttaattcctctctggaagatcccagcaccgactactaccaagagctgcagagagacatttctgaaatgtttttgcagatttataaacaagggggttttctgggcctctccaatattaagttcaggccaggatctgtggtggtacaattgactctggccttccgagaaggtaccatcaatgtccacgacgtggagacacagttcaatcagtataaaacggaagcagcctctcgatataacctgacgatctcagacgtcagcgtgagtgatgtgccatttcctttctctgcccagtctggggctggggtgccaggctggggcatcgcgctgctggtgctggtctgtgttctggttgcgctggccattgtctatctcattgccttggctgtctgtcagtgccgccgaaagaactacgggcagctggacatctttccagcccgggatacctaccatcctatgagcgagtaccccacctaccacacccatgggcgctatgtgccccctagcagtaccgatcgtagcccctatgagaaggtgagattgggccccacaggccaggggaagcagagggtttggctgggcaaggattctgaagggggtacttggaaaacccaaagagcttggaagaggtgagaagtggcgtgaagtgagcaggggagggcctggcaaggatgaggggcagaggtcagaggagttttgggggacaggcctgggaggagactatggaagaaaggggccctcaagagggagtggccccactgccagaattcctaaaagatcattggccgtccacattcatgctggctggcgctggctgaactggtgccaccgtggcagttttgttttgttttgcttttttgcacccagaggcaaaatgggtggagcactatgcccaggggagcccttcccgaggagtcccaggggtgagcctctgtgcccctaatcatctcctaggaatggagggtagaccgagaaaggctggcatagggggaggtttcccaggtagaagaagaagtgtcagcagaccaggtgagcgtgggtgccagtggggttcttgggagcttcaaggaagcaaggaacgctccctccttcctctcctggtctttctctatgggacctagtaaataattactgcagccacctgaggctggaaaaccactccaggtgggggaggagagagtttagttttcttgctcctattttcctcctcctggagacctccctctctcggctttacaaagacacagatacaccccgccccccaaaacacacacacacacacacacacacacctccttaggctggaacagcagagaatggagggacaagggggctgattagagccaagaagagggagtgaaggagagcagagggaggagggcagccctgtttacagtcacctggctggtggggtggcaggtgctctctctgaattaaccctttgagagctggccaggactctggactgattaccccagcctggggtggcatccaggggctctaggaggtaccttttgctcctcaccctggatctcttttccttccacccaggtttctgcaggtaatggtggcagcagcctctcttacacaaacccagcagtggcagccacttctgccaacttgtaggggcacgtcgcccgctgagctgagtggccagccagtgccattccactccactcaggttcttcagggccagagcccctgcaccctgtttgggctggtgagctgggagttcaggtgggctgctcacagcctccttcagaggccccaccaatttctcggacacttctcagtgtgtggaagctcatgtgggcccctgagggctcatgcctgggaagtgttgtggtgggggctcccaggaggactggcccagagagccctgagatagcggggatcctgaactggactgaataaaacgtggtctcccactg

SEQ ID NO: 297875 - DNA, 1638 bp, Homo sapiens
ccgctccacctctcaagcagccagcgcctgcctgaatctgttctgccccctccccacccatttcaccaccaccatgacaccgggcacccagtctcctttcttcctgctgctgctcctcacagtgcttacagctaccacagcccctaaacccgcaacagttgttacaggttctggtcatgcaagctctaccccaggtggagaaaaggagacttcggctacccagagaagttcagtgcccagctctactgagaagaatgctgtgagtatgaccagcagcgtactctccagccacagccccggttcaggctcctccaccactcagggacaggatgtcactctggccccggccacggaaccagcttcaggttcagctgccacctggggacaggatgtcacctcggtcccagtcaccaggccagccctgggctccaccaccccgccagcccacgatgtcacctcagccccggacaacaagccagccccgggctccaccgcccccccagcccacggtgtcacctcggccccggacaccaggccggccccgggctccaccgcccccccagcccacggtgtcacctctcggcctcaggctctgcatcaggctcagcttctactctggtgcacaacggcacctctgccagggctaccacaaccccagccagcaagagcactccattctcaattcccagccaccactctgatactcctaccacccttgccagccatagcaccaagactgatgccagtagcactcaccatagcacggtacctcctctcacctcctccaatcacagcacttctccccagttgtctactggggtctctttctttttcctgtcttttcacatttcaaacctccagtttaattcctctctggaagatcccagcaccgactactaccaagagctgcagagagacatttctgaaatgtttttgcagatttataaacaagggggttttctgggcctctccaatattaagttcagtgagtgatgtgccatttcctttctctgcccagtctggggctggggtgccaggctggggcatcgcgctgctggtgctggtctgtgttctggttgcgctggccattgtctatctcattgccttggctgtctgtcagtgccgccgaaagaactacgggcagctggacatctttccagcccgggatacctaccatcctatgagcgagtaccccacctaccacacccatgggcgctatgtgccccctagcagtaccgatcgtagcccctatgagaaggtttctgcaggtaatggtggcagcagcctctcttacacaaacccagcagtggcagccacttctgccaacttgtaggggcacgtcgcccgctgagctgagtggccagccagtgccattccactccactcaggttcttcagggccagagcccctgcaccctgtttgggctggtgagctgggagttcaggtgggctgctcacagcctccttcagaggccccaccaatttctcggacacttctcagtgtgtggaagctcatgtgggcccctgagggctcatgcctgggaagtgttgtggtgggggctcccaggaggactggcccagagagccctgagatagcggggatcctgaactggactgaataaaacgtggtctcccactg

SEQ ID NO: 297876 - DNA, 1542 bp, Homo sapiens
ccgctccacctctcaagcagccagcgcctgcctgaatctgttctgccccctccccacccatttcaccaccaccatgacaccgggcacccagtctcctttcttcctgctgctgctcctcacagtgcttacagctaccacagcccctaaacccgcaacagttgttacaggttctggtcatgcaagctctaccccaggtggagaaaaggagacttcggctacccagagaagttcagtgcccagctctactgagaagaatgctgtgagtatgaccagcagcgtactctccagccacagccccggttcaggctcctccaccactcagggacaggatgtcactctggccccggccacggaaccagcttcaggttcagctgccacctggggacaggatgtcacctcggtcccagtcaccaggccagccctgggctccaccaccccgccagcccacgatgtcacctcagccccggacaacaagccagccccgggctccaccgcccccccagcccacggtgtcacctcggccccggacaccaggccggccccgggctccaccgcccccccagcccacggtgtcacctctcggcctcaggctctgcatcaggctcagcttctactctggtgcacaacggcacctctgccagggctaccacaaccccagccagcaagagcactccattctcaattcccagccaccactctgatactcctaccacccttgccagccatagcaccaagactgatgccagtagcactcaccatagcacggtacctcctctcacctcctccaatcacagcacttctccccagttgtctactggggtctctttctttttcctgtcttttcacatttcaaacctccagtttaattcctctctggaagatcccagcaccgactactaccaagagctgcagagagacatttctgaaatgtggggtgccaggctggggcatcgcgctgctggtgctggtctgtgttctggttgcgctggccattgtctatctcattgccttggctgtctgtcagtgccgccgaaagaactacgggcagctggacatctttccagcccgggatacctaccatcctatgagcgagtaccccacctaccacacccatgggcgctatgtgccccctagcagtaccgatcgtagcccctatgagaaggtttctgcaggtaatggtggcagcagcctctcttacacaaacccagcagtggcagccacttctgccaacttgtaggggcacgtcgcccgctgagctgagtggccagccagtgccattccactccactcaggttcttcagggccagagcccctgcaccctgtttgggctggtgagctgggagttcaggtgggctgctcacagcctccttcagaggccccaccaatttctcggacacttctcagtgtgtggaagctcatgtgggcccctgagggctcatgcctgggaagtgttgtggtgggggctcccaggaggactggcccagagagccctgagatagcggggatcctgaactggactgaataaaacgtggtctcccactg

SEQ ID NO: 297877 - DNA, 1850 bp, Homo sapiens
ccgctccacctctcaagcagccagcgcctgcctgaatctgttctgccccctccccacccatttcaccaccaccatgacaccgggcacccagtctcctttcttcctgctgctgctcctcacagtgcttacagctaccacagcccctaaacccgcaacagttgttacaggttctggtcatgcaagctctaccccaggtggagaaaaggagacttcggctacccagagaagttcagtgcccagctctactgagaagaatgctgtgagtatgaccagcagcgtactctccagccacagccccggttcaggctcctccaccactcagggacaggatgtcactctggccccggccacggaaccagcttcaggttcagctgccacctggggacaggatgtcacctcggtcccagtcaccaggccagccctgggctccaccaccccgccagcccacgatgtcacctcagccccggacaacaagccagccccgggctccaccgcccccccagcccacggtgtcacctcggccccggacaccaggccggccccgggctccaccgcccccccagcccacggtgtcacctctcggcctcaggctctgcatcaggctcagcttctactctggtgcacaacggcacctctgccagggctaccacaaccccagccagcaagagcactccattctcaattcccagccaccactctgatactcctaccacccttgccagccatagcaccaagactgatgccagtagcactcaccatagcacggtacctcctctcacctcctccaatcacagcacttctccccagttgtctactggggtctctttctttttcctgtcttttcacatttcaaacctccagtttaattcctctctggaagatcccagcaccgactactaccaagagctgcagagagacatttctgaaatgtttttgcagatttataaacaagggggttttctgggcctctccaatattaagttcaggccaggatctgtggtggtacaattgactctggccttccgagaaggtaccatcaatgtccacgacgtggagacacagttcaatcagtataaaacggaagcagcctctcgatataacctgacgatctcagacgtcagcgtgagtgatgtgccatttcctttctctgcccagtctggggctggggtgccaggctggggcatcgcgctgctggtgctggtctgtgttctggttgcgctggccattgtctatctcattgccttggctgtctgtcagtgccgccgaaagaactacgggcagctggacatctttccagcccgggatacctaccatcctatgagcgagtaccccacctaccacacccatgggcgctatgtgccccctagcagtaccgatcgtagcccctatgagaaggaatggagggtagaccgagaaaggctggcatagggggaggtttcccaggtagaagaagaagtgtcagcagaccaggtttctgcaggtaatggtggcagcagcctctcttacacaaacccagcagtggcagccacttctgccaacttgtaggggcacgtcgcccgctgagctgagtggccagccagtgccattccactccactcaggttcttcagggccagagcccctgcaccctgtttgggctggtgagctgggagttcaggtgggctgctcacagcctccttcagaggccccaccaatttctcggacacttctcagtgtgtggaagctcatgtgggcccctgagggctcatgcctgggaagtgttgtggtgggggctcccaggaggactggcccagagagccctgagatagcggggatcctgaactggactgaataaaacgtggtctcccactg

SEQ ID NO: 297878 - DNA, 1653 bp, Homo sapiens
ccgctccacctctcaagcagccagcgcctgcctgaatctgttctgccccctccccacccatttcaccaccaccatgacaccgggcacccagtctcctttcttcctgctgctgctcctcacagtgcttacagctaccacagcccctaaacccgcaacagttgttacaggttctggtcatgcaagctctaccccaggtggagaaaaggagacttcggctacccagagaagttcagtgcccagctctactgagaagaatgctgtgagtatgaccagcagcgtactctccagccacagccccggttcaggctcctccaccactcagggacaggatgtcactctggccccggccacggaaccagcttcaggttcagctgccacctggggacaggatgtcacctcggtcccagtcaccaggccagccctgggctccaccaccccgccagcccacgatgtcacctcagccccggacaacaagccagccccgggctccaccgcccccccagcccacggtgtcacctcggccccggacaccaggccggccccgggctccaccgcccccccagcccacggtgtcacctctcggcctcaggctctgcatcaggctcagcttctactctggtgcacaacggcacctctgccagggctaccacaaccccagccagcaagagcactccattctcaattcccagccaccactctgatactcctaccacccttgccagccatagcaccaagactgatgccagtagcactcaccatagcacggtacctcctctcacctcctccaatcacagcacttctccccagttgtctactggggtctctttctttttcctgtcttttcacatttcaaacctccagtttaattcctctctggaagatcccagcaccgactactaccaagagctgcagagagacatttctgaaatgtttttgcagatttataaacaagggggttttctgggcctctccaatattaagttcaggccaggatctgtggtggtacaattgactctggccttccgagaaggtaccatcaatgtccacgacgtggagacacagttcaatcagtataaaacggaagcagcctctcgatataacctgacgatctcagacgtcagcggctgtctgtcagtgccgccgaaagaactacgggcagctggacatctttccagcccgggatacctaccatcctatgagcgagtaccccacctaccacacccatgggcgctatgtgccccctagcagtaccgatcgtagcccctatgagaaggtttctgcaggtaatggtggcagcagcctctcttacacaaacccagcagtggcagccacttctgccaacttgtaggggcacgtcgcccgctgagctgagtggccagccagtgccattccactccactcaggttcttcagggccagagcccctgcaccctgtttgggctggtgagctgggagttcaggtgggctgctcacagcctccttcagaggccccaccaatttctcggacacttctcagtgtgtggaagctcatgtgggcccctgagggctcatgcctgggaagtgttgtggtgggggctcccaggaggactggcccagagagccctgagatagcggggatcctgaactggactgaataaaacgtggtctcccactg

SEQ ID NO: 297879 - DNA, 2252 bp, Homo sapiens
  misc_feature (2059)..(2060): n is a, c, g, or t
ccgctccacctctcaagcagccagcgcctgcctgaatctgttctgccccctccccacccatttcaccaccaccatgacaccgggcacccagtctcctttcttcctgctgctgctcctcacagtgcttacagctaccacagcccctaaacccgcaacagttgttacaggttctggtcatgcaagctctaccccaggtggagaaaaggagacttcggctacccagagaagttcagtgcccagctctactgagaagaatgctgtgagtatgaccagcagcgtactctccagccacagccccggttcaggctcctccaccactcagggacaggatgtcactctggccccggccacggaaccagcttcaggttcagctgccacctggggacaggatgtcacctcggtcccagtcaccaggccagccctgggctccaccaccccgccagcccacgatgtcacctcagccccggacaacaagccagccccgggctccaccgcccccccagcccacggtgtcacctcggccccggacaccaggccggccccgggctccaccgcccccccagcccacggtgtcacctctcggcctcaggctctgcatcaggctcagcttctactctggtgcacaacggcacctctgccagggctaccacaaccccagccagcaagagcactccattctcaattcccagccaccactctgatactcctaccacccttgccagccatagcaccaagactgatgccagtagcactcaccatagcacggtacctcctctcacctcctccaatcacagcacttctccccagttgtctactggggtctctttctttttcctgtcttttcacatttcaaacctccagtttaattcctctctggaagatcccagcaccgactactaccaagagctgcagagagacatttctgaaatgtttttgcagatttataaacaagggggttttctgggcctctccaatattaagttcaggccaggatctgtggtggtacaattgactctggccttccgagaaggtaccatcaatgtccacgacgtggagacacagttcaatcagtataaaacggaagcagcctctcgatataacctgacgatctcagacgtcagcgtgagtgatgtgccatttcctttctctgcccagtctggggctggggtgccaggctggggcatcgcgctgctggtgctggtctgtgttctggttgcgctggccattgtctatctcattgccttggctgtctgtcagtgccgccgaaagaactacgggcagctggacatctttccagcccgggatacctaccatcctatgagcgagtaccccacctaccacacccatgggcgctatgtgccccctagcagtaccgatcgtagcccctatgagaagagtggcagcagacgcaccaggtacgaggaaagcctgaggaccagggcggtggccgaggatgccccctcgacgcattatttcctccctgtcgcaagagggcgctgcgtccaggcactgagaggaagaaagaggagaacgcgaggagtagcaagtccgcgtggtgggtacgggcacctcgctggcgctctcctccctcctgtccctgctgctctttgctgggatgcagatgtacagccgtcagctggcctccaccgagtggctcaccatccagggcggcctgcttggttcgggtctcttcgtgttctcgctcactgccttcaataatctggagaatcttgtctttggcaaaggattccaagcaaagatcttccctgagattctcctgtgcctcctgttggctctctttgcatctggcctcatccaccgagtctgtgtcaccacctgcttcatcttctccatggttggtctgtactacatcaacaagatctcctccaccctgtaccaggcagcagctccagtcctcacaccagccaaggtcacaggcaagagcaagaagagaaactgaccctgaatgttcaataaagttgattctttgtagcacaaaaaaaaaaaaaaaaaaaaaaaaaaaaactttttgggcggcctgggcccggaaaagtttttnnaaaccccatccgtttgggggcgcggcccacgtggtttcgggacactgggcccaacgcggtcccaagggaaaccggctcacaggggttgggttctccccaataaaaaacccggggccacgggcgttttgacaatccgaggcgctctggggcttcgggtcttcacggaccaagagtgataatccccgggggggg

SEQ ID NO: 297880 - DNA, 1460 bp, Homo sapiens
ccgctccacctctcaagcagccagcgcctgcctgaatctgttctgccccctccccacccatttcaccaccaccatgacaccgggcacccagtctcctttcttcctgctgctgctcctcacagtgcttacagctaccacagcccctaaacccgcaacagttgttacaggttctggtcatgcaagctctaccccaggtggagaaaaggagacttcggctacccagagaagttcagtgcccagctctactgagaagaatgctgtgagtatgaccagcagcgtactctccagccacagccccggttcaggctcctccaccactcagggacaggatgtcactctggccccggccacggaaccagcttcaggttcagctgccacctggggacaggatgtcacctcggtcccagtcaccaggccagccctgggctccaccaccccgccagcccacgatgtcacctcagccccggacaacaagccagccccgggctccaccgcccccccagcccacggtgtcacctcggccccggacaccaggccggccccgggctccaccgcccccccagcccacggtgtcacctctcggcctcaggctctgcatcaggctcagcttctactctggtgcacaacggcacctctgccagggctaccacaaccccagccagcaagagcactccattctcaattcccagccaccactctgatactcctaccacccttgccagccatagcaccaagactgatgccagtagcactcaccatagcacggtacctcctctcacctcctccaatcacagcacttctccccagttgtctactggggtctctttctttttcctgtcttttcacatttcaaacctccagtttaattcctctctggaagatcccagcaccgactactaccaagagctgcagagagacatttctgaaatggctgtctgtcagtgccgccgaaagaactacgggcagctggacatctttccagcccgggatacctaccatcctatgagcgagtaccccacctaccacacccatgggcgctatgtgccccctagcagtaccgatcgtagcccctatgagaaggtttctgcaggtaatggtggcagcagcctctcttacacaaacccagcagtggcagccacttctgccaacttgtaggggcacgtcgcccgctgagctgagtggccagccagtgccattccactccactcaggttcttcagggccagagcccctgcaccctgtttgggctggtgagctgggagttcaggtgggctgctcacagcctccttcagaggccccaccaatttctcggacacttctcagtgtgtggaagctcatgtgggcccctgagggctcatgcctgggaagtgttgtggtgggggctcccaggaggactggcccagagagccctgagatagcggggatcctgaactggactgaataaaacgtggtctcccactg

SEQ ID NO: 297881 - DNA, 2101 bp, Homo sapiens
ccgctccacctctcaagcagccagcgcctgcctgaatctgttctgccccctccccacccatttcaccaccaccatgacaccgggcacccagtctcctttcttcctgctgctgctcctcacagtgcttacagctaccacagcccctaaacccgcaacagttgttacaggttctggtcatgcaagctctaccccaggtggagaaaaggagacttcggctacccagagaagttcagtgcccagctctactgagaagaatgctgtgagtatgaccagcagcgtactctccagccacagccccggttcaggctcctccaccactcagggacaggatgtcactctggccccggccacggaaccagcttcaggttcagctgccacctggggacaggatgtcacctcggtcccagtcaccaggccagccctgggctccaccaccccgccagcccacgatgtcacctcagccccggacaacaagccagccccgggctccaccgcccccccagcccacggtgtcacctcggccccggacaccaggccggccccgggctccaccgcccccccagcccacggtgtcacctctcggcctcaggctctgcatcaggctcagcttctactctggtgcacaacggcacctctgccagggctaccacaaccccagccagcaagagcactccattctcaattcccagccaccactctgatactcctaccacccttgccagccatagcaccaagactgatgccagtagcactcaccatagcacggtacctcctctcacctcctccaatcacagcacttctccccagttgtctactggggtctctttctttttcctgtcttttcacatttcaaacctccagtttaattcctctctggaagatcccagcaccgactactaccaagagctgcagagagacatttctgaaatgtttttgcagatttataaacaagggggttttctgggcctctccaatattaagttcaggccaggatctgtggtggtacaattgactctggccttccgagaaggtaccatcaatgtccacgacgtggagacacagttcaatcagtataaaacggaagcagcctctcgatataacctgacgatctcagacgtcagcgtgagtgatgtgccatttcctttctctgcccagtctggggctggggtgccaggctggggcatcgcgctgctggtgctggtctgtgttctggttgcgctggccattgtctatctcattgccttggctgtctgtcagtgccgccgaaagaactacgggcagctggacatctttccagcccgggatacctaccatcctatgagcgagtaccccacctaccacacccatgggcgctatgtgccccctagcagtaccgatcgtagcccctatgagaagagtggcagcagacgcaccaggtacgaggaaagcctgaggaccagggcggtggccgaggatgccccctcgacgcattatttcctccctgtcgcaagagggcgctgcgtccaggcactgagaggaagaaagaggagaacgcgaggagtagcaagtccgcgtggtgggtacgggcacctcgctggcgctctcctccctcctgtccctgctgctctttgctgggatgcagatgtacagccgtcagctggcctccaccgagtggctcaccatccagggcggcctgcttggttcgggtctcttcgtgttctcgctcactgtatcctccctgcagttggagggggcgggccacgtaggcatgtgcccttccccttccccacacagctctgtccccgttgcacaccctactccttaactccctcaaccaggccttcaataatctggagaatcttgtctttggcaaaggattccaagcaaagatcttccctgagattctcctgtgcctcctgttggctctctttgcatctggcctcatccaccgagtctgtgtcaccacctgcttcatcttctccatggttggtctgtactacatcaacaagatctcctccaccctgtaccaggcagcagctccagtcctcacaccagccaaggtcacaggcaagagcaagaagagaaactgaccctgaatgttcaataaagttgattctttgta

SEQ ID NO: 297882 - DNA, 1931 bp, Homo sapiens
ccgctccacctctcaagcagccagcgcctgcctgaatctgttctgccccctccccacccatttcaccaccaccatgacaccgggcacccagtctcctttcttcctgctgctgctcctcacagtgcttacagctaccacagcccctaaacccgcaacagttgttacaggttctggtcatgcaagctctaccccaggtggagaaaaggagacttcggctacccagagaagttcagtgcccagctctactgagaagaatgctgtgagtatgaccagcagcgtactctccagccacagccccggttcaggctcctccaccactcagggacaggatgtcactctggccccggccacggaaccagcttcaggttcagctgccacctggggacaggatgtcacctcggtcccagtcaccaggccagccctgggctccaccaccccgccagcccacgatgtcacctcagccccggacaacaagccagccccgggctccaccgcccccccagcccacggtgtcacctcggccccggacaccaggccggccccgggctccaccgcccccccagcccacggtgtcacctctcggcctcaggctctgcatcaggctcagcttctactctggtgcacaacggcacctctgccagggctaccacaaccccagccagcaagagcactccattctcaattcccagccaccactctgatactcctaccacccttgccagccatagcaccaagactgatgccagtagcactcaccatagcacggtacctcctctcacctcctccaatcacagcacttctccccagttgtctactggggtctctttctttttcctgtcttttcacatttcaaacctccagtttaattcctctctggaagatcccagcaccgactactaccaagagctgcagagagacatttctgaaatgtttttgcagatttataaacaagggggttttctgggcctctccaatattaagttcaggccaggatctgtggtggtacaattgactctggccttccgagaaggtaccatcaatgtccacgacgtggagacacagttcaatcagtataaaacggaagcagcctctcgatataacctgacgatctcagacgtcagcgtgagtgatgtgccatttcctttctctgcccagtctggggctggggtgccaggctggggcatcgcgctgctggtgctggtctgtgttctggttgcgctggccattgtctatctcattgccttggctgtctgtcagtgccgccgaaagaactacgggcagctggacatctttccagcccgggatacctaccatcctatgagcgagtaccccacctaccacacccatgggcgctatgtgccccctagcagtaccgatcgtagcccctatgagaagagtggcagcagacgcaccaggtacgaggaaagcctgaggaccagggcggtggccgaggatgccccctcgacgcattatttcctccctgtcgcaagagggcgctgcgtccaggcactgagaggaagaaagaggagaacgcgaggagtagcaagtccgcgtggtgggtacgggcacctcgctggcgctctcctccctcctgtccctgctgctctttgctgggatgcagatgtacagccgtcagctggcctccaccgagtggctcaccatccagggcggcctgcttggttcgggtctcttcgtgttctcgctcactgccttcaataatctggagaatcttgtctttggcaaaggattccaagcaaagatcttccctgagattctcctgtgcctcctgttggctctctttgcatctggcctcatccaccgagtctgtgtcaccacctgcttcatcttctccatggttggtctgtactacatcaacaagatctcctccaccctgtaccaggcagcagcaggaggagggggatcctcagagc

SEQ ID NO: 297883 - DNA, 639 bp, Homo sapiens
agtcgtgacgtggcacaaccctggcgctggggtgccaggctggggcatcgcgctgctggtgctggtctgtgttctggttgcgctggccattgtctatctcattgccttggctgtctgtcagtgccgccgaaagaactacgggcagctggacatctttccagcccgggatacctaccatcctatgagcgagtaccccacctaccacacccatgggcgctatgtgccccctagcagtaccgatcgtagcccctatgagaaggtttctgcaggtaatggtggcagcagcctctcttacacaaacccagcagtggcagccacttctgccaacttgtaggggcacgtcgcccgctgagctgagtggccagccagtgccattccactccactcaggttcttcagggccagagcccctgcaccctgtttgggctggtgagctgggagttcaggtgggctgctcacagcctccttcagaggccccaccaatttctcggacacttctcagtgtgtggaagctcatgtgggcccctgagggctcatgcctgggaagtgttgtggtgggggctcccaggaggactggcccagagagccctgagatagcggggatcctgaactggactgaataaaacgtggtctcccactg

SEQ ID NO: 297884 - DNA, 2391 bp, Homo sapiens
  misc_feature (2198)..(2199): n is a, c, g, or t
ccgctccacctctcaagcagccagcgcctgcctgaatctgttctgccccctccccacccatttcaccaccaccatgacaccgggcacccagtctcctttcttcctgctgctgctcctcacagtgcttacagctaccacagcccctaaacccgcaacagttgttacaggttctggtcatgcaagctctaccccaggtggagaaaaggagacttcggctacccagagaagttcagtgcccagctctactgagaagaatgctgtgagtatgaccagcagcgtactctccagccacagccccggttcaggctcctccaccactcagggacaggatgtcactctggccccggccacggaaccagcttcaggttcagctgccacctggggacaggatgtcacctcggtcccagtcaccaggccagccctgggctccaccaccccgccagcccacgatgtcacctcagccccggacaacaagccagccccgggctccaccgcccccccagcccacggtgtcacctcggccccggacaccaggccggccccgggctccaccgcccccccagcccacggtgtcacctctcggcctcaggctctgcatcaggctcagcttctactctggtgcacaacggcacctctgccagggctaccacaaccccagccagcaagagcactccattctcaattcccagccaccactctgatactcctaccacccttgccagccatagcaccaagactgatgccagtagcactcaccatagcacggtacctcctctcacctcctccaatcacagcacttctccccagttgtctactggggtctctttctttttcctgtcttttcacatttcaaacctccagtttaattcctctctggaagatcccagcaccgactactaccaagagctgcagagagacatttctgaaatgtttttgcagatttataaacaagggggttttctgggcctctccaatattaagttcaggccaggatctgtggtggtacaattgactctggccttccgagaaggtaccatcaatgtccacgacgtggagacacagttcaatcagtataaaacggaagcagcctctcgatataacctgacgatctcagacgtcagcgtgagtgatgtgccatttcctttctctgcccagtctggggctggggtgccaggctggggcatcgcgctgctggtgctggtctgtgttctggttgcgctggccattgtctatctcattgccttggctgtctgtcagtgccgccgaaagaactacgggcagctggacatctttccagcccgggatacctaccatcctatgagcgagtaccccacctaccacacccatgggcgctatgtgccccctagcagtaccgatcgtagcccctatgagaagagtggcagcagacgcaccaggtacgaggaaagcctgaggaccagggcggtggccgaggatgccccctcgacgcattatttcctccctgtcgcaagagggcgctgcgtccaggcactgagaggaagaaagaggagaacgcgaggagtagcaagtccgcgtggtgggtacgggcacctcgctggcgctctcctccctcctgtccctgctgctctttgctgggatgcagatgtacagccgtcagctggcctccaccgagtggctcaccatccagggcggcctgcttggttcgggtctcttcgtgttctcgctcactgccttcaataatctggagaatcttgtctttggcaaaggattccaagcaaagatcttccctgagaatgcttaggtgaaaggttgttaaggagaaatatatttactgaagctgtctgaagacagatgacgcttttcgattctgcaccttgtatagctcctggagttggagctggaagagaaggcctttgaaagcaagaaactttgttctcctgtgcctcctgttggctctctttgcatctggcctcatccaccgagtctgtgtcaccacctgcttcatcttctccatggttggtctgtactacatcaacaagatctcctccaccctgtaccaggcagcagctccagtcctcacaccagccaaggtcacaggcaagagcaagaagagaaactgaccctgaatgttcaataaagttgattctttgtagcacaaaaaaaaaaaaaaaaaaaaaaaaaaaaactttttgggcggcctgggcccggaaaagtttttnnaaaccccatccgtttgggggcgcggcccacgtggtttcgggacactgggcccaacgcggtcccaagggaaaccggctcacaggggttgggttctccccaataaaaaacccggggccacgggcgttttgacaatccgaggcgctctggggcttcgggtcttcacggaccaagagtgataatccccgggggggg

SEQ ID NO: 297885 - DNA, 885 bp, Homo sapiens
ccgctccacctctcaagcagccagcgcctgcctgaatctgttctgccccctccccacccatttcaccaccaccatgacaccgggcacccagtctcctttcttcctgctgctgctcctcacagtgcttacagttgttacaggttctggtcatgcaagctctaccccaggtggagaaaaggagacttcggctacccagagaagttcagtgcccagctctactgagaagaatgctttgtctactggggtctctttctttttcctgtcttttcacatttcaaacctccagtttaattcctctctggaagatcccagcaccgactactaccaagagctgcagagagacatttctgaaatggctgtctgtcagtgccgccgaaagaactacgggcagctggacatctttccagcccgggatacctaccatcctatgagcgagtaccccacctaccacacccatgggcgctatgtgccccctagcagtaccgatcgtagcccctatgagaaggtttctgcaggtaatggtggcagcagcctctcttacacaaacccagcagtggcagccacttctgccaacttgtaggggcacgtcgcccgctgagctgagtggccagccagtgccattccactccactcaggttcttcagggccagagcccctgcaccctgtttgggctggtgagctgggagttcaggtgggctgctcacagcctccttcagaggccccaccaatttctcggacacttctcagtgtgtggaagctcatgtgggcccctgagggctcatgcctgggaagtgttgtggtgggggctcccaggaggactggcccagagagccctgagatagcggggatcctgaactggactgaataaaacgtggtctcccactg

SEQ ID NO: 297886 - DNA, 1278 bp, Homo sapiens
ccgctccacctctcaagcagccagcgcctgcctgaatctgttctgccccctccccacccatttcaccaccaccatgacaccgggcacccagtctcctttcttcctgctgctgctcctcacagtgcttacagctaccacagcccctaaacccgcaacagttgttacaggttctggtcatgcaagctctaccccaggtggagaaaaggagacttcggctacccagagaagttcagtgcccagctctactgagaagaatgctgtgagtatgaccagcagcgtactctccagccacagccccggttcaggctcctccaccactcagggacaggatgtcactctggccccggccacggaaccagcttcaggttcagctgccacctggggacaggatgtcacctcggtcccagtcaccaggccagccctgggctccaccaccccgccagcccacgatgtcacctcagccccggacaacaagccagccccgggctccaccgcccccccagcccacggtgtcacctcggccccggacaccaggccggccccgggctccaccgcccccccagcccacggtgtcacctctcggcctcaggctctgcatcaggctcagcttctactctggtgcacaacggcacctctgccagggctaccacaaccccagccagcaagagcactccattctcaattcccagccaccactctgatactcctaccacccttgccagccatagcaccaagactgatgccagtagcactcaccatagcacggtacctcctctcacctcctccaatcacagcacttctccccagttgtctactggggtctctttctttttcctgtcttttcacatttcaaacctccagtttaattcctctctggaagatcccagcaccgactactaccaagagctgcagagagacatttctgaaatgtttttgcagatttataaacaagggggttttctgggcctctccaatattaagttcaggccaggatctgtggtggtacaattgactctggccttccgagaaggtaccatcaatgtccacgacgtggagacacagttcaatcagtataaaacggaagcagcctctcgatataacctgacgatctcagacgtcagcgtgctgtgattggaggaggtgagaggaggtaccgtgctatggtgagtgctactggcatcagtcttggtgctatggctggcaagggtggtaggagtatcagagtggtggctgggaattgagaatggagtgctcttgctggctggggttgtggtcgac

SEQ ID NO: 297887 - DNA, 1025 bp, Homo sapiens
ccgctccacctctcaagcagccagcgcctgcctgaatctgttctgccccctccccacccatttcaccaccaccatgacaccgggcacccagtctcctttcttcctgctgctgctcctcacagtgcttacagctaccacagcccctaaacccgcaacagttgttacaggttctggtcatgcaagctctaccccaggtggagaaaaggagacttcggctacccagagaagttcagtgcccagctctactgagaagaatgctgtgagtatgaccagcagcgtactctccagccacagccccggttcaggctcctccaccactcagggacaggatgtcactctggccccggccacggaaccagcttcaggttcagctgccacctggggacaggatgtcacctcggtcccagtcaccaggccagccctgggctccaccaccccgccagcccacgatgtcacctcagccccggacaacaagccagccccgggctccaccgcccccccagcccacggtgtcacctcggccccggacaccaggccggccccgggctccaccgcccccccagcccacggtgtcacctctcggcctcaggctctgcatcaggctcagcttctactctggtgcacaacggcacctctgccagggctaccacaaccccagccagcaagagcactccattctcaattcccagccaccactctgatactcctaccacccttgccagccatagcaccaagactgatgccagtagcactcaccatagcacggtacctcctctcacctcctccaatcacagcacttctccccagttgtctactggggtctctttctttttcctgtcttttcacatttcaaacctccagtttaattcctctctggaagatcccagcaccgactactaccaagagctgcagagagacatttctgaaatgtttttgcagatttataaacaagggggttttctgggcctctccaatattaagttcagccaggagctgtggtggcagaataagcgatcctctaatca

SEQ ID NO: 297888 - DNA, 793 bp, Homo sapiens
ccgctccacctctcaagcagccagcgcctgcctgaatctgttctgccccctccccacccatttcaccaccaccatgacaccgggcacccagtctcctttcttcctgctgctgctcctcacagtgcttacagctaccacagcccctaaacccgcaacagttgttacaggttctggtcatgcaagctctaccccaggtggagaaaaggagacttcggctacccagagaagttcagtgcccagctctactgagaagaatgctgtgagtatgaccagcagcgtactctccagccacagccccggttcaggctcctccaccactcagggacaggatgtcactctggccccggccacggaaccagcttcaggttcagctgccacctggggacaggatgtcacctcggtcccagtcaccaggccagccctgggctccaccaccccgccagcccacgatgtcacctcagccccggacaacaagccagccccgggctccaccgcccccccagcccacggtgtcacctcggccccggacaccaggccggccccgggctccaccgcccccccagcccacggtgtcacctgcgcccggcaggcccacggtgtcacctcggccccggacaccaggccggccccgtgtcaaatggaatgatagaaatgaagcagactccccacctactgtgctaactgggtatgcaacagtttaatgaaataccataagccttaggttggagactgtgatggaacagcgtagaggccatccgtttccaggccattctgagatccaagatgccaactc

SEQ ID NO: 297889 - DNA, 1923 bp, Homo sapiens
gcctccgcccggatggcaggcgggcggggccccagtccaggccttgagacccagaagggagcgaaggtttttgctgcgccaacgcagtgaccgaaggctccgctcacgcccggcctgatcctgcctgaagatggtgccactggtggctgtggtatcagggccccgtgcccagctctttgcctgcctgctcaggctgggcactcagcaggtcggcccccttcagctgcacaccggggccagccatgcggccaggaaccattatgaggtgctggtgctgggtgggggcagtggcggaatcaccatggctgcccgcatgaagaggaaagtgggtgcagagaatgtggccattgttgagcccagtgagagacatttctaccagccaatctggacactggtgggtgctggtgccaaacaattgtcctcatctggtcgtcccacggcaagtgtgattccatctggtgtagaatggatcaaagctagagtgactgagttgaacccagacaagaactgcattcacacagatgacgacgagaagatctcctaccgatatcttattattgctctcggaatccagctggactatgagaagattaaaggcctacctgaaggtttcgctcatcccaaaatagggtcgaattattcagttaagactgtagagaagacatggaaagctctgcaggacttcaaagagggcaatgccatcttcaccttcccaaatactccagtgaagtgtgctggagcccctcagaagatcatgtacttatcagaagcctacttcaggaagacagggaagcgatccaaggccaatatcattttcaacacttctcttggagccattttcggggttaagaagtatgcagatgccctgcaggagatcatccaggagcggaacctcactgttaactacaagaaaaacctcattgaagtccgagccgataaacaagaggctgtatttgagaacctggacaaaccaggagagacccaagtgatttcatatgaaatgcttcatgtcacacctccaatgagcccaccagatgtcctcaagaccagtcctgtggctgatgctgctggttgggtggatgtggataaagaaactctgcaacacaggaggtacccaaatgtgtttgggattggggactgcaccaaccttcctacgtcaaagaccgctgctgcagtagctgcccagtcaggaatacttgataggacaatttctgtaattatgaagaatcaaacaccaacaaagaagtatgatggctacacatcatgtccactggtgaccggctacaaccgtgtgattcttgctgagtttgactacaaagcagagccgctagaaaccttcccctttgatcaaagcaaagagcgcctttccatgtatctcatgaaagctgacctgatgcctttcctgtattggaatatgatgctaaggggttactggggaggaccagcgtttctgcgcaagttgtttcatctaggtatgagttaaggatggctcagcacttgctcatcttggatggcttctgggccaaaactgcagtcactgaatgaccaagagcagcacgaaggacttggaacctatccttgtaaagagttccttgatgggtaatggtgaccaaatgcctcccttttcagtacctttgaacagcaaccatgtgggctactcatgatgggcttgattctttgggaataataaaatgaaataatacttttattttctgaataaaagtttgtcactgattgtgaaaaatgagaaaattttatcttggctgatagggatgaaaagttccagcacttgggagaaaaatatggtggtggtgggctagcttatatgttatctactgtgagtattcagctgacagctggcataatttcacagagcctatttggattcactgaaaagggtcattccagggacaatattgtttc

SEQ ID NO: 297890 - DNA, 680 bp, Homo sapiens
  misc_feature (680)..(680): n is a, c, g, or t
gcctccgcccggatggcaggcgggcggggccccagtccaggccttgagacccagaagggagcgaaggtttttgctgcgccaacgcagtgaccgaaggctccgctcacgcccggcctgatcctgcctgaagatggtgccactggtggctgtggtatcagggccccgtgcccagctctttgcctgcctgctcaggctgggcactcagcaggtcggcccccttcagctgcacaccggggccagccatgcggccaggaaccattatgaggtgctggtgctgggtgggggcagtggcggaatcaccatggctgcccgcatgaagaggaaagtgggtgcagagaatgtggccattgttgagcccagtgagagacatttctaccagccaatctggacactggtgggtgctggtgccaaacaattgtcctcatctggtcgtcccacggcaagtgtgattccatctggtgtagaatggatcaaagctagagtgactgagttgaacccagacaagaactgcattcacacagatgacgacgagaagatctcctaccgatatcttattattgctctcggaatccagctggactatgagaagataaaggcctacctgaaggttcgctcatccccaggacttcgagggcaatgccatcttcacctcccctactccagtggagtgtgctgggccn

SEQ ID NO: 297891 - DNA, 522 bp, Homo sapiens
caggctcacacagcaagtctttgtcaaagcttaggaatggaagtaggttgtcccctcctagtcatgggatctctccaactcactagacaatcttgctttacgtgctgatgaacatgctctgtgagcagcctggcttccctttcagcatcctcctgactgaagtcgccccatctctcttgctgcaggtacatttttttgtgttatttcttacaggggttactggggaggaccagcgtttctgcgcaagttgtttcatctaggtatgagttaaggatggctcagcacttgctcatcttggatggcttctgggccaaaactgcagtcactgaatgaccaagagcagcacgaaggacttggaacctatccttgtaaagagttccttgatgggtaatggtgaccaaatgcctcccttttcagtacctttgaacagcaaccatgtgggctactcatgatgggcttgattctttgggaataataaaatgaaataatacttttattttctgaataaaagtttgtcactga

SEQ ID NO: 297892 - DNA, 711 bp, Homo sapiens
caggctcacacagcaagtctttgtcaaagcttaggaatggaagtaggttgtcccctcctagtcatgggatctctccaactcactagacaatcttgctttacgtgctgatgaacatgctctgtgagcagcctggcttccctttcagcatcctcctgactgaagtcgccccatctctcttgctgcaggtacatttttttgtgttatttcttacaggggttactggggaggaccagcgtttctgcgcaagttgtttcatctaggtatgagttaaggatggctcagcacttgctcatcttggatggcttctgggccaaaactgcagtcactgaatgaccaagagcagcacgaaggacttggaacctatccttgtaaagagttccttgatgggtaatggtgaccaaatgcctcccttttcagtacctttgaacagcaaccatgtgggctactcatgatgggcttgattctttgggaataataaaatgaaataatacttttattttctgaataaaagtttgtcactgattgtgaaaaatgagaaaattttatcttggctgatagggatgaaaagttccagcacttgggagaaaaatatggtggtggtgggctagcttatatgttatctactgtgagtattcagctgacagctggcataatttcacagagcctatttggattcactgaaaagggtcattccagggacaatattgtttc

SEQ ID NO: 297893 - DNA, 992 bp, Homo sapiens
gcctccgcccggatggcaggcgggcggggccccagtccaggccttgagacccagaagggagcgaaggtttttgctgcgccaacgcagtgaccgaaggctccgctcacgcccgggtaagaggcatccgcggccgatctttggccctgggccagcggagggagactgggcggggacagcgaccaccactgaggctgtttgttagcttaactcggtttccgcagctgggactccgcagacccggtgcgccgcgccccaaactttgcttcctcaactccggacacctgcagctcttgctgcccttgtctggaacccgggtcttgggactcttgcttccttctcagagtgtcagagcctcagggccgcggagaggccaacccgcgaggggtgcttaaaaaccgaagtatccgtggtcttggtgtgtggacgtttctggcgccttccacctgttgactgtcactcggcaccgtcctggagcgggagtgggtgctcggcgtccgggggccagggattgacacagtcatccaccgacactgcgcgtgggacagagggggcgctcgaggggtcggctgcagctgaaacctgaaggggagaggatttagggcacctgctgaacaggaattggtggaaagggagaaggggtcttctggtggaatctgggctcatttcctttcctcttcatctgtctcttttatttatcaaaattccaacctggctttttgctcaaagacgctgaacagagcccctggctttgcctgcgctgcccattgctataatgcagggctctgttccatttttgtgctgtgcacccctttggcatttctgggaaggctaaagactctcagaacaatacttttttttgagacagagtcttgctctgtcgcccaagctggagtgcagtggcgcgatctcggctcactgccacctccacctcccgggttcaagcgattctcctgcctcagcctgccgagtaactgggattacaggcgcagcac

SEQ ID NO: 297894 - DNA, 516 bp, Homo sapiens
tacccatgcccccctagcgggaggacaatttctgtaattatgaagaatcaatctctaacaaagaagtatgatggctacacatcatgtccactggtgaccggctacaaccgtgtgattcttgctgagtttgactacaaagcagagccgctagaaaccttcccctttgatcaaagcaaagagcgcctttccatgtatctcatgaaagctgacctgatgcctttcctgtattggaatatgatgctaaggtaagtgcactgcctggttcctggatgaggaaagggatttgtagcacatctccacccaaaggggatgcagcctcttttcttcattattagcagtgaccaagtgttctgtcttccatgctctaggcctgagccactgcacccagccactcttctgcattctaaaagctgatgacctcctttgacttttctaaacccatatgagagagaaatctgggtgtctacatcagtggtcctgaaccaagagtgatcttcctaccccttgctgccccag

SEQ ID NO: 297895 - DNA, 1734 bp, Homo sapiens
gcctccgcccggatggcaggcgggcggggccccagtccaggccttgagacccagaagggagcgaaggtttttgctgcgccaacgcagtgaccgaaggctccgctcacgcccggcctgatcctgcctgaagatggtgccactggtggctgtggtatcagggccccgtgcccagctctttgcctgcctgctcaggctgggcactcagcaggtcggcccccttcagctgcacaccggggccagccatgcggccaggaaccattatgaggtgctggtgctgggtgggggcagtggcggaatcaccatggctgcccgcatgaagaggaaagtgggtgcagagaatgtggccattgttgagcccagtgagagacatttctaccagccaatctggacactggtgggtgctggtgccaaacaattgtcctcatctggtcgtcccacggcaagtgtgattccatctggtgtagaatggatcaaagctagagtgactgagttgaacccagacaagaactgcattcacacagatgacgacgagaagatctcctaccgatatcttattattgctctcggaatccagctggactatgagaagattaaaggcctacctgaaggtttcgctcatcccaaaatagggtcgaattattcagttaagactgtagagaagacatggaaagctctgcaggacttcaaagagggcaatgccatcttcaccttcccaaatactccagtgaagtgtgctggagcccctcagaagatcatgtacttatcagaagcctacttcaggaagacagggaagcgatccaaggccaatatcattttcaacacttctcttggagccattttcggggttaagaagtatgcagatgccctgcaggagatcatccaggagcggaacctcactgttaactacaagaaaaacctcattgaagtccgagccgataaacaagaggctgtatttgagaacctggacaaaccaggagagacccaagtgatttcatatgaaatgcttcatgtcacacctccaatgagcccaccagatgtcctcaagaccagtcctgtggctgatgctgctggttgggtggatgtggataaagaaactctgcaacacaggaggtacccaaatgtgtttgggattggggactgcaccaaccttcctacgtcaaagaccgctgctgcagtagctgcccagtcaggaatacttgataggacaatttctgtaattatgaagaatcaaacaccaacaaagaagtatgatggctacacatcatgtccactggtgaccggctacaaccgtgtgattcttgctgagtttgactacaaagcagagccgctagaaaccttcccctttgatcaaagcaaagagcgcctttccatgtatctcatgaaagctgacctgatgcctttcctgtattggaatatgatgctaaggggttactggggaggaccagcgtttctgcgcaagttgtttcatctaggtatgagttaaggatggctcagcacttgctcatcttggatggcttctgggccaaaactgcagtcactgaatgaccaagagcagcacgaaggacttggaacctatccttgtaaagagttccttgatgggtaatggtgaccaaatgcctcccttttcagtacctttgaacagcaaccatgtgggctactcatgatgggcttgattctttgggaataataaaatgaaataatacttttattttctgaataaaagtttgtcactga

SEQ ID NO: 297896 - DNA, 1796 bp, Homo sapiens
ttctgtccggccagccgctggagtcgttaggtgccgccttgcttctgacgagccacacgtttgcttcttccctgtgttcccagctggagggacatgagtgtccctgggccgtcgtctccggacggggccctgacacggccaccctactgcctggaggccggggagccgacgcctgcctgatcctgcctgaagatggtgccactggtggctgtggtatcagggccccgtgcccagctctttgcctgcctgctcaggctgggcactcagcaggtcggcccccttcagctgcacaccggggccagccatgcggccaggaaccattatgaggtgctggtgctgggtgggggcagtggcggaatcaccatggctgcccgcatgaagaggaaagtgggtgcagagaatgtggccattgttgagcccagtgagagacatttctaccagccaatctggacactggtgggtgctggtgccaaacaattgtcctcatctggtcgtcccacggcaagtgtgattccatctggtgtagaatggatcaaagctagagtgactgagttgaacccagacaagaactgcattcacacagatgacgacgagaagatctcctaccgatatcttattattgctctcggaatccagctggactatgagaagattaaaggcctacctgaaggtttcgctcatcccaaaatagggtcgaattattcagttaagactgtagagaagacatggaaagctctgcaggacttcaaagagggcaatgccatcttcaccttcccaaatactccagtgaagtgtgctggagcccctcagaagatcatgtacttatcagaagcctacttcaggaagacagggaagcgatccaaggccaatatcattttcaacacttctcttggagccattttcggggttaagaagtatgcagatgccctgcaggagatcatccaggagcggaacctcactgttaactacaagaaaaacctcattgaagtccgagccgataaacaagaggctgtatttgagaacctggacaaaccaggagagacccaagtgatttcatatgaaatgcttcatgtcacacctccaatgagcccaccagatgtcctcaagaccagtcctgtggctgatgctgctggttgggtggatgtggataaagaaactctgcaacacaggaggtacccaaatgtgtttgggattggggactgcaccaaccttcctacgtcaaagaccgctgctgcagtagctgcccagtcaggaatacttgataggacaatttctgtaattatgaagaatcaaacaccaacaaagaagtatgatggctacacatcatgtccactggtgaccggctacaaccgtgtgattcttgctgagtttgactacaaagcagagccgctagaaaccttcccctttgatcaaagcaaagagcgcctttccatgtatctcatgaaagctgacctgatgcctttcctgtattggaatatgatgctaaggggttactggggaggaccagcgtttctgcgcaagttgtttcatctaggtatgagttaaggatggctcagcacttgctcatcttggatggcttctgggccaaaactgcagtcactgaatgaccaagagcagcacgaaggacttggaacctatccttgtaaagagttccttgatgggtaatggtgaccaaatgcctcccttttcagtacctttgaacagcaaccatgtgggctactcatgatgggcttgattctttgggaataataaaatgaaataatacttttattttctgaataaaagtttgtcactga

SEQ ID NO: 297897 - DNA, 1679 bp, Homo sapiens
taagaagcgcctttcgcctccctccatgattctgaggcctccccagccacatggtactcctgatcctgcctgaagatggtgccactggtggctgtggtatcagggccccgtgcccagctctttgcctgcctgctcaggctgggcactcagcaggtcggcccccttcagctgcacaccggggccagccatgcggccaggaaccattatgaggtgctggtgctgggtgggggcagtggcggaatcaccatggctgcccgcatgaagaggaaagtgggtgcagagaatgtggccattgttgagcccagtgagagacatttctaccagccaatctggacactggtgggtgctggtgccaaacaattgtcctcatctggtcgtcccacggcaagtgtgattccatctggtgtagaatggatcaaagctagagtgactgagttgaacccagacaagaactgcattcacacagatgacgacgagaagatctcctaccgatatcttattattgctctcggaatccagctggactatgagaagattaaaggcctacctgaaggtttcgctcatcccaaaatagggtcgaattattcagttaagactgtagagaagacatggaaagctctgcaggacttcaaagagggcaatgccatcttcaccttcccaaatactccagtgaagtgtgctggagcccctcagaagatcatgtacttatcagaagcctacttcaggaagacagggaagcgatccaaggccaatatcattttcaacacttctcttggagccattttcggggttaagaagtatgcagatgccctgcaggagatcatccaggagcggaacctcactgttaactacaagaaaaacctcattgaagtccgagccgataaacaagaggctgtatttgagaacctggacaaaccaggagagacccaagtgatttcatatgaaatgcttcatgtcacacctccaatgagcccaccagatgtcctcaagaccagtcctgtggctgatgctgctggttgggtggatgtggataaagaaactctgcaacacaggaggtacccaaatgtgtttgggattggggactgcaccaaccttcctacgtcaaagaccgctgctgcagtagctgcccagtcaggaatacttgataggacaatttctgtaattatgaagaatcaaacaccaacaaagaagtatgatggctacacatcatgtccactggtgaccggctacaaccgtgtgattcttgctgagtttgactacaaagcagagccgctagaaaccttcccctttgatcaaagcaaagagcgcctttccatgtatctcatgaaagctgacctgatgcctttcctgtattggaatatgatgctaaggggttactggggaggaccagcgtttctgcgcaagttgtttcatctaggtatgagttaaggatggctcagcacttgctcatcttggatggcttctgggccaaaactgcagtcactgaatgaccaagagcagcacgaaggacttggaacctatccttgtaaagagttccttgatgggtaatggtgaccaaatgcctcccttttcagtacctttgaacagcaaccatgtgggctactcatgatgggcttgattctttgggaataataaaatgaaataatacttttattttctgaataaaagtttgtcactga

SEQ ID NO: 297898 - DNA, 1768 bp, Homo sapiens
taagaagcgcctttcgcctccctccatgattctgaggcctccccagccacatggtacttgtatgcctagacagcgggcacagggcttgctggacacagaaggcaaggactcagagaatatccaccagatgaaagaatgactgcatgacctgatcctgcctgaagatggtgccactggtggctgtggtatcagggccccgtgcccagctctttgcctgcctgctcaggctgggcactcagcaggtcggcccccttcagctgcacaccggggccagccatgcggccaggaaccattatgaggtgctggtgctgggtgggggcagtggcggaatcaccatggctgcccgcatgaagaggaaagtgggtgcagagaatgtggccattgttgagcccagtgagagacatttctaccagccaatctggacactggtgggtgctggtgccaaacaattgtcctcatctggtcgtcccacggcaagtgtgattccatctggtgtagaatggatcaaagctagagtgactgagttgaacccagacaagaactgcattcacacagatgacgacgagaagatctcctaccgatatcttattattgctctcggaatccagctggactatgagaagattaaaggcctacctgaaggtttcgctcatcccaaaatagggtcgaattattcagttaagactgtagagaagacatggaaagctctgcaggacttcaaagagggcaatgccatcttcaccttcccaaatactccagtgaagtgtgctggagcccctcagaagatcatgtacttatcagaagcctacttcaggaagacagggaagcgatccaaggccaatatcattttcaacacttctcttggagccattttcggggttaagaagtatgcagatgccctgcaggagatcatccaggagcggaacctcactgttaactacaagaaaaacctcattgaagtccgagccgataaacaagaggctgtatttgagaacctggacaaaccaggagagacccaagtgatttcatatgaaatgcttcatgtcacacctccaatgagcccaccagatgtcctcaagaccagtcctgtggctgatgctgctggttgggtggatgtggataaagaaactctgcaacacaggaggtacccaaatgtgtttgggattggggactgcaccaaccttcctacgtcaaagaccgctgctgcagtagctgcccagtcaggaatacttgataggacaatttctgtaattatgaagaatcaaacaccaacaaagaagtatgatggctacacatcatgtccactggtgaccggctacaaccgtgtgattcttgctgagtttgactacaaagcagagccgctagaaaccttcccctttgatcaaagcaaagagcgcctttccatgtatctcatgaaagctgacctgatgcctttcctgtattggaatatgatgctaaggggttactggggaggaccagcgtttctgcgcaagttgtttcatctaggtatgagttaaggatggctcagcacttgctcatcttggatggcttctgggccaaaactgcagtcactgaatgaccaagagcagcacgaaggacttggaacctatccttgtaaagagttccttgatgggtaatggtgaccaaatgcctcccttttcagtacctttgaacagcaaccatgtgggctactcatgatgggcttgattctttgggaataataaaatgaaataatacttttattttctgaataaaagtttgtcactga

SEQ ID NO: 297899 - DNA, 1716 bp, Homo sapiens
gggcgcgcaaggggcgagtctgtccagccggcagcaccccaggccggatggacgcttgttcctggttctgtgccccgtgagcgctcaacgccctgcctgatcctgcctgaagatggtgccactggtggctgtggtatcagggccccgtgcccagctctttgcctgcctgctcaggctgggcactcagcaggtcggcccccttcagctgcacaccggggccagccatgcggccaggaaccattatgaggtgctggtgctgggtgggggcagtggcggaatcaccatggctgcccgcatgaagaggaaagtgggtgcagagaatgtggccattgttgagcccagtgagagacatttctaccagccaatctggacactggtgggtgctggtgccaaacaattgtcctcatctggtcgtcccacggcaagtgtgattccatctggtgtagaatggatcaaagctagagtgactgagttgaacccagacaagaactgcattcacacagatgacgacgagaagatctcctaccgatatcttattattgctctcggaatccagctggactatgagaagattaaaggcctacctgaaggtttcgctcatcccaaaatagggtcgaattattcagttaagactgtagagaagacatggaaagctctgcaggacttcaaagagggcaatgccatcttcaccttcccaaatactccagtgaagtgtgctggagcccctcagaagatcatgtacttatcagaagcctacttcaggaagacagggaagcgatccaaggccaatatcattttcaacacttctcttggagccattttcggggttaagaagtatgcagatgccctgcaggagatcatccaggagcggaacctcactgttaactacaagaaaaacctcattgaagtccgagccgataaacaagaggctgtatttgagaacctggacaaaccaggagagacccaagtgatttcatatgaaatgcttcatgtcacacctccaatgagcccaccagatgtcctcaagaccagtcctgtggctgatgctgctggttgggtggatgtggataaagaaactctgcaacacaggaggtacccaaatgtgtttgggattggggactgcaccaaccttcctacgtcaaagaccgctgctgcagtagctgcccagtcaggaatacttgataggacaatttctgtaattatgaagaatcaaacaccaacaaagaagtatgatggctacacatcatgtccactggtgaccggctacaaccgtgtgattcttgctgagtttgactacaaagcagagccgctagaaaccttcccctttgatcaaagcaaagagcgcctttccatgtatctcatgaaagctgacctgatgcctttcctgtattggaatatgatgctaaggggttactggggaggaccagcgtttctgcgcaagttgtttcatctaggtatgagttaaggatggctcagcacttgctcatcttggatggcttctgggccaaaactgcagtcactgaatgaccaagagcagcacgaaggacttggaacctatccttgtaaagagttccttgatgggtaatggtgaccaaatgcctcccttttcagtacctttgaacagcaaccatgtgggctactcatgatgggcttgattctttgggaataataaaatgaaataatacttttattttctgaataaaagtttgtcactga

SEQ ID NO: 297900 - DNA, 2410 bp, Homo sapiens
  misc_feature (2201)..(2201): n is a, c, g, or t
  misc_feature (2250)..(2250): n is a, c, g, or t
  misc_feature (2275)..(2275): n is a, c, g, or t
gcctccgcccggatggcaggcgggcggggccccagtccaggccttgagacccagaagggagcgaaggtttttgctgcgccaacgcagtgaccgaaggctccgctcacgcccggcctgatcctgcctgaagatggtgccactggtggctgtggtatcagggccccgtgcccagctctttgcctgcctgctcaggctgggcactcagcaggtcggcccccttcagctgcacaccggggccagccatgcggccaggaaccattatgaggtgctggtgctgggtgggggcagtggcggaatcaccatggctgcccgcatgaagaggaaagtgggtgcagagaatgtggccattgttgagcccagtgagagacatttctaccagccaatctggacactggtgggtgctggtgccaaacaattgtcctcatctggtcgtcccacggcaagtgtgattccatctggtgtagaatggatcaaagctagagtgactgagttgaacccagacaagaactgcattcacacagatgacgacgagaagatctcctaccgatatcttattattgctctcggaatccagctggactatgagaagattaaaggcctacctgaaggtttcgctcatcccaaaatagggtcgaattattcagttaagactgtagagaagacatggaaagctctgcaggacttcaaagagggcaatgccatcttcaccttcccaaatactccagtgaagtgtgctggagcccctcagaagatcatgtacttatcagaagcctacttcaggaagacagggaagcgatccaaggccaatatcattttcaacacttctcttggagccattttcggggttaagaagtatgcagatgccctgcaggagatcatccaggagcggaacctcactgttaactacaagaaaaacctcattgaagtccgagccgataaacaagaggctgtatttgagaacctggacaaaccaggagagacccaagtgatttcatatgaaatgcttcatgtcacacctccaatgagcccaccagatgtcctcaagaccagtcctgtggctgatgctgctggttgggtggatgtggataaagaaactctgcaacacaggaggtacccaaatgtgtttgggattggggactgcaccaaccttcctacgtcaaagaccgctgctgcagtagctgcccagtcaggaatacttgataggacaatttctgtaattatgaagaatcaaacaccaacaaagaagtatgatggctacacatcatgtccactggtgaccggctacaaccgtgtgattcttgctgagtttgactacaaagcagagccgctagaaaccttcccctttgatcaaagcaaagagcgcctttccatgtatctcatgaaagctgacctgatgcctttcctgtattggaatatgatgctaaggggttactggggaggaccagcgtttctgcgcaagttgtttcatctaggtatgagttaaggatggctcagcacttgctcatcttggatggcttctgggccaaaactgcagtcactgaatgaccaagagcagcacgaaggacttggaacctatccttgtaaagagttccttgatgggtaatggtgaccaaatgcctcccttttcagtacctttgaacagcaaccatgtgggctactcatgatgggcttgattctttgggaataataaaatgaaataatacttttaaaaaaaaaaaaagaaaaaaaaaaaaaaacaaaaaaaaaacaaaaaaaaaaaaaaacaaacgactacaaaacaaaacaaacaaaaaaacaaaaaaaagcatgtaggggcggggcgcgacgcgcgcgcccagaccaatagaatcagtctattcacacccaccaactctggtgtgggtgcagcgcgggagcgcgccacaaatgtgtgaagcaagcagcgagtgtgacacacacagtgtggtccccaaagagacaacctcgccgtcccgcaacgcgaatcggcgggagcgtggggtcgttcccctccccctacaaaaaaaaaaaaaacagcgcgcgcgcggggagagagacaaccacagactaacgtgtgtggttagagagacaaaacacaaacgtagaagtaacgtagggtggtagatctgaggcagagcatcactaggctgggtgttaggctatatatacccaacaagaaggacggagaacagatctcacaaggngacgaagacagcgtcgcagactaataacaataatagactcgcgctcccngccgatgcggagtgtgagttcaacnactatacacgataagaacgaataagaactacacagacggtcaacacagaatacagtagcagaacagaactgaggcatacggacataagcgaacacgaaccacaaacaacatcgaaaagaactagaaagacacaca

SEQ ID NO: 297901 - DNA, 1747 bp, Homo sapiens
agggagttttcccatgttccaggaggcagccagcttgtaactagcaagcattgctatgtttgtatttctgatacattttctaaaagagatcgcagaacaaagggtcctgactcaccaaggatacagcctgatcctgcctgaagatggtgccactggtggctgtggtatcagggccccgtgcccagctctttgcctgcctgctcaggctgggcactcagcaggtcggcccccttcagctgcacaccggggccagccatgcggccaggaaccattatgaggtgctggtgctgggtgggggcagtggcggaatcaccatggctgcccgcatgaagaggaaagtgggtgcagagaatgtggccattgttgagcccagtgagagacatttctaccagccaatctggacactggtgggtgctggtgccaaacaattgtcctcatctggtcgtcccacggcaagtgtgattccatctggtgtagaatggatcaaagctagagtgactgagttgaacccagacaagaactgcattcacacagatgacgacgagaagatctcctaccgatatcttattattgctctcggaatccagctggactatgagaagattaaaggcctacctgaaggtttcgctcatcccaaaatagggtcgaattattcagttaagactgtagagaagacatggaaagctctgcaggacttcaaagagggcaatgccatcttcaccttcccaaatactccagtgaagtgtgctggagcccctcagaagatcatgtacttatcagaagcctacttcaggaagacagggaagcgatccaaggccaatatcattttcaacacttctcttggagccattttcggggttaagaagtatgcagatgccctgcaggagatcatccaggagcggaacctcactgttaactacaagaaaaacctcattgaagtccgagccgataaacaagaggctgtatttgagaacctggacaaaccaggagagacccaagtgatttcatatgaaatgcttcatgtcacacctccaatgagcccaccagatgtcctcaagaccagtcctgtggctgatgctgctggttgggtggatgtggataaagaaactctgcaacacaggaggtacccaaatgtgtttgggattggggactgcaccaaccttcctacgtcaaagaccgctgctgcagtagctgcccagtcaggaatacttgataggacaatttctgtaattatgaagaatcaaacaccaacaaagaagtatgatggctacacatcatgtccactggtgaccggctacaaccgtgtgattcttgctgagtttgactacaaagcagagccgctagaaaccttcccctttgatcaaagcaaagagcgcctttccatgtatctcatgaaagctgacctgatgcctttcctgtattggaatatgatgctaaggggttactggggaggaccagcgtttctgcgcaagttgtttcatctaggtatgagttaaggatggctcagcacttgctcatcttggatggcttctgggccaaaactgcagtcactgaatgaccaagagcagcacgaaggacttggaacctatccttgtaaagagttccttgatgggtaatggtgaccaaatgcctcccttttcagtacctttgaacagcaaccatgtgggctactcatgatgggcttgattctttgggaataataaaatgaaataatacttttattttctgaataaaagtttgtcactga

SEQ ID NO: 297902 - DNA, 1762 bp, Homo sapiens
gcctccgcccggatggcaggcgggcggggccccagtccaggccttgagacccagaagggagcgaaggtttttgctgcgccaacgcagtgaccgaaggctccgctcacgcccggcctgatcctgcctgaagatggtgccactggtggctgtggtatcagggccccgtgcccagctctttgcctgcctgctcaggctgggcactcagcaggtcggcccccttcagctgcacaccggggccagccatgcggccaggaaccattatgaggtgctggtgctgggtgggggcagtggcggaatcaccatggctgcccgcatgaagaggaaagtgggtgcagagaatgtggccattgttgagcccagtgagagacatttctaccagccaatctggacactggtgggtgctggtgccaaacaattgtcctcatctggtcgtcccacggcaagtgtgattccatctggtgtagaatggatcaaagctagagtgactgagttgaacccagacaagaactgcattcacacagatgacgacgagaagatctcctaccgatatcttattattgctctcggaatccagctggactatgagaagattaaaggcctacctgaaggtttcgctcatcccaaaatagggtcgaattattcagttaagactgtagagaagacatggaaagctctgcaggacttcaaagagggcaatgccatcttcaccttcccaaatactccagtgaagtgtgctggagcccctcagaagatcatgtacttatcagaagcctacttcaggaagacagggaagcgatccaaggccaatatcattttcaacacttctcttggagccattttcggggttaagaagtatgcagatgccctgcaggagatcatccaggagcggaacctcactgttaactacaagaaaaacctcattgaagtccgagccgataaacaagaggctgtatttgagaacctggacaaaccaggagagacccaagtgatttcatatgaaatgcttcatgtcacacctccaatgagcccaccagatgtcctcaagaccagtcctgtggctgatgctgctggttgggtggatgtggataaagaaactctgcaacacaggaggtacccaaatgtgtttgggattggggactgcaccaaccttcctacgtcaaagaccgctgctgcagtagctgcccagtcaggaatacttgataggacaatttctgtaattatgaagaatcaaacaccaacaaagaagtatgatggctacacatcatgtccactggtgaccggctacaaccgtgtgattcttgctgagtttgactacaaagcagagccgctagaaaccttcccctttgatcaaagcaaagagcgcctttccatgtatctcatgaaagctgacctgatgcctttcctgtattggaatatgatgctaaggtacatttttttgtgttatttcttacaggggttactggggaggaccagcgtttctgcgcaagttgtttcatctaggtatgagttaaggatggctcagcacttgctcatcttggatggcttctgggccaaaactgcagtcactgaatgaccaagagcagcacgaaggacttggaacctatccttgtaaagagttccttgatgggtaatggtgaccaaatgcctcccttttcagtacctttgaacagcaaccatgtgggctactcatgatgggcttgattctttgggaataataaaatgaaataatacttttattttctgaataaaagtttgtcactga

SEQ ID NO: 297903 - DNA, 734 bp, Homo sapiens
atactgtcagcgttgctactgtcaggtggtgctgctgtcatggtggtgctgctgtctggtgatgctgctggttgggtggatgtggataaagaaactctgcaacacaggaggtacccaaatgtgtttgggattggggactgcaccaaccttcctacgtcaaagaccgctgctgcagtagctgcccagtcaggaatacttgataggacaatttctgtaattatgaagaatcaaacaccaacaaagaagtatgatggctacacatcatgtccactggtgaccggctacaaccgtgtgattcttgctgagtttgactacaaagcagagccgctagaaaccttcccctttgatcaaagcaaagagcgcctttccatgtatctcatgaaagctgacctgatgcctttcctgtattggaatatgatgctaaggggttactggggaggaccagcgtttctgcgcaagttgtttcatctaggtatgagttaaggatggctcagcacttgctcatcttggatggcttctgggccaaaactgcagtcactgaatgaccaagagcagcacgaaggacttggaacctatccttgtaaagagttccttgatgggtaatggtgaccaaatgcctcccttttcagtacctttgaacagcaaccatgtgggctactcatgatgggcttgattctttgggaataataaaatgaaataatacttttattttctgaataaaagtttgtcactga

SEQ ID NO: 297904 - DNA, 1006 bp, Homo sapiens
gcctccgcccggatggcaggcgggcggggccccagtccaggccttgagacccagaagggagcgaaggtttttgctgcgccaacgcagtgaccgaaggctccgctcacgcccggcctgatcctgcctgaagatggtgccactggtggctgtggtatcagggccccgtgcccagctctttgcctgcctgctcaggctgggcactcagcaggtcggcccccttcagctgcacaccggggccagccatgcggccaggaaccattatgaggtgctggtgctgggtgggggcagtggcggaatcaccatggctgcccgcatgaagaggaaagtgggtgcagagaatgtggccattgttgagcccagtgagagacatttctaccagccaatctggacactggtgggtgctggtgccaaacaattgtcctcatctggtcgtcccacggcaagtgtgattccatctggtgtagaatggatcaaagctagagtgactgagttgaacccagacaagaactgcattcacacagatgacgacgagaagatctcctaccgatatcttattattgctctcggaatccagctggactatgagaagattaaaggcctacctgaaggtttcgctcatcccaaaatagggtcgaattattcagttaagactgtagagaagacatggaaagctctgcaggacttcaaagagggcaatgccatcttcaccttcccaaatactccagtgaagtgtgctggagcccctcagaagatcatgtacttatcagaagcctacttcaggaaggtatgcttcctttctggggacagagatgagcagggcggacagtgctaattcactgattgcaagaattccattttatctctattgtaatcccttttttatctcggaatttttattacatgtgtacaaaattagttaactggaagtttataaaatataaaagaggagaaaatcactcatgatccaattgctttaataaagctgcagttttcaatttgacatggc

SEQ ID NO: 297905 - DNA, 3884 bp, Homo sapiens
agcggtgggtgtggaaaaagtatgtcggcaagtcagctggtttcccagtgcaggacgcgctgacagctcgagtgagcggactgcccaggacttcggaactagacgagttctgtagaaatcctgtcaaagaatatgaagaaaaacagagaaagattctgcaatagagagagagaatttgtatataaatttaaagtaggaagtcagtgcttagaactgagagtgccactcaaatttcctgttcaagagaatgccagtcatttgcatggacgtctgatgctgctgcacagtttaccgtgctttatagaaaaagacttaaaagaagctctgactcagtttatagaagaagaatccctcagcgattatgatagagatgctgaagcatccctggcagctgtgaaatcaggtgaagtagatttacatcagctggcgagtacatgggccaaagcttatgctgagaccacgttagagcatgcaaggcctgaagaacccagctgggatgaagattttgcagatgtgtaccatgacttaattcattctcctgcctctgaaactctcttaaatttggaacataattactttgttagtatctcagaactgattggtgaaagagatgtggagctgaaaaaattacgagagagacaaggtattgaaatggaaaaagtcatgcaggaattgggaaaatcactgacagatcaagatgtaaattcactggctgctcagcattttgaatcccagcaagacctagaaaataaatggtcgaatgaattaaaacaatcaactgccatccaaaaacaagagtatcaagaatgggtaataaaacttcaccaagacctaaaaaaccccaacaacagctcccttagtgaggaaattaaagttcagccaagtcagttcagagaatctgtagaagcaattggaaggatttatgaggaacagagaaagttagaagaaagttttaccattcacttaggagcccagttgaagaccatgcataatttgagattgctgagagcagatatgctggacttctgtaagcataaaagaaatcatcgaagtggtgtgaaacttcatcggctccaaacagctctgtcactttattctacatctctctgtggcctggttttactagtagataatcgaattaattcatatagtggtattaaaagagattttgccacagtttgccaagaatgcactgacttccatttcccccgaattgaagagcaattagaagttgtccaacaggtggtactttatgctagaacccagcgcaggagtaaattgaaagaatcacttgattctggaaaccaaaatggaggaaatgatgataagactaagaatgctgagaggaactatttaaatgttttacctggggaattttatattacacggcattctaatctctcagaaatccatgttgctttccatctctgtgtggatgaccatgtgaaatcgggaaacatcactgctcgtgatcctgccattatgggactccgaaatatactcaaagtttgctgtacccatgacatcacaacaataagcattcctctcttgctggtacatgatatgtcagaggaaatgactataccctggtgcttaaggagagcggaacttgtgttcaagtgtgtcaaaggtttcatgatggaaatggcttcatgggatggaggaatttctaggacagtgcaatttctagtaccacagagtatttctgaagaaatgttttatcaacttagtaacatgcttccccagatcttccgagtatcatcaacactcactctgacatccaagcactaaacccttatagattgacatgctggcagaagatgattgttaaactctccaggaacttgtgctatgctgggaatctgtcaagcaaaagatgcccagaaagagaacttgcagctcaatccacaaatcaagatacatgtgtgtgaaaccattccaaaaatttatatactgcacaaactggtgatcaacccctaacttaaacacttaaagtctctttatgaatttctctttttttcttctctgtgttacctgtgaatattagtaatctaaaactttttatttatcacacatggacacttgggaaaggaaacttgattatatttacatggaggcatttgactttttcaagaggcttgactcgtctcaggtgcaatccttaattaaacatacaaacaaaattttccttttactttctttgccaaaacaaaatgtaaaagcactgaaatatacattgcaagtacaaatttcctgtgaaaatctttttatagaaacacaaatgtataagacaaatgtgcttgttcttttaaattctcctgtttcagaatctctttttaatctactcctaaggatgtacaagttagagtcagaagacgttttggattttttccctctctctcatcctcccgctgtgcccttgcacttgcatattaataacatttcatggactgggaaatagtgttcttttttgcaagcttgatgtcaagttagtctaaaccagcacctggcagtattttagtgctcatcaacattgtgacaatcacacaaggaagatcatttctacatttctgtcctccctgcgttctcagcttgcttaaccattcctctacctcttgcatttttttgcggataaatgtatccccatttctgcttctctgtttcccctccttttccattgtttttccttatggtactactttctcaggtgctacatatcatatatttgtcccatctataacatatttaaatgctataagtagtaactccattaaacaaaggcatttacaaaagcacacaggtgtttagaaaagcaatagtttcatcaattccaagttatgtggatattgtaactggccacaagaatgaaatggagggcatttggtgtcataagatggcatgtcttgatgacaagaaacaaaacgcccttcattaatatgcctcagtgtaataactattatagaaactgttggcaagcagagtgctttcctataacagaatgtgtcttaattttctactcgagggaaaggtttgtccaggtaacaacactaaagacaaccctaagaacacccactccagcagtatgtccattagacactaaaactctccaaattatttgtcagggagcctggcgattctgccaagaaggcaggtgttttgcccttagagcctatacagttctcttggagaaattgtctttcaggcaccactgttaatcactgagactgattctaatgcaaagcagggaagacagaggcagaaaccaggagagtggtagatcagtgcagcccagatatcggaatggaggagcaaagtttcattcacggatgtttgttgaatgctgctgcccaactcttcctttgtcacctctaggctattccactaagttacttataaactggtggctttaactgagggctgtgtaaaggtactatttggcatgtgaagtcaggataaatttatcgaatgtccgttttccacatgcaactgtgttacagaagtagtaaaattggaagaatcatgtttatggtgttaccactgatggaaacacacaaacaccaagctaataataaatatataacttaaaaagctaattatatgcactgaaatggtgggaattttagtgatgcagtaattgaggagtctggagttttgtatttggaccaagaattatgagatgaggatctttttctgagtgttctaaagggcttcttgagggggagtggtttaaagcacttcatgaatgatgtgaagaaggtaccttgggctgagacagcattctaggtacagatggcactctgttcaaccaactgtggatggaaaatattctgaaaaaaaatacaataaaaattttaaaaatacaatataacatctgtttacatggc

SEQ ID NO: 297906 - DNA, 4056 bp, Homo sapiens
agcggtgggtgtggaaaaagtatgtcggcaagtcagctggtttcccagtgcaggacgcgctgacagctcgagtgagcggactgcccaggacttcggaactagacgagttctgtagaaatcctgtcaaagaatatgaagaaaaacagagaaagattctgcaatagagagagagaatttgtatataaatttaaagtaggaagtcagtgcttagaactgagagtgccactcaaatttcctgttcaagagaatgccagtcatttgcatggacgtctgatgctgctgcacagtttaccgtgctttatagaaaaagacttaaaagaagctctgactcagtttatagaagaagaatccctcagcgattatgatagagatgctgaagcatccctggcagctgtgaaatcaggtgaagtagatttacatcagctggcgagtacatgggccaaagcttatgctgagaccacgttagagcatgcaaggcctgaagaacccagctgggatgaagattttgcagatgtgtaccatgacttaattcattctcctgcctctgaaactctcttaaatttggaacataattactttgttagtatctcagaactgattggtgaaagagatgtggagctgaaaaaattacgagagagacaaggtattgaaatggaaaaagtcatgcaggaattgggaaaatcactgacagatcaagatgtaaattcactggctgctcagcattttgaatcccagcaagacctagaaaataaatggtcgaatgaattaaaacaatcaactgccatccaaaaacaagagtatcaagaatgggtaataaaacttcaccaagacctaaaaaaccccaacaacagctcccttagtgaggaaattaaagttcagccaagtcagttcagagaatctgtagaagcaattggaaggatttatgaggaacagagaaagttagaagaaagttttaccattcacttaggagcccagttgaagaccatgcataatttgagattgctgagagcagatatgctggacttctgtaagcataaaagaaatcatcgaagtggtgtgaaacttcatcggctccaaacagctctgtcactttattctacatctctctgtggcctggttttactagtagataatcgaattaattcatatagtggtattaaaagagattttgccacagtttgccaagaatgcactgacttccatttcccccgaattgaagagcaattagaagttgtccaacaggtggtactttatgctagaacccagcgcaggagtaaattgaaagaatcacttgattctggaaaccaaaatggaggaaatgatgataagactaagaatgctgagaggaactatttaaatgttttacctggaactacagaaaatacaagctgatgagatttttcttggcttgtagagctacacagaaaaaagagtgatggtaggaagcatggattttaatgtttgagaaagactgctccagcgttcagccttaaatactcattcattcaacaaatacttatcgagtaccttctacgtgccaggggaattttatattacacggcattctaatctctcagaaatccatgttgctttccatctctgtgtggatgaccatgtgaaatcgggaaacatcactgctcgtgatcctgccattatgggactccgaaatatactcaaagtttgctgtacccatgacatcacaacaataagcattcctctcttgctggtacatgatatgtcagaggaaatgactataccctggtgcttaaggagagcggaacttgtgttcaagtgtgtcaaaggtttcatgatggaaatggcttcatgggatggaggaatttctaggacagtgcaatttctagtaccacagagtatttctgaagaaatgttttatcaacttagtaacatgcttccccagatcttccgagtatcatcaacactcactctgacatccaagcactaaacccttatagattgacatgctggcagaagatgattgttaaactctccaggaacttgtgctatgctgggaatctgtcaagcaaaagatgcccagaaagagaacttgcagctcaatccacaaatcaagatacatgtgtgtgaaaccattccaaaaatttatatactgcacaaactggtgatcaacccctaacttaaacacttaaagtctctttatgaatttctctttttttcttctctgtgttacctgtgaatattagtaatctaaaactttttatttatcacacatggacacttgggaaaggaaacttgattatatttacatggaggcatttgactttttcaagaggcttgactcgtctcaggtgcaatccttaattaaacatacaaacaaaattttccttttactttctttgccaaaacaaaatgtaaaagcactgaaatatacattgcaagtacaaatttcctgtgaaaatctttttatagaaacacaaatgtataagacaaatgtgcttgttcttttaaattctcctgtttcagaatctctttttaatctactcctaaggatgtacaagttagagtcagaagacgttttggattttttccctctctctcatcctcccgctgtgcccttgcacttgcatattaataacatttcatggactgggaaatagtgttcttttttgcaagcttgatgtcaagttagtctaaaccagcacctggcagtattttagtgctcatcaacattgtgacaatcacacaaggaagatcatttctacatttctgtcctccctgcgttctcagcttgcttaaccattcctctacctcttgcatttttttgcggataaatgtatccccatttctgcttctctgtttcccctccttttccattgtttttccttatggtactactttctcaggtgctacatatcatatatttgtcccatctataacatatttaaatgctataagtagtaactccattaaacaaaggcatttacaaaagcacacaggtgtttagaaaagcaatagtttcatcaattccaagttatgtggatattgtaactggccacaagaatgaaatggagggcatttggtgtcataagatggcatgtcttgatgacaagaaacaaaacgcccttcattaatatgcctcagtgtaataactattatagaaactgttggcaagcagagtgctttcctataacagaatgtgtcttaattttctactcgagggaaaggtttgtccaggtaacaacactaaagacaaccctaagaacacccactccagcagtatgtccattagacactaaaactctccaaattatttgtcagggagcctggcgattctgccaagaaggcaggtgttttgcccttagagcctatacagttctcttggagaaattgtctttcaggcaccactgttaatcactgagactgattctaatgcaaagcagggaagacagaggcagaaaccaggagagtggtagatcagtgcagcccagatatcggaatggaggagcaaagtttcattcacggatgtttgttgaatgctgctgcccaactcttcctttgtcacctctaggctattccactaagttacttataaactggtggctttaactgagggctgtgtaaaggtactatttggcatgtgaagtcaggataaatttatcgaatgtccgttttccacatgcaactgtgttacagaagtagtaaaattggaagaatcatgtttatggtgttaccactgatggaaacacacaaacaccaagctaataataaatatataacttaaaaagctaattatatgcactgaaatggtgggaattttagtgatgcagtaattgaggagtctggagttttgtatttggaccaagaattatgagatgaggatctttttctgagtgttctaaagggcttcttgagggggagtggtttaaagcacttcatgaatgatgtgaagaaggtaccttgggctgagacagcattctaggtacagatggcactctgttcaaccaactgtggatggaaaatattctgaaaaaaaatacaataaaaattttaaaaatacaatataacatctgtttacatggc

SEQ ID NO: 297907 - DNA, 3569 bp, Homo sapiens
agcggtgggtgtggaaaaagtatgtcggcaagtcagctggtttcccagtgcaggacgcgctgacagctcgagtgagcggactgcccaggacttcggaactagacgagttctgtagaaatcctgtcaaagaatatgaagaaaaacagagaaagattctgcaatagagagagagaatttgtatataaatttaaagtaggaagtcagtgcttagaactgagagtgccactcaaatttcctgttcaagagaatgccagtcatttgcatggacgtctgatgctgctgcacagtttaccgtgctttatagaaaaagacttaaaagaagctctgactcagtttatagaagaagaatccctcagcgattatgatagagatgctgaagcatccctggcagctgtgaaatcaggtgaagtagatttacatcagctggcgagtacatgggccaaagcttatgctgagaccacgttagagcatgcaaggcctgaagaacccagctgggatgaagattttgcagatgtgtaccatgacttaattcattctcctgcctctgaaactctcttaaatttggaacataattactttgttagtatctcagaactgattggtgaaagagatgtggagctgaaaaaattacgagagagacaaggtattgaaatggaaaaagtcatgcaggaattgggaaaatcactgacagatcaagatgtaaattcactggctgctcagcattttgaatcccagcaagacctagaaaataaatggtcgaatgaattaaaacaatcaactgccatccaaaaacaagagtatcaagaatgggtaataaaacttcaccaagacctaaaaaaccccaacaacagctcccttagtgaggaaattaaagttcagccaagtcagttcagagaatctgtagaagcaattggaaggatttatgaggaacagagaaagttagaagaaagttttaccattcacttaggagcccagttgaagaccatgcataatttgagattgctgagagcagatatgctggacttctgtaagcataaaagaaatcatcgaagtggtgtgaaacttcatcggctccaaacagctctgtcactttattctacatctctctgtggcctggttttactagtagataatcgaattaattcatatagtggtattaaaagagattttgccacagtttgccaagaatgcactgacttccatttcccccgaattgaagagcaattagaagttgtccaacaggtggtactttatgctagaacccagcgcaggagtaaattgaaagaatcacttgattctggaaaccaaaatggaggaaatgatgataagactaagaatgctgagaggaactatttaaatgttttacctggggaattttatattacacggcattctaatctctcagaaatccatgttgctttccatctctgtgtggatgaccatgtgaaatcgggaaacatcactgctcgtgatcctgccattatgggactccgaaatatactcaaagtttgctgtacccatgacatcacaacaataagcattcctctcttgctggtacatgatatgtcagaggaaatgactataccctggtgcttaaggagagcggaacttgtgttcaagtgtgtcaaaggtttcatgatggaaatggcttcatgggatggaggaatttctaggacagtgcaatttctagtaccacagagtatttctgaagaaatgttttatcaacttagtaacatgcttccccagatcttccgagtatcatcaacactcactctgacatccaagcactaaacccttatagattgacatgctggcagaagatgattgttaaactctccaggaacttgtgctatgctgggaatctgtcaagcaaaagatgcccagaaagagaacttgcagctcaatccacaaatcaagatacatgtgtgtgaaaccattccaaaaatttatatactgcacaaactggtgatcaacccctaacttaaacacttaaagtctctttatgaatttctctttttttcttctctgtgttacctgtgaatattagtaatctaaaactttttatttatcacacatggacacttgggaaaggaaacttgattatatttacatggaggcatttgactttttcaagaggcttgactcgtctcaggtgcaatccttaattaaacatacaaacaaaattttccttttactttctttgccaaaacaaaatgtaaaagcactgaaatatacattgcaagtacaaatttcctgtgaaaatctttttatagaaacacaaatgtataagacaaatgtgcttgttcttttaaattctcctgtttcagaatctctttttaatctactcctaaggatgtacaagttagagtcagaagacgttttggattttttccctctctctcatcctcccgctgtgcccttgcacttgcatattaataacatttcatggactgggaaatagtgttcttttttgcaagcttgatgtcaagttagtctaaaccagcacctggcagtattttagtgctcatcaacattgtgacaatcacacaaggaagatcatttctacatttctgtcctccctgcgttctcagcttgcttaaccattcctctacctcttgcatttttttgcggataaatgtatccccatttctgcttctctgtttcccctccttttccattgtttttccttatggtactactttctcaggtgctacatatcatatatttgtcccatctataacatatttaaatgctataagtagtaactccattaaacaaaggcatttacaaaagcacacaggtgtttagaaaagcaatagtttcatcaattccaagttatgtggatattgtaactggccacaagaatgaaatggagggcatttggtgtcataagatggcatgtcttgatgacaagaaacaaaacgcccttcattaatatgcctcagtgtaataactattatagaaactgttggcaagcagagtgctttcctataacagaatgtgtcttaattttctactcgagggaaaggtttgtccaggtaacaacactaaagacaaccctaagaacacccactccagcagtatgtccattagacactaaaactctccaaattatttgtcagggagcctggcgattctgccaagaaggcaggtgttttgcccttagagcctatacagttctcttggagaaattgtctttcaggcaccactgttaatcactgagactgattctaatgcaaagcagggaagacagaggcagaaaccaggagagtggtagatcagtgcagcccagatatcggaatggaggagcaaagtttcattcacggatgtttgttgaatgctgctgcccaactcttcctttgtcacctctaggctattccactaagttacttataaactggtggctttaactgagggctgtgtaaaggtactatttggcatgagcagggtccgtggagtggtgggagcagaagtcagtggcagcgctcgaggggtgagcaggcgtgaggaagtgcaggcagagtgatggcatctccccggctgctcttttacccacactggcaccacgc

SEQ ID NO: 297908 - DNA, 3681 bp, Homo sapiens
agcggtgggtgtggaaaaagtatgtcggcaagtcagctggtttcccagtgcaggacgcgctgacagctcgagtgagcggactgcccaggacttcggaactagacgagacttaaaagaagctctgactcagtttatagaagaagaatccctcagcgattatgatagagatgctgaagcatccctggcagctgtgaaatcaggtgaagtagatttacatcagctggcgagtacatgggccaaagcttatgctgagaccacgttagagcatgcaaggcctgaagaacccagctgggatgaagattttgcagatgtgtaccatgacttaattcattctcctgcctctgaaactctcttaaatttggaacataattactttgttagtatctcagaactgattggtgaaagagatgtggagctgaaaaaattacgagagagacaaggtattgaaatggaaaaagtcatgcaggaattgggaaaatcactgacagatcaagatgtaaattcactggctgctcagcattttgaatcccagcaagacctagaaaataaatggtcgaatgaattaaaacaatcaactgccatccaaaaacaagagtatcaagaatgggtaataaaacttcaccaagacctaaaaaaccccaacaacagctcccttagtgaggaaattaaagttcagccaagtcagttcagagaatctgtagaagcaattggaaggatttatgaggaacagagaaagttagaagaaagttttaccattcacttaggagcccagttgaagaccatgcataatttgagattgctgagagcagatatgctggacttctgtaagcataaaagaaatcatcgaagtggtgtgaaacttcatcggctccaaacagctctgtcactttattctacatctctctgtggcctggttttactagtagataatcgaattaattcatatagtggtattaaaagagattttgccacagtttgccaagaatgcactgacttccatttcccccgaattgaagagcaattagaagttgtccaacaggtggtactttatgctagaacccagcgcaggagtaaattgaaagaatcacttgattctggaaaccaaaatggaggaaatgatgataagactaagaatgctgagaggaactatttaaatgttttacctggggaattttatattacacggcattctaatctctcagaaatccatgttgctttccatctctgtgtggatgaccatgtgaaatcgggaaacatcactgctcgtgatcctgccattatgggactccgaaatatactcaaagtttgctgtacccatgacatcacaacaataagcattcctctcttgctggtacatgatatgtcagaggaaatgactataccctggtgcttaaggagagcggaacttgtgttcaagtgtgtcaaaggtttcatgatggaaatggcttcatgggatggaggaatttctaggacagtgcaatttctagtaccacagagtatttctgaagaaatgttttatcaacttagtaacatgcttccccagatcttccgagtatcatcaacactcactctgacatccaagcactaaacccttatagattgacatgctggcagaagatgattgttaaactctccaggaacttgtgctatgctgggaatctgtcaagcaaaagatgcccagaaagagaacttgcagctcaatccacaaatcaagatacatgtgtgtgaaaccattccaaaaatttatatactgcacaaactggtgatcaacccctaacttaaacacttaaagtctctttatgaatttctctttttttcttctctgtgttacctgtgaatattagtaatctaaaactttttatttatcacacatggacacttgggaaaggaaacttgattatatttacatggaggcatttgactttttcaagaggcttgactcgtctcaggtgcaatccttaattaaacatacaaacaaaattttccttttactttctttgccaaaacaaaatgtaaaagcactgaaatatacattgcaagtacaaatttcctgtgaaaatctttttatagaaacacaaatgtataagacaaatgtgcttgttcttttaaattctcctgtttcagaatctctttttaatctactcctaaggatgtacaagttagagtcagaagacgttttggattttttccctctctctcatcctcccgctgtgcccttgcacttgcatattaataacatttcatggactgggaaatagtgttcttttttgcaagcttgatgtcaagttagtctaaaccagcacctggcagtattttagtgctcatcaacattgtgacaatcacacaaggaagatcatttctacatttctgtcctccctgcgttctcagcttgcttaaccattcctctacctcttgcatttttttgcggataaatgtatccccatttctgcttctctgtttcccctccttttccattgtttttccttatggtactactttctcaggtgctacatatcatatatttgtcccatctataacatatttaaatgctataagtagtaactccattaaacaaaggcatttacaaaagcacacaggtgtttagaaaagcaatagtttcatcaattccaagttatgtggatattgtaactggccacaagaatgaaatggagggcatttggtgtcataagatggcatgtcttgatgacaagaaacaaaacgcccttcattaatatgcctcagtgtaataactattatagaaactgttggcaagcagagtgctttcctataacagaatgtgtcttaattttctactcgagggaaaggtttgtccaggtaacaacactaaagacaaccctaagaacacccactccagcagtatgtccattagacactaaaactctccaaattatttgtcagggagcctggcgattctgccaagaaggcaggtgttttgcccttagagcctatacagttctcttggagaaattgtctttcaggcaccactgttaatcactgagactgattctaatgcaaagcagggaagacagaggcagaaaccaggagagtggtagatcagtgcagcccagatatcggaatggaggagcaaagtttcattcacggatgtttgttgaatgctgctgcccaactcttcctttgtcacctctaggctattccactaagttacttataaactggtggctttaactgagggctgtgtaaaggtactatttggcatgtgaagtcaggataaatttatcgaatgtccgttttccacatgcaactgtgttacagaagtagtaaaattggaagaatcatgtttatggtgttaccactgatggaaacacacaaacaccaagctaataataaatatataacttaaaaagctaattatatgcactgaaatggtgggaattttagtgatgcagtaattgaggagtctggagttttgtatttggaccaagaattatgagatgaggatctttttctgagtgttctaaagggcttcttgagggggagtggtttaaagcacttcatgaatgatgtgaagaaggtaccttgggctgagacagcattctaggtacagatggcactctgttcaaccaactgtggatggaaaatattctgaaaaaaaatacaataaaaattttaaaaatacaatataacatctgtttacatggc

SEQ ID NO: 297909 - DNA, 3392 bp, Homo sapiens
agcggtgggtgtggaaaaagtatgtcggcaagtcagctggtttcccagtgcaggacgcgctgacagctcgagtgagcggactgcccaggacttcggaactagacgagacttaaaagaagctctgactcagtttatagaagaagaatccctcagcgattatgatagagatgctgaagcatccctggcagctgtgaaatcaggtgaagtagatttacatcagctggcgagtacatgggccaaagcttatgctgagacaaggtattgaaatggaaaaagtcatgcaggaattgggaaaatcactgacagatcaagatgtaaattcactggctgctcagcattttgaatcccagcaagacctagaaaataaatggtcgaatgaattaaaacaatcaactgccatccaaaaacaagagtatcaagaatgggtaataaaacttcaccaagacctaaaaaaccccaacaacagctcccttaggagcccagttgaagaccatgcataatttgagattgctgagagcagatatgctggacttctgtaagcataaaagaaatcatcgaagtggtgtgaaacttcatcggctccaaacagctctgtcactttattctacatctctctgtggcctggttttactagtagataatcgaattaattcatatagtggtattaaaagagattttgccacagtttgccaagaatgcactgacttccatttcccccgaattgaagagcaattagaagttgtccaacaggtggtactttatgctagaacccagcgcaggagtaaattgaaagaatcacttgattctggaaaccaaaatggaggaaatgatgataagactaagaatgctgagaggaactatttaaatgttttacctggggaattttatattacacggcattctaatctctcagaaatccatgttgctttccatctctgtgtggatgaccatgtgaaatcgggaaacatcactgctcgtgatcctgccattatgggactccgaaatatactcaaagtttgctgtacccatgacatcacaacaataagcattcctctcttgctggtacatgatatgtcagaggaaatgactataccctggtgcttaaggagagcggaacttgtgttcaagtgtgtcaaaggtttcatgatggaaatggcttcatgggatggaggaatttctaggacagtgcaatttctagtaccacagagtatttctgaagaaatgttttatcaacttagtaacatgcttccccagatcttccgagtatcatcaacactcactctgacatccaagcactaaacccttatagattgacatgctggcagaagatgattgttaaactctccaggaacttgtgctatgctgggaatctgtcaagcaaaagatgcccagaaagagaacttgcagctcaatccacaaatcaagatacatgtgtgtgaaaccattccaaaaatttatatactgcacaaactggtgatcaacccctaacttaaacacttaaagtctctttatgaatttctctttttttcttctctgtgttacctgtgaatattagtaatctaaaactttttatttatcacacatggacacttgggaaaggaaacttgattatatttacatggaggcatttgactttttcaagaggcttgactcgtctcaggtgcaatccttaattaaacatacaaacaaaattttccttttactttctttgccaaaacaaaatgtaaaagcactgaaatatacattgcaagtacaaatttcctgtgaaaatctttttatagaaacacaaatgtataagacaaatgtgcttgttcttttaaattctcctgtttcagaatctctttttaatctactcctaaggatgtacaagttagagtcagaagacgttttggattttttccctctctctcatcctcccgctgtgcccttgcacttgcatattaataacatttcatggactgggaaatagtgttcttttttgcaagcttgatgtcaagttagtctaaaccagcacctggcagtattttagtgctcatcaacattgtgacaatcacacaaggaagatcatttctacatttctgtcctccctgcgttctcagcttgcttaaccattcctctacctcttgcatttttttgcggataaatgtatccccatttctgcttctctgtttcccctccttttccattgtttttccttatggtactactttctcaggtgctacatatcatatatttgtcccatctataacatatttaaatgctataagtagtaactccattaaacaaaggcatttacaaaagcacacaggtgtttagaaaagcaatagtttcatcaattccaagttatgtggatattgtaactggccacaagaatgaaatggagggcatttggtgtcataagatggcatgtcttgatgacaagaaacaaaacgcccttcattaatatgcctcagtgtaataactattatagaaactgttggcaagcagagtgctttcctataacagaatgtgtcttaattttctactcgagggaaaggtttgtccaggtaacaacactaaagacaaccctaagaacacccactccagcagtatgtccattagacactaaaactctccaaattatttgtcagggagcctggcgattctgccaagaaggcaggtgttttgcccttagagcctatacagttctcttggagaaattgtctttcaggcaccactgttaatcactgagactgattctaatgcaaagcagggaagacagaggcagaaaccaggagagtggtagatcagtgcagcccagatatcggaatggaggagcaaagtttcattcacggatgtttgttgaatgctgctgcccaactcttcctttgtcacctctaggctattccactaagttacttataaactggtggctttaactgagggctgtgtaaaggtactatttggcatgtgaagtcaggataaatttatcgaatgtccgttttccacatgcaactgtgttacagaagtagtaaaattggaagaatcatgtttatggtgttaccactgatggaaacacacaaacaccaagctaataataaatatataacttaaaaagctaattatatgcactgaaatggtgggaattttagtgatgcagtaattgaggagtctggagttttgtatttggaccaagaattatgagatgaggatctttttctgagtgttctaaagggcttcttgagggggagtggtttaaagcacttcatgaatgatgtgaagaaggtaccttgggctgagacagcattctaggtacagatggcactctgttcaaccaactgtggatggaaaatattctgaaaaaaaatacaataaaaattttaaaaatacaatataacatctgtttacatggc

SEQ ID NO: 297910 - DNA, 2246 bp, Homo sapiens
agcggtgggtgtggaaaaagtatgtcggcaagtcagctggtttcccagtgcaggacgcgctgacagctcgagtgagcggactgcccaggacttcggaactagacgagttctgtagaaatcctgtcaaagaatatgaagaaaaacagagaaagattctgcaatagagagagagaatttgtatataaatttaaagtaggaagtcagtgcttagaactgagagtgccactcaaatttcctgttcaagagaatgccagtcatttgcatggacgtctgatgctgctgcacagtttaccgtgctttatagaaaaagacttaaaagaagctctgactcagtttatagaagaagaatccctcagcgattatgatagagatgctgaagcatccctggcagctgtgaaatcaggtgaagtagatttacatcagctggcgagtacatgggccaaagcttatgctgagaccacgttagagcatgcaaggcctgaagaacccagctgggatgaagattttgcagatgtgtaccatgacttaattcattctcctgcctctgaaactctcttaaatttggaacataattactttgttagtatctcagaactgattggtgaaagagatgtggagctgaaaaaattacgagagagacaaggtattgaaatggaaaaagtcatgcaggaattgggaaaatcactgacagatcaagatgtaaattcactggctgctcagcattttgaatcccagcaagacctagaaaataaatggtcgaatgaattaaaacaatcaactgccatccaaaaacaagagtatcaagaatgggtaataaaacttcaccaagacctaaaaaaccccaacaacagctcccttagtgaggaaattaaagttcagccaagtcagttcagagaatctgtagaagcaattggaaggatttatgaggaacagagaaagttagaagaaagttttaccattcacttaggagcccagttgaagaccatgcataatttgagattgctgagagcagatatgctggacttctgtaagcataaaagaaatcatcgaagtggtgtgaaacttcatcggctccaaacagctctgtcactttattctacatctctctgtggcctggttttactagtagataatcgaattaattcatatagtggtattaaaagagattttgccacagtttgccaagaatgcactgacttccatttcccccgaattgaagagcaattagaagttgtccaacaggtggtactttatgctagaacccagcgcaggagtaaattgaaagaatcacttgattctggaaaccaaaatggaggaaatgatgataagactaagaatgctgagaggaactatttaaatgttttacctggggaattttatattacacggcattctaatctctcagaaatccatgttgctttccatctctgtgtggatgaccatgtgaaatcgggaaacatcactgctcgtgatcctgccattatgggactccgaaatatactcaaagtttgctgtacccatgacatcacaacaataagcattcctctcttgctggtacatgatatgtcagaggaaatgactataccctggtgcttaaggagagcggaacttgtgttcaagtgtgtcaaaggtttcatgatggaaatggcttcatgggatggaggaatttctaggacagtgcaatttctagtaccacagagtatttctgaagaaatgttttatcaacttagtaacatgcttccccagatcttccgagtatcatcaacactcactctgacatccaagcactaaacccttatagattgacatgctggcagaagatgattgttaaactctccaggaacttgtgctatgctgggaatctgtcaagcaaaagatgcccagaaagagaacttgcagctcaatccacaaatcaagatacatgtgtgtgaaaccattccaaaaatttatatactgcacaaactggtgatcaacccctaacttaaacacttaaagtctctttatgaatttctctttttttcttctctgtgttacctgtgaatattagtaatctaaaactttttatttatcacacatggacacttgggaaaggaaacttgattatatttacatggaggcatttgactttttcaagaggcttgactcgtctcaggtgcaatccttaattaaacatacaaacaaaattttccttttactttctttgccaaaacaaaatgtaaaagcactgaaatatacattgcaagtac

SEQ ID NO: 297911 - DNA, 1188 bp, Homo sapiens
agcggtgggtgtggaaaaagtatgtcggcaagtcagctggtttcccagtgcaggacgcgctgacagctcgagtgagcggactgcccaggacttcggaactagacgagttctgtagaaatcctgtcaaagaatatgaagaaaaacagagaaagattctgcaatagagagagagaatttgtatataaatttaaagtaggaagtcagtgcttagaactgagagtgccactcaaatttcctgttcaagagaatgccagtcatttgcatggacgtctgatgctgctgcacagtttaccgtgctttatagaaaaagacttaaaagaagctctgactcagtttatagaagaagaatccctcagcgattatgatagagatgctgaagcatccctggcagctgtgaaatcaggtgaagtagatttacatcagctggcgagtacatgggccaaagcttatgctgagaccacgttagagcatgcaaggcctgaagaacccagctgggatgaagattttgcagatgtgtaccatgacttaattcattctcctgcctctgaaactctcttaaatttggaacataattactttgttagtatctcagaactgattggtgaaagagatgtggagctgaaaaaattacgagagagacaaggtattgaaatggaaaaagtcatgcaggaattgggaaaatcactgacagatcaagatgtaaattcactggctgctcagcattttgaatcccagcaagacctagaaaataaatggtcgaatgaattaaaacaatcaactgccatccaaaaacaagagtatcaagaatgggtaataaaacttcaccaagacctaaaaaaccccaacaacagctcccttaggtattaactatgtattgttcttattcatatagtagtccattgttagtaatgtttatatttactacaaagttaaaccttttagctgtatgtctttttaatttgctagtgaaagttcaagacaattttatgctgtgcttttaccaccttttgcattataggctttatgtggattatttggggggcaatggttattggttagtttgaaatagaactttagttttatgttctagatacatacacctaaatacttaaatactatctttatttctttagtttccactccatgcagtaaacattggttgaatgccaaacactctctaagcagaaa

SEQ ID NO: 297912 - DNA, 768 bp, Homo sapiens
gtggattgcttgagcccaggagttcaagaccagcctgggcaacacagcgagaccccatctcttaaaaatgtattttattttagccagtgggtcccttcctttctcctttcctctctactgctcaagaacagatttgaggccaggtgcggtgcctcacatctgtaatcccaacactttgggaggctgagatgggtggattgcttgagcccaggagttcaagaccagcctgggcaacacagcgagaccccatctcttaaaaaataacagacttgaggaacccctctcccttccataattcccctcatccaccgcccactccaggcactcactcaaacttgctcttcaactctgtatacaagcagaagcaataaaccaatctgattttcttttcaattaaaaaaaaaaaacaaaaaaaacaagaaaaaaaaaaaccaaaaagaaaaacaaaaaaacaacagaagtcaaacaacacgaaaaaacaaagaaagcaggagagggaggagcgcgaccgacccacagaagcacacaccacgagggagcaaaaaaaaaaaaaaaaaacaaaaactacacaaacaacagtcacacaaacgcggcgcggcgtcagaagctgatcaccggcgcacgggacgcaacaccgatccatccgccacacactgaaagcgggcgccctggaaggcaacacactatccggcggccccgcgccaaacacaccccggaggagaaccctccgcgcgacagcacaccccccctgtcggcgccagccggcgc

SEQ ID NO: 297913 - DNA, 507 bp, Homo sapiens
  misc_feature (21)..(21): n is a, c, g, or t
ctcggtacccgactgcatccnacgtcccaaccagcacggtccccgcagaatgccagcgcacctcctcccgccacttcaaagagccggctcggcggggcaggaagcggcggctgcggctgcgggtcctgcgagaagagcgcgatttcctccggggctgcccagttatctctggagtcgcagaactgctctcgggagaacgcgttctctaccccaaccccgtgctcctcaacccacccacctacttcctctagctccacacactcacaagcaccgagctgccaaaaatttccacccaccgcccccctccctagctaacttccttccagcatttcctgagctggatgatcctaggatttgtaagacaggaaaaaaaggaaggcgtgagggcgggcagcagcgacaggatgcttgtttttcgctctaccaaagtcgtctgaaggcgagacagcgggcccagggcgcaggacccaccgcggcgtggatgcagtcagcggcgttggatgcatc

SEQ ID NO: 297914 - DNA, 6689 bp, Homo sapiens
  misc_feature (21)..(21): n is a, c, g, or t
  misc_feature (1961)..(1961): n is a, c, g, or t
  misc_feature (2596)..(2596): n is a, c, g, or t
ctcggtacccgactgcatccnacgtcccaaccagcacggtccccgcagaatgccagcgcacctcctcccgccacttcaaagagccggctcggcggggcaggaagcggcggctgcggctgcgggtcctgcgagaagagcgcgatttcctccggggctgcccagttatctctggagtcgcagaactgctctcgggagaacgcgttctctaccccaaccccgtgctcctcaacccacccacctacttcctctagctccacacactcacaagcaccgagctgccaaaaatttccacccaccgcccccctccctagctaacttccttccagcatttcctgagctggatgatcctaggatttgtaagacaggaaaaaaaggaaggcgtgagggcgggcagcagcgacaggatgcttgtttttcgctctaccaaagtcgtctgaaggcgagacagcgggcccagggcgcaggacccaccgcagccccctgggcagtctcctcgccccgcgtccgcgtcgtctccggggcacttagtaaggggtggggagagcttgccctccctcttaagctgaggagaaacacccgaagacaccgcaggagcctgtgaaagtccctaggactccaagtgaggaagtgacactcccaggcgagccggcccgcggctgccagtctgcacggcctcggcacggcggccccggagcggcgcggggtggatctcaggctctgccggcccgcggcccgcggggtccatgcgcagggcccccagcccaagttcttccatcttccgatgcggccccccagagccgcggggcagccggtgatctagcccgggagcccatcttacagcggtgccaagcagaggggcggcagagacggaggggcagcctctttgggactaactcatgaagaacaagggtgctaagcagaagctgaaacgaaagggagccgccagcgcgtttggctgtgacctgacggagtatctggaaagctcgggacaggatgttccatacgttttgaagagctgtgcagaatttatagagactcacggcatcgtggatggaatctatcggctttcaggagtcacctcaaacatacaacggctaaggcaagagtttggctcagatcaatgtccagatctgacaagggaagtgtacctccaggacatccactgtgtgggctcgctttgcaagctctactttagggagctgcccaaccccctcctgacttatgagctctatgagaaattcacggaggcagtgtcgcattgccctgaagaaggccaactggcccgaatccaaaatgttatccaggagcttcctccatcccactataggaccttggaatacctgattcgacacctggcccatatcgcctccttcagcagcaagaccaacatgcacgcccggaacctggccctggtgtgggcgccaaacctcctcaggtctaaagaaattgaagccactggttgcaatggagatgcagccttccttgcagtccgggtccagcaggtggtgattgagttcatattgaatcatgtagatcaaatctttaacaacggtgcacctgggtctctggagaatgatgaaaaccggcccatcatgaagagcctgaccttgccagccctctccctgcccatgaagctggtgagccttgaggaagctcaagcccgcagcctggccactaaccatcctgctcgcaaggaaaggagggagaacagcctgcctgagattgtccctcccatgggcaccctcttccacactgtccttgagttaccagacaacaagcgaaagctctccagtaaatcaaagaagtggaaatcaatatttaacctgggacgttctggatcagactccaaatcaaaactgagtagaaatgggagtgtatttgtgagaggacagaggctctcggtggaaaaggctactatccgaccagctaaaagcatggactcactatgttcagtgcctgtngaaggaaaagaaaccaagggaaatttcaatcgaacagttaccaccggtggatttttcattccagcaacaaagatgcactccaccggcaccggcagctcatgtgacctcaccaagcaggagggcgaatggggccaggaggggatgcctcccggggctgagggtggctttgatgtgagcagtgatcgcagccatctccagggcgctcaggcccggcccccaccggaacagctgaaggttttccggcctgttgaggatccggagagcgagcaaacagccccaaagatgttgggtatgttctacacttcgaacgacagccctagcaaatccgtcttcaccagcagcctcttccagatggagccctcgccgcgtaaccagcgcaaggcgctgaacatctccgagccctttgcggtatctgtgccgctccgcgtgtccgcagtcatcagcaccaacagcacgccgtgcagaacacccccgaaggagctgcagtctctttccagcctggaagagttttcttttcatggatcagagagcggaggctggccagaagaagagaaaccgctgggagctgagacttctgcagcttctgtacctaagaaggcaggtcttgaggatccaaggcagtacctgaagcaccngggacagtggaatgcagcaaaggcctgtcccaggagccaggcgcccacctggaggagaagaaaaccccagaaagctccttgagctctcaacatttaaatgaattagagaagaggccaaatccggagaaggtggtggaggagggacgagaggctggtgagatggagtccagcaccctgcaggagagccccagggccagagccgaagctgtgcttctccatgagatggatgaagatgatctggccaatgccctgatctggcctgagattcaacaggagctgaaaatcattgaatctgaggaggagctctcatcgttgccacctcctgctctgaagaccagcccaattcagcctattctcgagtcgagtctggggccctttattccctcagagcctcctgggagcttgccttgtggctccttccctgctccagtctccacccctctggaggtgtggactagggatccagccaatcagagcacacagggggcttccacagcagccagcagagagaagccggaacctgagcagggcctgcacccagacctcgccagcctggctcctctggaaatagttccttttgagaaggcatctccacaagcaacagtggaagtaggaggcccaggcaatctgtctcctccactcccacctgctcctccccctccaactcctctggaggagtcaactccagtcctgctttcaaagggcagcccggaaagagaagactcatccaggaaattgaggacagatctctacatagaccagctgaagtcccaagacagccctgagatctctagcctctgtcagggagaggaggcaaccccaagacacagtgacaagcaaaattcaaagaatgctgcttctgaggggaaaggctgtggttttccaagcccaaccagggaggttgagatcgtctcacaagaagaggaggatgtaacccattcagtacaggagccttcagactgtgacgaagatgacactgtgacagacattgcccagcatggcctggagatggtggagccctgggaggaaccccagtgggtgacgagtccccttcactctcccaccctgaaagacgcgcacaaggcccaggtacagggccttcagggtcaccagttggagaagaggctttcccacaggcccagccttcgccagagccattctctagatagcaaacccacggttaaaagccagtggactctcgaggttccctcctccagcagctgtgctaatcttgaaacagagaggaattctgaccctcttcagccccaggcacccaggagagagattactggatgggatgagaaagccctgaggtccttcagagagttctctggcctgaaaggggcagaggctcctcccaaccagaagggaccaagtggtgtgcaacccaacccagcagaaaccagccccatcagcctagcagagggaaaggagctagggacacacctggggcacagcagtccacagattaggcaaggtggtgttcctgggccagagagcagcaaggagagttcacccagcgtgcaggacagcacttcgcctggagagcaccccgcaaagttacagctaaagagcacagagtgtgggcccccaaaagggaaaaacaggccttcttccctcaacttggaccctgccattcccattgctgacctcttctggtttgagaatgtggcctcatttagttcacctggaatgcaggtctctgagccaggagacccaaaggtcacatggatgacctcatcttactgtaaagcagacccctggagggtttactcccaggacccccaggacctggacattgttgctcatgcactgacaggccgccgtaactcagctcctgtgagtgtgtcagctgtgagaacctccttcatggtcaaaatgtgccaggccagggcggtcccagtcatccctcccaagattcagtacacccagatcccacagcccctgccctctcagagctcaggggagaatggggttcagcctctggagaggagccaggagggacccagctcaaccagtgggaccactcagaaacctgccaaagatgattctccctcctccctggaaagctcaaaggaagaaaaaccaaagcaagatcccggagccattaagtcctcaccagtggatgccactgcaccctgcatgtgcgagggacctaccctttctccagaaccaggctcgtctaacctgctctccacccaggatgcagtagtgcaatgcagaaagcgcatgtcagagacagagccatctggggacaaccttctttcttcaaaactagagcgaccatctgggggttctaagcctttccacaggtcaaggccaggaagacctcagagcctaatcttattcagtcctcctttccccattatggaccacctgcccccttcatccacagtgacagattccaaggtcctgctgtcccctatcagaagtcccacccagacagtttcccctggccttctttgtggagagttggcagaaaacacatgggtcacaccagaaggggttacacttaggaataaaatgaccatccctaagaatggccagagactagagacctcaaccagctgtttttaccagcctcagcggagatcagtaattctggatggaagaagtgggaggcaaatagaatgatttcggttcacctgctggtgtctgaaaaaaaccgtgattcatctggaagttattacagggccagcttgccatattccaggcacacgttatcaagtttgggcctattgtggcctctgacttctctttcttcagccttttgaccacttattaattagtccatttgctagaagagtggtcaagggaaaaacgagagatgaaatttagttaagtctatgtgagcaagtgagagaaggttaggtaaggggagaggatggaatgcttgcctccaatgaactttggagcttgtatgtgagtcagattgctcccctattgctattatctattactcttgagagctggctgtcctttgaaagaaagaagtaatgttctttgaaagaaagaaaaatctcttgctgtgtcaaacctcaaaatgttgctattggggttagaaggcctcctctttatgctttttaatgctctttcaaacgtgttcttttagaccagttttctaataagctttgtaaaatgtactatccaaattagaagcggatttggaaatgcaaactaacgtgcacttagatatccaagtgggtgagcttagccactcttacccatgctctttccctggaatccctggagacctgtccaagatgatttccatataccagcatagaaaatcagaatcaagagcaaactctgagactggcacaatccaagaagatttcctggctctggcttttagtaatttgggactccaactgccactgtactggactgtaatttataaatccagtagctacgcagggtggaggctgggctgaggattaccataatgaaatgtactaaatcttcatttaggtatgcaattgtgaagtgaaggcatctgctttctttacagtatcagagtccaagaacaggatgtcaccatagataaaagcctcatacaaaggcagaactacactccaaatttaatgtgtttaaattggtggggcaccagcagaaaatacttctagctcagctttactcttcttccacactaggctgggcccagcaatacaggagaggatgaagggaggagctccaggaggcgagggaagagccctagcagggcggccatcacaaccactcactgagagttgcccttcttaaaaatgtattttattttagccagtgggtcccttcctttctcctttcctctctactgctcaagaacagatttgaggccaggtgcggtgcctcacatctgtaatcccaacactttgggaggctgagatgggtggattgcttgagcccaggagttcaagaccagcctgggcaacacagcgagaccccatctcttaaaaaataacagacttgaggaacccctctcccttccataattcccctcatccaccgcccactccaggcactcactcaaacttgctcttcaactctgtatacaagcagaagcaataaaccaatctgattttcttttcaatta

SEQ ID NO: 297915 - DNA, 7666 bp, Homo sapiens
  misc_feature (21)..(21): n is a, c, g, or t
  misc_feature (1961)..(1961): n is a, c, g, or t
  misc_feature (2596)..(2596): n is a, c, g, or t
ctcggtacccgactgcatccnacgtcccaaccagcacggtccccgcagaatgccagcgcacctcctcccgccacttcaaagagccggctcggcggggcaggaagcggcggctgcggctgcgggtcctgcgagaagagcgcgatttcctccggggctgcccagttatctctggagtcgcagaactgctctcgggagaacgcgttctctaccccaaccccgtgctcctcaacccacccacctacttcctctagctccacacactcacaagcaccgagctgccaaaaatttccacccaccgcccccctccctagctaacttccttccagcatttcctgagctggatgatcctaggatttgtaagacaggaaaaaaaggaaggcgtgagggcgggcagcagcgacaggatgcttgtttttcgctctaccaaagtcgtctgaaggcgagacagcgggcccagggcgcaggacccaccgcagccccctgggcagtctcctcgccccgcgtccgcgtcgtctccggggcacttagtaaggggtggggagagcttgccctccctcttaagctgaggagaaacacccgaagacaccgcaggagcctgtgaaagtccctaggactccaagtgaggaagtgacactcccaggcgagccggcccgcggctgccagtctgcacggcctcggcacggcggccccggagcggcgcggggtggatctcaggctctgccggcccgcggcccgcggggtccatgcgcagggcccccagcccaagttcttccatcttccgatgcggccccccagagccgcggggcagccggtgatctagcccgggagcccatcttacagcggtgccaagcagaggggcggcagagacggaggggcagcctctttgggactaactcatgaagaacaagggtgctaagcagaagctgaaacgaaagggagccgccagcgcgtttggctgtgacctgacggagtatctggaaagctcgggacaggatgttccatacgttttgaagagctgtgcagaatttatagagactcacggcatcgtggatggaatctatcggctttcaggagtcacctcaaacatacaacggctaaggcaagagtttggctcagatcaatgtccagatctgacaagggaagtgtacctccaggacatccactgtgtgggctcgctttgcaagctctactttagggagctgcccaaccccctcctgacttatgagctctatgagaaattcacggaggcagtgtcgcattgccctgaagaaggccaactggcccgaatccaaaatgttatccaggagcttcctccatcccactataggaccttggaatacctgattcgacacctggcccatatcgcctccttcagcagcaagaccaacatgcacgcccggaacctggccctggtgtgggcgccaaacctcctcaggtctaaagaaattgaagccactggttgcaatggagatgcagccttccttgcagtccgggtccagcaggtggtgattgagttcatattgaatcatgtagatcaaatctttaacaacggtgcacctgggtctctggagaatgatgaaaaccggcccatcatgaagagcctgaccttgccagccctctccctgcccatgaagctggtgagccttgaggaagctcaagcccgcagcctggccactaaccatcctgctcgcaaggaaaggagggagaacagcctgcctgagattgtccctcccatgggcaccctcttccacactgtccttgagttaccagacaacaagcgaaagctctccagtaaatcaaagaagtggaaatcaatatttaacctgggacgttctggatcagactccaaatcaaaactgagtagaaatgggagtgtatttgtgagaggacagaggctctcggtggaaaaggctactatccgaccagctaaaagcatggactcactatgttcagtgcctgtngaaggaaaagaaaccaagggaaatttcaatcgaacagttaccaccggtggatttttcattccagcaacaaagatgcactccaccggcaccggcagctcatgtgacctcaccaagcaggagggcgaatggggccaggaggggatgcctcccggggctgagggtggctttgatgtgagcagtgatcgcagccatctccagggcgctcaggcccggcccccaccggaacagctgaaggttttccggcctgttgaggatccggagagcgagcaaacagccccaaagatgttgggtatgttctacacttcgaacgacagccctagcaaatccgtcttcaccagcagcctcttccagatggagccctcgccgcgtaaccagcgcaaggcgctgaacatctccgagccctttgcggtatctgtgccgctccgcgtgtccgcagtcatcagcaccaacagcacgccgtgcagaacacccccgaaggagctgcagtctctttccagcctggaagagttttcttttcatggatcagagagcggaggctggccagaagaagagaaaccgctgggagctgagacttctgcagcttctgtacctaagaaggcaggtcttgaggatccaaggcagtacctgaagcaccngggacagtggaatgcagcaaaggcctgtcccaggagccaggcgcccacctggaggagaagaaaaccccagaaagctccttgagctctcaacatttaaatgaattagagaagaggccaaatccggagaaggtggtggaggagggacgagaggctggtgagatggagtccagcaccctgcaggagagccccagggccagagccgaagctgtgcttctccatgagatggatgaagatgatctggccaatgccctgatctggcctgagattcaacaggagctgaaaatcattgaatctgaggaggagctctcatcgttgccacctcctgctctgaagaccagcccaattcagcctattctcgagtcgagtctggggccctttattccctcagagcctcctgggagcttgccttgtggctccttccctgctccagtctccacccctctggaggtgtggactagggatccagccaatcagagcacacagggggcttccacagcagccagcagagagaagccggaacctgagcagggcctgcacccagacctcgccagcctggctcctctggaaatagttccttttgagaaggcatctccacaagcaacagtggaagtaggaggcccaggcaatctgtctcctccactcccacctgctcctccccctccaactcctctggaggagtcaactccagtcctgctttcaaagggcagcccggaaagagaagactcatccaggaaattgaggacagatctctacatagaccagctgaagtcccaagacagccctgagatctctagcctctgtcagggagaggaggcaaccccaagacacagtgacaagcaaaattcaaagaatgctgcttctgaggggaaaggctgtggttttccaagcccaaccagggaggttgagatcgtctcacaagaagaggaggatgtaacccattcagtacaggagccttcagactgtgacgaagatgacactgtgacagacattgcccagcatggcctggagatggtggagccctgggaggaaccccagtgggtgacgagtccccttcactctcccaccctgaaagacgcgcacaaggcccaggtacagggccttcagggtcaccagttggagaagaggctttcccacaggcccagccttcgccagagccattctctagatagcaaacccacggttaaaagccagtggactctcgaggttccctcctccagcagctgtgctaatcttgaaacagagaggaattctgaccctcttcagccccaggcacccaggagagagattactggatgggatgagaaagccctgaggtccttcagagagttctctggcctgaaaggggcagaggctcctcccaaccagaagggaccaagtggtgtgcaacccaacccagcagaaaccagccccatcagcctagcagagggaaaggagctagggacacacctggggcacagcagtccacagattaggcaaggtggtgttcctgggccagagagcagcaaggagagttcacccagcgtgcaggacagcacttcgcctggagagcaccccgcaaagttacagctaaagagcacagagtgtgggcccccaaaagggaaaaacaggccttcttccctcaacttggaccctgccattcccattgctgacctcttctggtttgagaatgtggcctcatttagttcacctggaatgcaggtctctgagccaggagacccaaaggtcacatggatgacctcatcttactgtaaagcagacccctggagggtttactcccaggacccccaggacctggacattgttgctcatgcactgacaggccgccgtaactcagctcctgtgagtgtgtcagctgtgagaacctccttcatggtcaaaatgtgccaggccagggcggtcccagtcatccctcccaagattcagtacacccagatcccacagcccctgccctctcagagctcaggggagaatggggttcagcctctggagaggagccaggagggacccagctcaaccagtgggaccactcagaaacctgccaaagatgattctccctcctccctggaaagctcaaaggaagaaaaaccaaagcaagatcccggagccattaagtcctcaccagtggatgccactgcaccctgcatgtgcgagggacctaccctttctccagaaccaggctcgtctaacctgctctccacccaggatgcagtagtgcaatgcagaaagcgcatgtcagagacagagccatctggggacaaccttctttcttcaaaactagagcgaccatctgggggttctaagcctttccacaggtcaaggccaggaagacctcagagcctaatcttattcagtcctcctttccccattatggaccacctgcccccttcatccacagtgacagattccaaggtcctgctgtcccctatcagaagtcccacccagacagtttcccctggccttctttgtggagagttggcagaaaacacatgggtcacaccagaaggggttacacttaggaataaaatgaccatccctaagaatggccagagactagagacctcaaccagctgtttttaccagcctcagcggagatcagtaattctggatggaagaagtgggaggcaaatagaatgatttcggttcacctgctggtgtctgaaaaaaaccgtgattcatctggaagttattacagggccagcttgccatattccaggcacacgttatcaagtttgggcctattgtggcctctgacttctctttcttcagccttttgaccacttattaattagtccatttgctagaagagtggtcaagggaaaaacgagagatgaaatttagttaagtctatgtgagcaagtgagagaaggttaggtaaggggagaggatggaatgcttgcctccaatgaactttggagcttgtatgtgagtcagattgctcccctattgctattatctattactcttgagagctggctgtcctttgaaagaaagaagtaatgttctttgaaagaaagaaaaatctcttgctgtgtcaaacctcaaaatgttgctattggggttagaaggcctcctctttatgctttttaatgctctttcaaacgtgttcttttagaccagttttctaataagctttgtaaaatgtactatccaaattagaagcggatttggaaatgcaaactaacgtgcacttagatatccaagtgggtgagcttagccactcttacccatgctctttccctggaatccctggagacctgtccaagatgatttccatataccagcatagaaaatcagaatcaagagcaaactctgagactggcacaatccaagaagatttcctggctctggcttttagtaatttgggactccaactgccactgtactggactgtaatttataaatccagtagctacgcagggtggaggctgggctgaggattaccataatgaaatgtactaaatcttcatttaggtatgcaattgtgaagtgaaggcatctgctttctttacagtatcagagtccaagaacaggatgtcaccatagataaaagcctcatacaaaggcagaactacactccaaatttaatgtgtttaaattggtggggcaccagcagaaaatacttctagctcagctttactcttcttccacactaggctgggcccagcaatacaggagaggatgaagggaggagctccaggaggcgagggaagagccctagcagggcggccatcacaaccactcactgagagttgcccttcttaaaaatgtattttattttagccagtgggtcccttcctttctcctttcctctctactgctcaagaacagatttgaggccaggtgcggtgcctcacatctgtaatcccaacactttgggaggctgagatgggtggattgcttgagcccaggagttcaagaccagcctgggcaacacagcgagaccccatctcttaaaaaataacagacttgaggaacccctctcccttccataattcccctcatccaccgcccactccaggcactcactcaaacttgctcttcaactctgtatacaagcagaagcaataaaccaatctgattttcttttcaattatttataactttcaatggttctttcctttccagctggcgagagaaaggagaactaatatacctgctggcagatttttggtgctgcccaaaaaaggacttcacagggcatctcttctcaggttcaagcctggctgaattctgcccagaagctcagtcattgcagaaatttctctaagggctgatagtacctctgggtaggcgtcacaaccaaggctggttctgggcttagtgggggctgagatgaagttacctcctccaatgagaaattgggagctgatgccctgcaacagatatatattcctctctctctctgtctctctatctctctcctccctctccctccctccctccccgccaataagccttacaaacagttttgaaatcttgttctgtaccttttaagccagtgtctgtggcgagggtgactggcaagtcagctgatgagttctgccttctgagagcactgagtgagcaaggcctttcatcagtgttttggccttctcattgggtgaggaagacattgaaccaacagccaacgagatatgaacctgtaagaaaaaagtcctagaatatagtatttttccccaggccagcaaagtgaagaaatacagtggtgacagatgagaaaggccatgttcaagagatctgaaaagtacattcctgccttatcagaaaatgtgtcagacaggttttatgtcagcctcagtgctcctgcggtgtcgacgctctgataaggaccatgttccagttagaatgcgagggagggaaagagctgcactttgcttcaccatcagaactctgagccaaataatgaatatgtaaactattttatgattattttaaatgtttgtttggtaacatttataagatctatttttatttggggatagactgagaagccaccatttacatattaacaagtgacttcagttctaagggttgagatgcctgtgtggatttataaaatggttgcaagat

SEQ ID NO: 297916 - DNA, 3951 bp, Homo sapiens
gctgtctggctcagtccatgagagagttcacagcagcttgcagagcatttctaatggaaccacgtaaaccagtggactctcgaggttccctcctccagcagctgtgctaatcttgaaacagagaggaattctgaccctcttcagccccaggcacccaggagagagattactggatgggatgagaaagccctgaggtccttcagagagttctctggcctgaaaggggcagaggctcctcccaaccagaagggaccaagtggtgtgcaacccaacccagcagaaaccagccccatcagcctagcagagggaaaggagctagggacacacctggggcacagcagtccacagattaggcaaggtggtgttcctgggccagagagcagcaaggagagttcacccagcgtgcaggacagcacttcgcctggagagcaccccgcaaagttacagctaaagagcacagagtgtgggcccccaaaagggaaaaacaggccttcttccctcaacttggaccctgccattcccattgctgacctcttctggtttgagaatgtggcctcatttagttcacctggaatgcaggtctctgagccaggagacccaaaggtcacatggatgacctcatcttactgtaaagcagacccctggagggtttactcccaggacccccaggacctggacattgttgctcatgcactgacaggccgccgtaactcagctcctgtgagtgtgtcagctgtgagaacctccttcatggtcaaaatgtgccaggccagggcggtcccagtcatccctcccaagattcagtacacccagatcccacagcccctgccctctcagagctcaggggagaatggggttcagcctctggagaggagccaggagggacccagctcaaccagtgggaccactcagaaacctgccaaagatgattctccctcctccctggaaagctcaaaggaagaaaaaccaaagcaagatcccggagccattaagtcctcaccagtggatgccactgcaccctgcatgtgcgagggacctaccctttctccagaaccaggctcgtctaacctgctctccacccaggatgcagtagtgcaatgcagaaagcgcatgtcagagacagagccatctggggacaaccttctttcttcaaaactagagcgaccatctgggggttctaagcctttccacaggtcaaggccaggaagacctcagagcctaatcttattcagtcctcctttccccattatggaccacctgcccccttcatccacagtgacagattccaaggtcctgctgtcccctatcagaagtcccacccagacagtttcccctggccttctttgtggagagttggcagaaaacacatgggtcacaccagaaggggttacacttaggaataaaatgaccatccctaagaatggccagagactagagacctcaaccagctgtttttaccagcctcagcggagatcagtaattctggatggaagaagtgggaggcaaatagaatgatttcggttcacctgctggtgtctgaaaaaaaccgtgattcatctggaagttattacagggccagcttgccatattccaggcacacgttatcaagtttgggcctattgtggcctctgacttctctttcttcagccttttgaccacttattaattagtccatttgctagaagagtggtcaagggaaaaacgagagatgaaatttagttaagtctatgtgagcaagtgagagaaggttaggtaaggggagaggatggaatgcttgcctccaatgaactttggagcttgtatgtgagtcagattgctcccctattgctattatctattactcttgagagctggctgtcctttgaaagaaagaagtaatgttctttgaaagaaagaaaaatctcttgctgtgtcaaacctcaaaatgttgctattggggttagaaggcctcctctttatgctttttaatgctctttcaaacgtgttcttttagaccagttttctaataagctttgtaaaatgtactatccaaattagaagcggatttggaaatgcaaactaacgtgcacttagatatccaagtgggtgagcttagccactcttacccatgctctttccctggaatccctggagacctgtccaagatgatttccatataccagcatagaaaatcagaatcaagagcaaactctgagactggcacaatccaagaagatttcctggctctggcttttagtaatttgggactccaactgccactgtactggactgtaatttataaatccagtagctacgcagggtggaggctgggctgaggattaccataatgaaatgtactaaatcttcatttaggtatgcaattgtgaagtgaaggcatctgctttctttacagtatcagagtccaagaacaggatgtcaccatagataaaagcctcatacaaaggcagaactacactccaaatttaatgtgtttaaattggtggggcaccagcagaaaatacttctagctcagctttactcttcttccacactaggctgggcccagcaatacaggagaggatgaagggaggagctccaggaggcgagggaagagccctagcagggcggccatcacaaccactcactgagagttgcccttcttaaaaatgtattttattttagccagtgggtcccttcctttctcctttcctctctactgctcaagaacagatttgaggccaggtgcggtgcctcacatctgtaatcccaacactttgggaggctgagatgggtggattgcttgagcccaggagttcaagaccagcctgggcaacacagcgagaccccatctcttaaaaaataacagacttgaggaacccctctcccttccataattcccctcatccaccgcccactccaggcactcactcaaacttgctcttcaactctgtatacaagcagaagcaataaaccaatctgattttcttttcaattatttataactttcaatggttctttcctttccagctggcgagagaaaggagaactaatatacctgctggcagatttttggtgctgcccaaaaaaggacttcacagggcatctcttctcaggttcaagcctggctgaattctgcccagaagctcagtcattgcagaaatttctctaagggctgatagtacctctgggtaggcgtcacaaccaaggctggttctgggcttagtgggggctgagatgaagttacctcctccaatgagaaattgggagctgatgccctgcaacagatatatattcctctctctctctgtctctctatctctctcctccctctccctccctccctccccgccaataagccttacaaacagttttgaaatcttgttctgtaccttttaagccagtgtctgtggcgagggtgactggcaagtcagctgatgagttctgccttctgagagcactgagtgagcaaggcctttcatcagtgttttggccttctcattgggtgaggaagacattgaaccaacagccaacgagatatgaacctgtaagaaaaaagtcctagaatatagtatttttccccaggccagcaaagtgaagaaatacagtggtgacagatgagaaaggccatgttcaagagatctgaaaagtacattcctgccttatcagaaaatgtgtcagacaggttttatgtcagcctcagtgctcctgcggtgtcgacgctctgataaggaccatgttccagttagaatgcgagggagggaaagagctgcactttgcttcaccatcagaactctgagccaaataatgaatatgtaaactattttatgattattttaaatgtttgtttggtaacatttataagatctatttttatttggggatagactgagaagccaccatttacatattaacaagtgacttcagttctaagggttgagatgcctgtgtggatttataaaatggttgcaagat

SEQ ID NO: 297917 - DNA, 9860 bp, Homo sapiens
  misc_feature (21)..(21): n is a, c, g, or t
  misc_feature (1961)..(1961): n is a, c, g, or t
  misc_feature (2596)..(2596): n is a, c, g, or t
ctcggtacccgactgcatccnacgtcccaaccagcacggtccccgcagaatgccagcgcacctcctcccgccacttcaaagagccggctcggcggggcaggaagcggcggctgcggctgcgggtcctgcgagaagagcgcgatttcctccggggctgcccagttatctctggagtcgcagaactgctctcgggagaacgcgttctctaccccaaccccgtgctcctcaacccacccacctacttcctctagctccacacactcacaagcaccgagctgccaaaaatttccacccaccgcccccctccctagctaacttccttccagcatttcctgagctggatgatcctaggatttgtaagacaggaaaaaaaggaaggcgtgagggcgggcagcagcgacaggatgcttgtttttcgctctaccaaagtcgtctgaaggcgagacagcgggcccagggcgcaggacccaccgcagccccctgggcagtctcctcgccccgcgtccgcgtcgtctccggggcacttagtaaggggtggggagagcttgccctccctcttaagctgaggagaaacacccgaagacaccgcaggagcctgtgaaagtccctaggactccaagtgaggaagtgacactcccaggcgagccggcccgcggctgccagtctgcacggcctcggcacggcggccccggagcggcgcggggtggatctcaggctctgccggcccgcggcccgcggggtccatgcgcagggcccccagcccaagttcttccatcttccgatgcggccccccagagccgcggggcagccggtgatctagcccgggagcccatcttacagcggtgccaagcagaggggcggcagagacggaggggcagcctctttgggactaactcatgaagaacaagggtgctaagcagaagctgaaacgaaagggagccgccagcgcgtttggctgtgacctgacggagtatctggaaagctcgggacaggatgttccatacgttttgaagagctgtgcagaatttatagagactcacggcatcgtggatggaatctatcggctttcaggagtcacctcaaacatacaacggctaaggcaagagtttggctcagatcaatgtccagatctgacaagggaagtgtacctccaggacatccactgtgtgggctcgctttgcaagctctactttagggagctgcccaaccccctcctgacttatgagctctatgagaaattcacggaggcagtgtcgcattgccctgaagaaggccaactggcccgaatccaaaatgttatccaggagcttcctccatcccactataggaccttggaatacctgattcgacacctggcccatatcgcctccttcagcagcaagaccaacatgcacgcccggaacctggccctggtgtgggcgccaaacctcctcaggtctaaagaaattgaagccactggttgcaatggagatgcagccttccttgcagtccgggtccagcaggtggtgattgagttcatattgaatcatgtagatcaaatctttaacaacggtgcacctgggtctctggagaatgatgaaaaccggcccatcatgaagagcctgaccttgccagccctctccctgcccatgaagctggtgagccttgaggaagctcaagcccgcagcctggccactaaccatcctgctcgcaaggaaaggagggagaacagcctgcctgagattgtccctcccatgggcaccctcttccacactgtccttgagttaccagacaacaagcgaaagctctccagtaaatcaaagaagtggaaatcaatatttaacctgggacgttctggatcagactccaaatcaaaactgagtagaaatgggagtgtatttgtgagaggacagaggctctcggtggaaaaggctactatccgaccagctaaaagcatggactcactatgttcagtgcctgtngaaggaaaagaaaccaagggaaatttcaatcgaacagttaccaccggtggatttttcattccagcaacaaagatgcactccaccggcaccggcagctcatgtgacctcaccaagcaggagggcgaatggggccaggaggggatgcctcccggggctgagggtggctttgatgtgagcagtgatcgcagccatctccagggcgctcaggcccggcccccaccggaacagctgaaggttttccggcctgttgaggatccggagagcgagcaaacagccccaaagatgttgggtatgttctacacttcgaacgacagccctagcaaatccgtcttcaccagcagcctcttccagatggagccctcgccgcgtaaccagcgcaaggcgctgaacatctccgagccctttgcggtatctgtgccgctccgcgtgtccgcagtcatcagcaccaacagcacgccgtgcagaacacccccgaaggagctgcagtctctttccagcctggaagagttttcttttcatggatcagagagcggaggctggccagaagaagagaaaccgctgggagctgagacttctgcagcttctgtacctaagaaggcaggtcttgaggatccaaggcagtacctgaagcaccngggacagtggaatgcagcaaaggcctgtcccaggagccaggcgcccacctggaggagaagaaaaccccagaaagctccttgagctctcaacatttaaatgaattagagaagaggccaaatccggagaaggtggtggaggagggacgagaggctggtgagatggagtccagcaccctgcaggagagccccagggccagagccgaagctgtgcttctccatgagatggatgaagatgatctggccaatgccctgatctggcctgagattcaacaggagctgaaaatcattgaatctgaggaggagctctcatcgttgccacctcctgctctgaagaccagcccaattcagcctattctcgagtcgagtctggggccctttattccctcagagcctcctgggagcttgccttgtggctccttccctgctccagtctccacccctctggaggtgtggactagggatccagccaatcagagcacacagggggcttccacagcagccagcagagagaagccggaacctgagcagggcctgcacccagacctcgccagcctggctcctctggaaatagttccttttgagaaggcatctccacaagcaacagtggaagtaggaggcccaggcaatctgtctcctccactcccacctgctcctccccctccaactcctctggaggagtcaactccagtcctgctttcaaagggcagcccggaaagagaagactcatccaggaaattgaggacagatctctacatagaccagctgaagtcccaagacagccctgagatctctagcctctgtcagggagaggaggcaaccccaagacacagtgacaagcaaaattcaaagaatgctgcttctgaggggaaaggctgtggttttccaagcccaaccagggaggttgagatcgtctcacaagaagaggaggatgtaacccattcagtacaggagccttcagactgtgacgaagatgacactgtgacagacattgcccagcatggcctggagatggtggagccctgggaggaaccccagtgggtgacgagtccccttcactctcccaccctgaaagacgcgcacaaggcccaggtacagggccttcagggtcaccagttggagaagaggctttcccacaggcccagccttcgccagagccattctctagatagcaaacccacggttaaaagccagtggactctcgaggttccctcctccagcagctgtgctaatcttgaaacagagaggaattctgaccctcttcagccccaggcacccaggagagagattactggatgggatgagaaagccctgaggtccttcagagagttctctggcctgaaaggggcagaggctcctcccaaccagaagggaccaagtggtgtgcaacccaacccagcagaaaccagccccatcagcctagcagagggaaaggagctagggacacacctggggcacagcagtccacagattaggcaaggtggtgttcctgggccagagagcagcaaggagagttcacccagcgtgcaggacagcacttcgcctggagagcaccccgcaaagttacagctaaagagcacagagtgtgggcccccaaaagggaaaaacaggccttcttccctcaacttggaccctgccattcccattgctgacctcttctggtttgagaatgtggcctcatttagttcacctggaatgcaggtctctgagccaggagacccaaaggtcacatggatgacctcatcttactgtaaagcagacccctggagggtttactcccaggacccccaggacctggacattgttgctcatgcactgacaggccgccgtaactcagctcctgtgagtgtgtcagctgtgagaacctccttcatggtcaaaatgtgccaggccagggcggtcccagtcatccctcccaagattcagtacacccagatcccacagcccctgccctctcagagctcaggggagaatggggttcagcctctggagaggagccaggagggacccagctcaaccagtgggaccactcagaaacctgccaaagatgattctccctcctccctggaaagctcaaaggaagaaaaaccaaagcaagatcccggagccattaagtcctcaccagtggatgccactgcaccctgcatgtgcgagggacctaccctttctccagaaccaggctcgtctaacctgctctccacccaggatgcagtagtgcaatgcagaaagcgcatgtcagagacagagccatctggggacaaccttctttcttcaaaactagagcgaccatctgggggttctaagcctttccacaggtcaaggccaggaagacctcagagcctaatcttattcagtcctcctttccccattatggaccacctgcccccttcatccacagtgacagattccaaggtcctgctgtcccctatcagaagtcccacccagacagtttcccctggccttctttgtggagagttggcagaaaacacatgggtcacaccagaaggggttacacttaggaataaaatgaccatccctaagaatggccagagactagagacctcaaccagctgtttttaccagcctcagcggagatcagtaattctggatggaagaagtgggaggcaaatagaatgatttcggttcacctgctggtgtctgaaaaaaaccgtgattcatctggaagttattacagggccagcttgccatattccaggcacacgttatcaagtttgggcctattgtggcctctgacttctctttcttcagccttttgaccacttattaattagtccatttgctagaagagtggtcaagggaaaaacgagagatgaaatttagttaagtctatgtgagcaagtgagagaaggttaggtaaggggagaggatggaatgcttgcctccaatgaactttggagcttgtatgtgagtcagattgctcccctattgctattatctattactcttgagagctggctgtcctttgaaagaaagaagtaatgttctttgaaagaaagaaaaatctcttgctgtgtcaaacctcaaaatgttgctattggggttagaaggcctcctctttatgctttttaatgctctttcaaacgtgttcttttagaccagttttctaataagctttgtaaaatgtactatccaaattagaagcggatttggaaatgcaaactaacgtgcacttagatatccaagtgggtgagcttagccactcttacccatgctctttccctggaatccctggagacctgtccaagatgatttccatataccagcatagaaaatcagaatcaagagcaaactctgagactggcacaatccaagaagatttcctggctctggcttttagtaatttgggactccaactgccactgtactggactgtaatttataaatccagtagctacgcagggtggaggctgggctgaggattaccataatgaaatgtactaaatcttcatttaggtatgcaattgtgaagtgaaggcatctgctttctttacagtatcagagtccaagaacaggatgtcaccatagataaaagcctcatacaaaggcagaactacactccaaatttaatgtgtttaaattggtggggcaccagcagaaaatacttctagctcagctttactcttcttccacactaggctgggcccagcaatacaggagaggatgaagggaggagctccaggaggcgagggaagagccctagcagggcggccatcacaaccactcactgagagttgcccttcttaaaaatgtattttattttagccagtgggtcccttcctttctcctttcctctctactgctcaagaacagatttgaggccaggtgcggtgcctcacatctgtaatcccaacactttgggaggctgagatgggtggattgcttgagcccaggagttcaagaccagcctgggcaacacagcgagaccccatctcttaaaaaataacagacttgaggaacccctctcccttccataattcccctcatccaccgcccactccaggcactcactcaaacttgctcttcaactctgtatacaagcagaagcaataaaccaatctgattttcttttcaattatttataactttcaatggttctttcctttccagctggcgagagaaaggagaactaatatacctgctggcagatttttggtgctgcccaaaaaaggacttcacagggcatctcttctcaggttcaagcctggctgaattctgcccagaagctcagtcattgcagaaatttctctaagggctgatagtacctctgggtaggcgtcacaaccaaggctggttctgggcttagtgggggctgagatgaagttacctcctccaatgagaaattgggagctgatgccctgcaacagatatatattcctctctctctctgtctctctatctctctcctccctctccctccctccctccccgccaataagccttacaaacagttttgaaatcttgttctgtaccttttaagccagtgtctgtggcgagggtgactggcaagtcagctgatgagttctgccttctgagagcactgagtgagcaaggcctttcatcagtgttttggccttctcattgggtgaggaagacattgaaccaacagccaacgagatatgaacctgtaagaaaaaagtcctagaatatagtatttttccccaggccagcaaagtgaagaaatacagtggtgacagatgagaaaggccatgttcaagagatctgaaaagtacattcctgccttatcagaaaatgtgtcagacaggttttatgtcagcctcagtgctcctgcggtgtcgacgctctgataaggaccatgttccagttagaatgcgagggagggaaagagctgcactttgcttcaccatcagaactctgagccaaataatgaatatgtaaactattttatgattattttaaatgtttgtttggtaacatttataagatctatttttatttggggatagactgagaagccaccatttacatattaacaagtgacttcagttctaagggttgagatgcctgtgtggatttataaaatggttgcaagatcttttagactctgacatttatagcatcaccttcaggaacacagttctggggatgtcatcatgagacacactgacagctgtggagatagtccctactctcagctttccttgctagtcaagtccaaaaggccttagaagctgactcaccttctcagccagagtcctgctgctcaagtgtggacctccactttgactctcacccagcctgccagccatcacaaaggctttcataaacttcctgtggtctgggctagcctggcactgatgaaattccattctaaagaaagaaaactcatattcctcccccccgcaaattgttcccccaaatgctctgggattacctatttcaccactcatttgagtctccgaaaaatgaactccctgagaatggctggatgggaatcagatagtctgcttccattcaggagagggacagaacaggagctgctgtgtttaggaggatttacctggtgccctagaaagggctatgcaatcaaattctcaagggctccttcaaatcagctatcagtcctcaaaatgggggttgctgatgttaaatgatggatttgcagtgaaacgcatgcatgtactgacgttttctttcagcattagtggttgcttaagaaaatagtaacctatattttctgctacacttggaatatgaagaaatctgaacaagaaccccattaagacacctaacctaatctaaaccctaaaattcaaaatattgtccaagtcaaaagtctagactctgaggacattaaaaatgtaaatatcatcatccttagcaaatatttattgggagcttagtaatagtgcactgggtaccttagcactcccaaatcattcaagagtctagtgaaaaagggggagggatggcagcaaataaaacacccccataaacaaccaggagcaaggttgagaaccattaagttgccaaacaaaagcagaaggggaaaaagtgtggcaacaagcatcttttaataggatagttgacggtattcaagtgacctactgactccaaataatcaaattgaacacaattgcaaatccaatagaacatcccagtgagacactcgggtatttgagaactttgcttgatttagaaaactggaaagtggcaactaggctagaatagtggcaactaggttcggaggtttcgtgtggtcataattggtttggtgaagtgtgagatctctgcaaatgagccaggtaagatcagtattccatagtgcttgaaaaggggattttagagacttctgtcatcacaaagcagattaactcctagttaatgatgaagcagtaggcccaagataaactgttcaattcaagataaattgttcttgtccagtgtttggcatatgataatcacatttggctaaaattggatgggacagtcatttgtctacacaggccttccattcctgcatgaagagatactggggagcatacaattattttggtccagtattagagtgggagaagttctcagtaagtccagtcccaccaggatttatttgggccacattctaccatggccagtccaatctgatgaccacatgaattggggttaagtgttgctaagactatgattttagacatgtctggcaggaaggtcagctcaaaatgtggcatgacaaagaatatgtgctctactaccaaaacctttcctagcaaaacaaggccagaagagggagcaagcatctttccaagcatggagaggagggggcaatggtggaagggtgattgcctgaaatcagtgccagtacagatagcataaaattgggggccaccacagattggctggctactgtgtagatcatttagtaatcttgaggtacattaataatgcagagattacttttctgtgagggtaagggggacgtagctaaatataagaagcttacaaggtccatagccatgtattttactggataaatcacaatgctttgcaataacttaatgtcatagtactttctggcttataattctgcaaagtaaagcactttttcaaaggagtctattggaaagccacatgatttcagctgtgttttaagctctacaaatacgtttccaaagacataatcaagatgtaattctattcattacaaatataaatattaaaactatccatagagacatttaagtaattaaaacagatttttatgctttaaaaataaatactctaataaatg
